United States Patent Application Publication US 2022/0211838 A1 - sequence listing, part 3

SEQ ID NO: 3386 - protein, 1147 aa, Artificial Sequence
  SARS-CoV-2/Finland/FIN03032020A/2020__EPI_ISL_413602 spike protein (1-1147)(F970C_G999C)
MFVFLVLLPLVSSQCVNLTTRTQLPPAYTNSFTRGVYYPDKVFRSSVLHSTQDLFLPFFSNVTWFHAIHVSGTNGTKRFDNPVLPFNDGVYFASTEKSNIIRGWIFGTTLDSKTQSLLIVNNATNVVIKVCEFQFCNDPFLGVYYHKNNKSWMESEFRVYSSANNCTFEYVSQPFLMDLEGKQGNFKNLREFVFKNIDGYFKIYSKHTPINLVRDLPQGFSALEPLVDLPIGINITRFQTLLALHRSYLTPGDSSSGWTAGAAAYYVGYLQPRTFLLKYNENGTITDAVDCALDPLSETKCTLKSFTVEKGIYQTSNFRVQPTESIVRFPNITNLCPFGEVFNATRFASVYAWNRKRISNCVADYSVLYNSASFSTFKCYGVSPTKLNDLCFTNVYADSFVIRGDEVRQIAPGQTGKIADYNYKLPDDFTGCVISWNSNNLDSKVGGNYNYLYRLFRKSNLKPFERDISTEIYQAGSTPCNGVEGFNCYFPLQSYGFQPTNGVGYQPYRVVVLSFELLHAPATVCGPKKSTNLVKNKCVNFNFNGLTGTGVLTESNKKFLPFQQFGRDIADTTDAVRDPQTLEILDITPCSFGGVSVITPGTNTSNQVAVLYQGVNCTEVPVAIHADQLTPTWRVYSTGSNVFQTRAGCLIGAEHVNNSYECDIPIGAGICASYQTQTNSPRRARSVASQSIIAYTMSLGAENSVAYSNNSIAIPTNFTISVTTEILPVSMTKTSVDCTMYICGDSTECSNLLLQYGSFCTQLNRALTGIAVEQDKNTQEVFAQVKQIYKTPPIKDFGGFNFSQILPDPSKPSKRSFIEDLLFNKVTLADAGFIKQYGDCLGDIAARDLICAQKFNGLTVLPPLLTDEMIAQYTSALLAGTITSGWTFGAGAALQIPFAMQMAYRFNGIGVTQNVLYENQKLIANQFNSAIGKIQDSLSSTASALGKLQDVVNQNAQALNTLVKQLSSNCGAISSVLNDILSRLDKVEAEVQIDRLITCRLQSLQTYVTQQLIRAAEIRASANLAATKMSECVLGQSKRVDFCGKGYHLMSFPQSAPHGVVFLHVTYVPAQEKNFTTAPAICHDGKAHFPREGVFVSNGTHWFVTQRNFYEPQIITTDNTFVSGNCDVVIGIVNNTVYDPLQPELDS

SEQ ID NO: 3387 - protein, 1147 aa, Artificial Sequence
  SARS-CoV-2/France/GE1977/2020__EPI_ISL_414632 spike protein (1-1147)(F970C_G999C)
MFVFLVLLPLVSSQCVNLTTRTQLPPAYTNSFTRGVYYPDKVFRSSVLHSTQDLFLPFFSNVTWFHAIHVSGTNGTKRFDNPVLPFNDGVYFASTEKSNIIRGWIFGTTLDSKTQSLLIVNNATNVVIKVCEFQFCNDPFLGVYYHKNNKSWMESEFRVYSSANNCTFEYVSQPFLMDLEGKQGNFKNLREFVFKNIDGYFKIYSKHTPINLVRDLPQGFSALEPLVDLPIGINITRFQTLLALHRSYLTPGDSSSGWTAGAAAYYVGYLQPRTFLLKYNENGTITDAVDCALDPLSETKCTLKSFTVEKGIYQTSNFRVQPTESIVRFPNITNLCPFGEVFNATRFASVYAWNRKRISNCVADYSVLYNSASFSTFKCYGVSPTKLNDLCFTNVYADSFVIRGDEVRQIAPGQTGKIADYNYKLPDDFTGCVIAWNSNNLDSKVGGNYNYLYRLFRKSNLKPFERDISTEIYQAGSTPCNGVEGFNCYFPLQSYGFQPTNGVGYQPYRVVVLSFELLHAPATVCGPKKSTNLVKNKCVNFNFNGLTGTGVLTESNKKFLPFQQFGRDIADTTDAVRDPQTLEILDITPCSFGGVSVITPGTNTSNQVAVLYQGVNCTEVPVAIHADQLTPTWRVYSTGSNVFQTRAGCLIGAEHVNNSYECDIPIGAGICASYQTQTNSPRRARSVASQSIIAYTMSLGAENSVAYSNNSIAIPTNFTISVTTEILPVSMTKTSVDCTMYICGDSTECSNLLLQYGSFCTQLNRALTGIAVEQDKNTQEVFAQVKQIYKTPPIKDFGGFNFSQILPDPSKPSKRSFIEDLLFNKVTLADAGFIKQYGDCLGDIAARDLICAQKFNGLTVLPPLLTDEMIAQYTSALLAGTITSGWTFGAGAALQIPFAMQMAYRFNGIGVTQNVLYENQKLIANQFNSAIGKIQDSLFSTASALGKLQDVVNQNAQALNTLVKQLSSNCGAISSVLNDILSRLDKVEAEVQIDRLITCRLQSLQTYVTQQLIRAAEIRASANLAATKMSECVLGQSKRVDFCGKGYHLMSFPQSAPHGVVFLHVTYVPAQEKNFTTAPAICHDGKAHFPREGVFVSNGTHWFVTQRNFYEPQIITTDNTFVSGNCDVVIGIVNNTVYDPLQPELDS

SEQ ID NO: 3388 - protein, 1147 aa, Artificial Sequence
  SARS-CoV-2/Finland/FIN-313/2020__EPI_ISL_414641 spike protein (1-1147)(F970C_G999C)
MFVFLVLLPLVSSQCVNLTTRTQLPPAYTNSFTRGVYYPDKVFRSSVLHSTQDLFLPFFSNVTWFHAIHVSGTNGTKRFDNPVLPFNDGVYFASTEKSNIIRGWIFGTTLDSKTQSLLIVNNATNVVIKVCEFQFCNDPFLGVYYHKNNKSWMESEFRVYSSANNCTFEYVSQPFLMDLEGKQGNFKNLREFVFKNIDGYFKIYSKHTPINLVRDLPQGFSALEPLVDLPIGINITRFKTLLALHRSYLTPGDSSSGWTAGAAAYYVGYLQPRTFLLKYNENGTITDAVDCALDPLSETKCTLKSFTVEKGIYQTSNFRVQPTESIVRFPNITNLCPFGEVFNATRFASVYAWNRKRISNCVADYSVLYNSASFSTFKCYGVSPTKLNDLCFTNVYADSFVIRGDEVRQIAPGQTGKIADYNYKLPDDFTGCVIAWNSNNLDSKVGGNYNYLYRLFRKSNLKPFERDISTEIYQAGSTPCNGVEGFNCYFPLQSYGFQPTNGVGYQPYRVVVLSFELLHAPATVCGPKKSTNLVKNKCVNFNFNGLTGTGVLTESNKKFLPFQQFGRDIADTTDAVRDPQTLEILDITPCSFGGVSVITPGTNTSNQVAVLYQGVNCTEVPVAIHADQLTPTWRVYSTGSNVFQTRAGCLIGAEHVNNSYECDIPIGAGICASYQTQTNSPRRARSVASQSIIAYTMSLGAENSVAYSNNSIAIPTNFTISVTTEILPVSMTKTSVDCTMYICGDSTECSNLLLQYGSFCTQLNRALTGIAVEQDKNTQEVFAQVKQIYKTPPIKDFGGFNFSQILPDPSKPSKRSFIEDLLFNKVTLADAGFIKQYGDCLGDIAARDLICAQKFNGLTVLPPLLTDEMIAQYTSALLAGTITSGWTFGAGAALQIPFAMQMAYRFNGIGVTQNVLYENQKLIANQFNSAIGKIQDSLSSTASALGKLQDVVNQNAQALNTLVKQLSSNCGAISSVLNDILSRLDKVEAEVQIDRLITCRLQSLQTYVTQQLIRAAEIRASANLAATKMSECVLGQSKRVDFCGKGYHLMSFPQSAPHGVVFLHVTYVPAQEKNFTTAPAICHDGKAHFPREGVFVSNGTHWFVTQRNFYEPQIITTDNTFVSGNCDVVIGIVNNTVYDPLQPELDS

SEQ ID NO: 3389 - protein, 1147 aa, Artificial Sequence
  SARS-CoV-2/Netherlands/ZuidHolland_2/2020__EPI_ISL_414556 spike protein (1-1147)(F970C_G999C)
MFVFLVLLPLVSSQCVNLTTRTQLPPAYTNSFTRGVYYPDKVFRSSVLHSTQDLFLPFFSNVTWFHAIHVSGTNGTKRFDNPVLPFNDGVYFASTEKSNIIRGWIFGTTLDSKTQSLLIVNNATNVVIKVCEFQFCNDPFLGVYYHKNNKSWMESEFRVYSSANNCTFEYVSQPFLMDLEGKQGNFKNLREFVFKNIDGYFKIYSKHTPINLVRDLPQGFSALEPLVDLPIGINITRFQTLLALHRSYLTPGDSSSGWTAGAAAYYVGYLQPRTFLLKYNENGTITDAVDCALDPLSETKCTLKSFTVEKGIYQTSNFRVQPTESIVRFPNITNLCPFGEVFNATRFASVYAWNRKRISNCVADYSVLYNSASFSTFKCYGVSPTKLNDLCFTNVYADSFVIRGDEVRQIAPGQTGKIADYNYKLPDDFTGCVIAWNSNNLDSKVGGNYNYLYRLFRKSNLKPFERDISTEIYQAGSTPCNGVEGFNCYFPLQSYGFQPTNGVGYQPYRVVVLSFELLHAPATVCGPKKSTNLVKNKCVNFNFNGLTGTGVLTESNKKFLPFQQFGRDIADTTDAVRDPQTLEILDITPCSFGGVSVITPGTNTSNQVAVLYQGVNCTEVPVAIHADQLTPTWRVYSTGSNVFQTRAGCLIGAEHVNNSYECDIPIGAGICASYQTQTNSPRRARSVASQSIIAYTMSLGAENSVAYSNNSIAIPTNFTISVTTEILPVSMTKTSVDCTMYICGDSTECSNLLLQYGSFCTQLNRALTGIALEQDKNTQEVFAQVKQIYKTPPIKDFGGFNFSQILPDPSKPSKRSFIEDLLFNKVTLADAGFIKQYGDCLGDIAARDLICAQKFNGLTVLPPLLTDEMIAQYTSALLAGTITSGWTFGAGAALQIPFAMQMAYRFNGIGVTQNVLYENQKLIANQFNSAIGKIQDSLSSTASALGKLQDVVNQNAQALNTLVKQLSSNCGAISSVLNDILSRLDKVEAEVQIDRLITCRLQSLQTYVTQQLIRAAEIRASANLAATKMSECVLGQSKRVDFCGKGYHLMSFPQSAPHGVVFLHVTYVPAQEKNFTTAPAICHDGKAHFPREGVFVSNGTHWFVTQRNFYEPQIITTDNTFVSGNCDVVIGIVNNTVYDPLQPELDS

SEQ ID NO: 3390 - protein, 1147 aa, Artificial Sequence
  SARS-CoV-2/USA/WA-UW31/2020__EPI_ISL_414618 spike protein (1-1147)(F970C_G999C)
MFVFLVLLPLVSSQCVNLTTRTQLPPAYTNSFTRGVYYPDKVFRSSVLHSTQDLFLPFFSNVTWFHAIHVSGTNGTKRFDNPVLPFNDGVYFASTEKSNIIRGWIFGTTLDSKTQSLLIVNNATNVVIKVCEFQFCNDPFLGVYYHKNNKSWMESEFRVYSSANNCTFEYVSQPFLMDLEGKQGNFKNLREFVFKNIDGYFKIYSKHTPINLVRDLPQGFSALEPLVDLPIGINITRFQTLLALHRSYLTPGDSSSGWTAGAAAYYVGYLQPRTFLLKYNENGTITDAVDCALDPLSETKCTLKSFTVEKGIYQTSNFRVQPTESIVRFPNITNLCPFGEVFNATRFASVYAWNRKRISNCVADYSVLYNSASFSTFKCYGVSPTKLNDLCFTNVYADSFVIRGDEVRQIAPGQTGKIADYNYKLPDDFTGCVIAWNSNNLDSKVGGNYNYLYRLFRKSNLKPFERDISTEIYQAGSTPCNGAEGFNCYFPLQSYGFQPTNGVGYQPYRVVVLSFELLHAPATVCGPKKSTNLVKNKCVNFNFNGLTGTGVLTESNKKFLPFQQFGRDIADTTDAVRDPQTLEILDITPCSFGGVSVITPGTNTSNQVAVLYQDVNCTEVPVAIHADQLTPTWRVYSTGSNVFQTRAGCLIGAEHVNNSYECDIPIGAGICASYQTQTNSPRRARSVASQSIIAYTMSLGAENSVAYSNNSIAIPTNFTISVTTEILPVSMTKTSVDCTMYICGDSTECSNLLLQYGSFCTQLNRALTGIAVEQDKNTQEVFAQVKQIYKTPPIKDFGGFNFSQILPDPSKPSKRSFIEDLLFNKVTLADAGFIKQYGDCLGDIAARDLICAQKFNGLTVLPPLLTDEMIAQYTSALLAGTITSGWTFGAGAALQIPFAMQMAYRFNGIGVTQNVLYENQKLIANQFNSAIGKIQDSLSSTASALGKLQDVVNQNAQALNTLVKQLSSNCGAISSVLNDILSRLDKVEAEVQIDRLITCRLQSLQTYVTQQLIRAAEIRASANLAATKMSECVLGQSKRVDFCGKGYHLMSFPQSAPHGVVFLHVTYVPAQEKNFTTAPAICHDGKAHFPREGVFVSNGTHWFVTQRNFYEPQIITTDNTFVSGNCDVVIGIVNNTVYDPLQPELDS

SEQ ID NO: 3391 - protein, 1147 aa, Artificial Sequence
  SARS-CoV-2/South Korea/SNU01/2020__EPI_ISL_411929 spike protein (1-1147)(F970C_G999C)
MFVFLVLLPLVSSQCVNLTTRTQLPPAYTNSFTRGVYYPDKVFRSSVLHSTQDLFLPFFSNVTWFHAIHVSGTNGTKRFDNPVLPFNDGVYFASTEKSNIIRGWIFGTTLDSKTQSLLIVNNATNVVIKVCEFQFCNDPFLGVYYHKNNKSWMESEFRVYSSANNCTFEYVSQPFLMDLEGKQGNFKNLREFVFKNIDGYFKIYSKHTPINLVRDLPQGFWALEPLVDLPIGINITRFQTLLALHRSYLTPGDSSSGWTAGAAAYYVGYLQPRTFLLKYNENGTITDAVDCALDPLSETKCTLKSFTVEKGIYQTSNFRVQPTESIVRFPNITNLCPFGEVFNATRFASVYAWNRKRISNCVADYSVLYNSASFSTFKCYGVSPTKLNDLCFTNVYADSFVIRGDEVRQIAPGQTGKIADYNYKLPDDFTGCVIAWNSNNLDSKVGGNYNYLYRLFRKSNLKPFERDISTEIYQAGSTPCNGVEGFNCYFPLQSYGFQPTNGVGYQPYRVVVLSFELLHAPATVCGPKKSTNLVKNKCVNFNFNGLTGTGVLTESNKKFLPFQQFGRDIADTTDAVRDPQTLEILDITPCSFGGVSVITPGTNTSNQVAVLYQDVNCTEVPVAIHADQLTPTWRVYSTGSNVFQTRAGCLIGAEHVNNSYECDIPIGAGICASYQTQTNSPRRARSVASQSIIAYTMSLGAENSVAYSNNSIAIPTNFTISVTTEILPVSMTKTSVDCTMYICGDSTECSNLLLQYGSFCTQLNRALTGIAVEQDKNTQEVFAQVKQIYKTPPIKDFGGFNFSQILPDPSKPSKRSFIEDLLFNKVTLADAGFIKQYGDCLGDIAARDLICAQKFNGLTVLPPLLTDEMIAQYTSALLAGTITSGWTFGAGAALQIPFAMQMAYRFNGIGVTQNVLYENQKLIANQFNSAIGKIQDSLSSTASALGKLQDVVNQNAQALNTLVKQLSSNCGAISSVLNDILSRLDKVEAEVQIDRLITCRLQSLQTYVTQQLIRAAEIRASANLAATKMSECVLGQSKRVDFCGKGYHLMSFPQSAPHGVVFLHVTYVPAQEKNFTTAPAICHDGKAHFPREGVFVSNGTHWFVTQRNFYEPQIITTDNTFVSGNCDVVIGIVNNTVYDPLQPELDS

SEQ ID NO: 3392 - protein, 1147 aa, Artificial Sequence
  SARS-CoV-2/China/WF0004/2020__EPI_ISL_413694 spike protein (1-1147)(F970C_G999C)
MFVFLVLLPLVSSQCVNLTTRTQLPPAYTNSFTRGVYYPDKVFRSSVLHSTQDLFLPFFSNVTWFHAIHVSGTNGTKRFDNPVLPFNDGVYFASTEKSNIIRGWIFGTTLDSKTQSLLIVNNATNVVIKVCEFQFCNDPFLGVYYHKNNKSWTESEFRVYSSANNCTFEYVSQPFLMDLEGKQGNFKNLREFVFKNIDGYFKIYSKHTPINLVRDLPQGFSALEPLVDLPIGINITRFQTLLALHRSYLTPGDSSSGWTAGAAAYYVGYLQPRTFLLKYNENGTITDAVDCALDPLSETKCTLKSFTVEKGIYQTSNFRVQPTESIVRFPNITNLCPFGEVFNATRFASVYAWNRKRISNCVADYSVLYNSASFSTFKCYGVSPTKLNDLCFTNVYADSFVIRGDEVRQIAPGQTGKIADYNYKLPDDFTGCVIAWNSNNLDSKVGGNYNYLYRLFRKSNLKPFERDISTEIYQAGSTPCNGVEGFNCYFPLQSYGFQPTNGVGYQPYRVVVLSFELLHAPATVCGPKKSTNLVKNKCVNFNFNGLTGTGVLTESNKKFLPFQQFGRDIADTTDAVRDPQTLEILDITPCSFGGVSVITPGTNTSNQVAVLYQDVNCTEVPVAIHADQLTPTWRVYSTGSNVFQTRAGCLIGAEHVNNSYECDIPIGAGICASYQTQTNSPRRARSVASQSIIAYTMSLGAENSVAYSNNSIAIPTNFTISVTTEILPVSMTKTSVDCTMYICGDSTECSNLLLQYGSFCTQLNRALTGIAVEQDKNTQEVFAQVKQIYKTPPIKDFGGFNFSQILPDPSKPSKRSFIEDLLFNKVTLADAGFIKQYGDCLGDIAARDLICAQKFNGLTVLPPLLTDEMIAQYTSALLAGTITSGWTFGAGAALQIPFAMQMAYRFNGIGVTQNVLYENQKLIANQFNSAIGKIQDSLSSTASALGKLQDVVNQNAQALNTLVKQLSSNCGAISSVLNDILSRLDKVEAEVQIDRLITCRLQSLQTYVTQQLIRAAEIRASANLAATKMSECVLGQSKRFDFCGKGYHLMSFPQSAPHGVVFLHVTYVPAQEKNFTTAPAICHDGKAHFPREGVFVSNGTHWFVTQRNFYEPQIITTDNTFVSGNCDVVIGIVNNTVYDPLQPELDS

SEQ ID NO: 3393 - protein, 1147 aa, Artificial Sequence
  SARS-CoV-2/China/WF0028/2020__EPI_ISL_413791 spike protein (1-1147)(F970C_G999C)
MFVFLVLLPLVSSQCVNLTTRTQLPPAYTNSFTRGVYYPDKVFRSSVLHSTQDLFLPFFSNVTWFHAIHVSGTNGTKRFDNPVLPFNDGVYFASTEKSNIIRGWIFGTTLDSKTQSLLIVNNATNVVIKVCEFQFCNDPFLGVYYHKNNKSWMESEFRVYSSANNCTFEYVSQPFLMDLEGKQGNFKNLREFVFKNIDGYFKIYSKHTPINLVRDLPQGFSALEPLVDLPIGINITRFQTLLALHRSYLTPGDSSSGWTAGAAAYYVGYLQPRTFLLKYNENGTITDAVDCALDPLSETKCTLKSFTVEKGIYQTSNFRVQPTESIVRFPNITNLCPFGEVFNATRFASVYAWNRKRISNCVADYSVLYNSASFSTFKCYGVSPTKLNDLCFTNVYADSFVIRGDEVRQIAPGQTGKIADYNYKLPDDFTGCVIAWNSNNLDSKVGGNYNYLYRLFRKSNLKPFERDISTEIYQAGSTPCNGVEGFNCYFPLQSYGFQPTNGVGYQPYRVVVLSFELLHAPATVCGPKKSTNLVKNKCVNFNFNGLTGTGVLTESNKKFLPFQQFGRDIADTTDAVRDPQTLEILDITPCSFGGVSVITPGTNTSNQVAVLYQDVNCTEVPVAIHADQLTPTWRVYSTGSNVFQTRAGCLIGAEHVNNSYECDIPIGAGICASYQTQTNSPRRARSVASQSIIAYTMSLGAENSVAYSNNSIAIPTNFTISVTTEILPVSMTKTSVDCTMYICGDSTECSNLLLQYGSFCTQLNRALTGIAVEQDKNTQEVFAQVKQIYKTPPIKDFGGFNFSQILPDPSKPSKRSFIEDLLFNKVTLADAGFIKQYGDCLGDIAARDLICAQKFNGLTVLPPLLTDEMIAQYTSALLAGTITSGWTFGAGAALQIPFAMQMAYRFNGIGVTQNVLYENQKLIANQFNSAIGKIQDSLSSTASALGKLQDVVNQNAQALNTLVKQLSSNCGAISSVLNDILSRLDKVEAEVQIDRLITCRLQSLQTYVTQQLIRAAEIRASANLAATKMSECVLGQSKRVDFCGKGYHLMSFPQSAPHGVVFLHVTYVPAQEKNFTTAPAICHDGKAHFPREGVFVSNGTHWFVTQRNFYEPQIITTDNTFVSGNCDVVIGIVNNTVYDPLQPELES

SEQ ID NO: 3394 - protein, 1147 aa, Artificial Sequence
  SARS-CoV-2/2019-nCoV/USA-CruiseA-18/2020__MT159716.1 spike protein (1-1147)(F970C_G999C)
MFVFLVLLPLVSSQCVNLTTRTQLPPAYTNSFTRGVYYPDKVFRSSVLHSTQDLFLPFFSNVTWFHAIHVSGTNGTKRFDNPVLPFNDGVYFASTEKSNIIRGWIFGTTLDSKTQSLLIVNNATNVVIKVCEFQFCNDPFLGVYYHKNNKSWMESELRVYSSANNCTFEYVSQPFLMDLEGKQGNFKNLREFVFKNIDGYFKIYSKHTPINLVRDLPQGFSALEPLVDLPIGINITRFQTLLALHRSYLTPGDSSSGWTAGAAAYYVGYLQPRTFLLKYNENGTITDAVDCALDPLSETKCTLKSFTVEKGIYQTSNFRVQPTESIVRFPNITNLCPFGEVFNATRFASVYAWNRKRISNCVADYSVLYNSASFSTFKCYGVSPTKLNDLCFTNVYADSFVIRGDEVRQIAPGQTGKIADYNYKLPDDFTGCVIAWNSNNLDSKVGGNYNYLYRLFRKSNLKPFERDISTEIYQAGSTPCNGVEGFNCYFPLQSYGFQPTNGVGYQPYRVVVLSFELLHAPATVCGPKKSTNLVKNKCVNFNFNGLTGTGVLTESNKKFLPFQQFGRDIADTTDAVRDPQTLEILDITPCSFGGVSVITPGTNTSNQVAVLYQDVNCTEVPVAIHADQLTPTWRVYSTGSNVFQTRAGCLIGAEHVNNSYECDIPIGAGICASYQTQTNSPRRARSVASQSIIAYTMSLGAENSVAYSNNSIAIPTNFTISVTTEILPVSMTKTSVDCTMYICGDSTECSNLLLQYGSFCTQLNRALTGIAVEQDKNTQEVFAQVKQIYKTPPIKDFGGFNFSQILPDPSKPSKRSFIEDLLFNKVTLADAGFIKQYGDCLGDIAARDLICAQKFNGLTVLPPLLTDEMIAQYTSALLAGTITSGWTFGAGAALQIPFAMQMAYRFNGIGVTQNVLYENQKLIANQFNSAIGKIQDSLSSTASALGKLQDVVNQNAQALNTLVKQLSSNCGAISSVLNDILSRLDKVEAEVQIDRLITCRLQSLQTYVTQQLIRAAEIRASANLAATKMSECVLGQSKRVDFCGKGYHLMSFPQSAPHGVVFLHVTYVPAQEKNFTTAPAICHDGKAHFPREGVFVSNGTHWFVTQRNFYEPQIITTDNTFVSGNCDVVIGIVNNTVYDPLQPELDS

SEQ ID NO: 3395 - protein, 1147 aa, Artificial Sequence
  SARS-CoV-2/SARS-CoV-2/Yunnan-01/human/2020/CHN__MT049951.1 spike protein (1-1147)(F970C_G999C)
MFVFLVLLPLVSSQCVNLTTRTQLPPANTNSFTRGVYYPDKVFRSSVLHSTQDLFLPFFSNVTWFHAIHVSGTNGTKRFDNPVLPFNDGVYFASTEKSNIIRGWIFGTTLDSKTQSLLIVNNATNVVIKVCEFQFCNDPFLGVYYHKNNKSWMESEFRVYSSANNCTFEYVSQPFLMDLEGKQGNFKNLREFVFKNIDGYFKIYSKHTPINLVRDLPQGFSALEPLVDLPIGINITRFQTLLALHRSYLTPGDSSSGWTAGAAAYYVGYLQPRTFLLKYNENGTITDAVDCALDPLSETKCTLKSFTVEKGIYQTSNFRVQPTESIVRFPNITNLCPFGEVFNATRFASVYAWNRKRISNCVADYSVLYNSASFSTFKCYGVSPTKLNDLCFTNVYADSFVIRGDEVRQIAPGQTGKIADYNYKLPDDFTGCVIAWNSNNLDSKVGGNYNYLYRLFRKSNLKPFERDISTEIYQAGSTPCNGVEGFNCYFPLQSYGFQPTNGVGYQPYRVVVLSFELLHAPATVCGPKKSTNLVKNKCVNFNFNGLTGTGVLTESNKKFLPFQQFGRDIADTTDAVRDPQTLEILDITPCSFGGVSVITPGTNTSNQVAVLYQDVNCTEVPVAIHADQLTPTWRVYSTGSNVFQTRAGCLIGAEHVNNSYECDIPIGAGICASYQTQTNSPRRARSVASQSIIAYTMSLGAENSVAYSNNSIAIPTNFTISVTTEILPVSMTKTSVDCTMYICGDSTECSNLLLQYGSFCTQLNRALTGIAVEQDKNTQEVFAQVKQIYKTPPIKDFGGFNFSQILPDPSKPSKRSFIEDLLFNKVTLADAGFIKQYGDCLGDIAARDLICAQKFNGLTVLPPLLTDEMIAQYTSALLAGTITSGWTFGAGAALQIPFAMQMAYRFNGIGVTQNVLYENQKLIANQFNSAIGKIQDSLSSTASALGKLQDVVNQNAQALNTLVKQLSSNCGAISSVLNDILSRLDKVEAEVQIDRLITCRLQSLQTYVTQQLIRAAEIRASANLAATKMSECVLGQSKRVDFCGKGYHLMSFPQSAPHGVVFLHVTYVPAQEKNFTTAPAICHDGKAHFPREGVFVSNGTHWFVTQRNFYEPQIITTDNTFVSGNCDVVIGIVNNTVYDPLQPELDS

SEQ ID NO: 3396 - protein, 1147 aa, Artificial Sequence
  SARS-CoV-2/USA/WA-UW292/2020__EPI_ISL_418077 spike protein (1-1147)(F970C_G999C)
MFVFLVLLPLVSSQCVNLTTRTQLPPAYTNSFTRGVYYPDKVFRSSVLHSTQDLFLPFFSNVTWFHAIHVSGTNGTKRFDNPVLPFNDGVYFASTEKSNIIRGWIFGTTLDSKTQSLLIVNNATNVVIKVCEFQFCNDPFLGVYYHKNNKSWMESEFRVYSSANNCTFEYVSQPFLMDLEGKQGNFKNLREFVFKNIDGYFKIYSKHTPINLVRDLPQGFSALEPLVDLPIGINITRFQTLLALHRSYLTPGDSSSGWTAGAAAYYVGYLQPRTFLLKYNENGTITDAVDCALDPLSETKCTLKSFTVEKGIYQTSNFRVQPTESIVRFPNITNLCPFGEVFNATRFASVYAWNRKRISNCVADYSVLYNSASFSTFKCYGVSPTKLNDLCFTNVYADSFVIRGDEVRQIAPGQTGKIADYNYKLPDDFTGCVIAWNSNNLDSKVGGNYNYLYRLFRKSNLKPFERDISTEIYQASSTPCNGVEGFNCYFPLQSYGFQPTNGVGYQPYRVVVLSFELLHAPATVCGPKKSTNLVKNKCVNFNFNGLTGTGVLTESNKKFLPFQQFGRDIADTTDAVRDPQTLEILDITPCSFGGVSVITPGTNTSNQVAVLYQDVNCTEVPVAIHADQLTPTWRVYSTGSNVFQTRAGCLIGAEHVNNSYECDIPIGAGICASYQTQTNSPRRARSVASQSIIAYTMSLGAENSVAYSNNSIAIPTNFTISVTTEILPVSMTKTSVDCTMYICGDSTECSNLLLQYGSFCTQLNRALTGIAVEQDKNTQEVFAQVKQIYKTPPIKDFGGFNFSQILPDPSKPSKRSFIEDLLFNKVTLADAGFIKQYGDCLGDIAARDLICAQKFNGLTVLPPLLTDEMIAQYTSALLAGTITSGWTFGAGAALQIPFAMQMAYRFNGIGVTQNVLYENQKLIANQFNSAIGKIQDSLSSTASALGKLQDVVNQNAQALNTLVKQLSSNCGAISSVLNDILSRLDKVEAEVQIDRLITCRLQSLQTYVTQQLIRAAEIRASANLAATKMSECVLGQSKRVDFCGKGYHLMSFPQSAPHGVVFLHVTYVPAQEKNFTTAPAICHDGKAHFPREGVFVSNGTHWFVTQRNFYEPQIITTDNTFVSGNCDVVIGIVNNTVYDPLQPELDS

SEQ ID NO: 3397 - protein, 1147 aa, Artificial Sequence
  SARS-CoV-2/Iceland/192/2020__EPI_ISL_417819 spike protein (1-1147)(F970C_G999C)
MFVFFVLLPLVSSQCVNLTTRTQLPPAYTNSFTRGVYYPDKVFRSSVLHSTQDLFLPFFSNVTWFHAIHVSGTNGTKRFDNPVLPFNDGVYFASTEKSNIIRGWIFGTTLDSKTQSLLIVNNATNVVIKVCEFQFCNDPFLGVYYHKNNKSWMESEFRVYSSANNCTFEYVSQPFLMDLEGKQGNFKNLREFVFKNIDGYFKIYSKHTPINLVRDLPQGFSALEPLVDLPIGINITRFQTLLALHRSYLTPGDSSSGWTAGAAAYYVGYLQPRTFLLKYNENGTITDAVDCALDPLSETKCTLKSFTVEKGIYQTSNFRVQPTESIVRFPNITNLCPFGEVFNATRFASVYAWNRKRISNCVADYSVLYNSASFSTFKCYGVSPTKLNDLCFTNVYADSFVIRGDEVRQIAPGQTGKIADYNYKLPDDFTGCVIAWNSNNLDSKVGGNYNYLYRLFRKSNLKPFERDISTEIYQAGSTPCNGVEGFNCYFPLQSYGFQPTNGVGYQPYRVVVLSFELLHAPATVCGPKKSTNLVKNKCVNFNFNGLTGTGVLTESNKKFLPFQQFGRDIADTTDAVRDPQTLEILDITPCSFGGVSVITPGTNTSNQVAVLYQGVNCTEVPVAIHADQLTPTWRVYSTGSNVFQTRAGCLIGAEHVNNSYECDIPIGAGICASYQTQTNSPRRARSVASQSIIAYTMSLGAENSVAYSNNSIAIPTNFTISVTTEILPVSMTKTSVDCTMYICGDSTECSNLLLQYGSFCTQLNRALTGIAVEQDKNTQEVFAQVKQIYKTPPIKDFGGFNFSQILPDPSKPSKRSFIEDLLFNKVTLADAGFIKQYGDCLGDIAARDLICAQKFNGLTVLPPLLTDEMIAQYTSALLAGTITSGWTFGAGAALQIPFAMQMAYRFNGIGVTQNVLYENQKLIANQFNSAIGKIQDSLSSTASALGKLQDVVNQNAQALNTLVKQLSSNCGAISSVLNDILSRLDKVEAEVQIDRLITCRLQSLQTYVTQQLIRAAEIRASANLAATKMSECVLGQSKRVDFCGKGYHLMSFPQSAPHGVVFLHVTYVPAQEKNFTTAPAICHDGKAHFPREGVFVSNGTHWFVTQRNFYEPQIITTDNTFVSGNCDVVIGIVNNTVYDPLQPELDS

SEQ ID NO: 3398 - protein, 1147 aa, Artificial Sequence
  SARS-CoV-2/Belgium/ULG-6939/2020__EPI_ISL_417020 spike protein (1-1147)(F970C_G999C)
MFVFLVLLPLVSSQCVNLTTRTQLPPAYTNSFTRGVYYPDKVFRSSVLHSTQDLFLPFFSNVTWFHAIHVSGTNGTKRFDNPVLPFNDGVYFASTEKSNIIRGWIFGTTLDSKTQSLLIVNNATNVVIKVCEFQFCNDPFLGVYYHKNNKSWMESEFRVYSSANNCTFEYVSQPFLMDLEGKQGNFKNLREFVFKNIDGYFKIYSKHTPINLVRDLPQGFSALEPLVDLPIGINITRFQTLLALHRSYLTPGDSSSGWTAGAAAYYVGYLQPRTFLLKYNENGTITDAVDCALDPLSETKCTLKSFTVEKGIYQTSNFRVQPTESIVRFPNITNLCPFGEVFNATRFASVYAWNRKRISNCVADYSVLYNSASFSTFKCYGVSPTKLNDLCFTNVYADSFVIRGDEVRQIAPGQTGKIADYNYKLPDDFTGCVIAWNSNNLDSKVGGNYNYLYRLFRKSNLKPFERDISTEIYQAGSTPCNGVEGFNCYFPLQSYGFQPTNGVGYQPYRVVVLSFELLHAPATVCGPKKSTNLVKNKCVNFNFNGLTGTGVLTESNKKFLPFQQFGRDIADTTDAVRDPQTLEILDITPCSFGGVSVITPGTNTSNQVAVLYQGVNCTEVPVAIHADQLTPTWRVYSTGSNVFQTRAGCLIGAEHVNNSYECDIPIGAGICASYQTQTNSPRRARSVASQSIIAYTMSLGAENSVVYSNNSIAIPTNFTISVTTEILPVSMTKTSVDCTMYICGDSTECSNLLLQYGSFCTQLNRALTGIAVEQDKNTQEVFAQVKQIYKTPPIKDFGGFNFSQILPDPSKPSKRSFIEDLLFNKVTLADAGFIKQYGDCLGDIAARDLICAQKFNGLTVLPPLLTDEMIAQYTSALLAGTITSGWTFGAGAALQIPFAMQMAYRFNGIGVTQNVLYENQKLIANQFNSAIGKIQDSLSSTASALGKLQDVVNQNAQALNTLVKQLSSNCGAISSVLNDILSRLDKVEAEVQIDRLITCRLQSLQTYVTQQLIRAAEIRASANLAATKMSECVLGQSKRVDFCGKGYHLMSFPQSAPHGVVFLHVTYVPAQEKNFTTAPAICHDGKAHFPREGVFVSNGTHWFVTQRNFYEPQIITTDNTFVSGNCDVVIGIVNNTVYDPLQPELDS

SEQ ID NO: 3399 - protein, 1147 aa, Artificial Sequence
  SARS-CoV-2/France/HF2496/2020__EPI_ISL_418231 spike protein (1-1147)(F970C_G999C)
MFVFLVLLPLVSSQCVNLTTRTQLPPAYTNSFTRGVYYPDKVFRSSVLHSTQDLFLPFFSNVTWFHAIHVSGTNGTKRFDNPVLPFNDGVYFASTEKSNIIRGWIFGTTLDSKTQSLLIVNNATNVVIKVCEFQFCNDPFLGVYYHKNNKSWMESEFRVYSSANNCTFEYVSQPFLMDLEGKQGNFKNLREFVFKNIDGYFKIYSKHTPINLVRDLPQGFSALEPLVDLPIGINITRFQTLLALHRSYLTPGDSSSGWTAGAAAYYVGYLQPRTFLLKYNENGTITDAVDCALDPLSETKCTLKSFTVEKGIYQTSNFRVQPTESIVRFPNITNLCPFGEVFNATRFASVYAWNRKRISNCVADYSVLYNSASFSTFKCYGVSPTKLNDLCFTNVYADSFVIRGDEVRQIAPGQTGKIADYNYKLPDDFTGCVIAWNSNNLDSKVGGNYNYLYRLFRKSNLKPFERDISTEIYQAGSTPCNGVEGFNCYFPLQSYGFQPTNGVGYQPYRVVVLSFELLHAPATVCGPKKSTNLVKNKCVNFNFNGLTGTGVLTESNKKFLPFQQFGRDIADTTDAVRDPQTLEILDITPCSFGGVSVITPGTNTSNQVAVLYQGVNCTEVPVAIHADQLTPTWRVYSTGSNVFQTRAGCLIGAEHVNNSYECDIPIGAGICASYQTQTNSPRRARSVASQSIIAYTMSLGAENSVAYSNNSIAIPTNFTISVTTEILPVSMTKTSVDCTMYICGDSTECSNLLLQYGSFCTQLNRALTGIAVEQDKNTQEVFAQVKQIYKTPPIKDFGGFNFSQILPDPSKPSKRSFIEDLLFNKVTLADAGFIKQYGDCLGDIVARDLICAQKFNGLTVLPPLLTDEMIAQYTSALLAGTITSGWTFGAGAALQIPFAMQMAYRFNGIGVTQNVLYENQKLIANQFNSAIGKIQDSLSSTASALGKLQDVVNQNAQALNTLVKQLSSNCGAISSVLNDILSRLDKVEAEVQIDRLITCRLQSLQTYVTQQLIRAAEIRASANLAATKMSECVLGQSKRVDFCGKGYHLMSFPQSAPHGVVFLHVTYVPAQEKNFTTAPAICHDGKAHFPREGVFVSNGTHWFVTQRNFYEPQIITTDNTFVSGNCDVVIGIVNNTVYDPLQPELDS

SEQ ID NO: 3400 - protein, 1147 aa, Artificial Sequence
  SARS-CoV-2/USA/WA-UW291/2020__EPI_ISL_418076 spike protein (1-1147)(F970C_G999C)
MFVFLVLLPLVSSQCVNLTTRTQLPPAYTNSFTRGVYYPDKVFRSSVLHSTQDLFLPFFSNVTWFHAIHVSGTNGTKRFDNPVLPFNDGVYFASTEKSNIIRGWIFGTTLDSKTQSLLIVNNATNVVIKVCEFQFCNDPFLGVYYHKNNKSWMESEFRVYSSANNCTFEYVSQPFLMDLEGKQGNFKNLREFVFKNIDGYFKIYSKHTPINLVRDLPQGFSALEPLVDLPIGINITRFQTLLALHRSYLTPGDSSSGWTAGAAAYYVGYLQPRTFLLKYNENGTITDAVDCALDPLSETKCTLKSFTVEKGIYQTSNFRVQPTESIVRFPNITNLCPFGEVFNATRFASVYAWNRKRISNCVADYSVLYNSASFSTFKCYGVSPTKLNDLCFTNVYADSFVIRGDEVRQIAPGQTGKIADYNYKLPDDFTGCVIAWNSNNLDSKVGGNYNYLYRLFRKSNLKPFERDISTEIYQAGSTPCNGVEGFNCYFPLQSYGFQPTNGVGYQPYRVVVLSFELLHAPATVCGPKKSTNLVKNKCVNFNFNGLTGTGVLTESNKKFLPFQQFGRDIADTTDAVRDPQTLEILDITPCSFGGVSVITPGTNTSNQVAVLYQGVNCTEVPVAIHADQLTPTWRVYSTGSNVFQTRAGCLIGAEHVNNSYECDIPIGAGICASYQTQTNSPRRARSVASQSIIAYTMSLGAENSVAYSNNSIAIPTNFTISVTTEILPVSMTKTSVDCTMYICGDSTECSNLLLQYGSFCTQLNRALTGIAVEQDKNTQEVFAQVKQIYKTPPIKDFGGFNFSQILPDPSKPSKRSFIEDLLFNKVTLADAGFIKQYGDCLGDIAARDLICAQKFNGLTVLPPLLTDEMIAQYTSALLAGTITSGWTFGAGAALQIPFAMQMAYRFNGIGVTQNVLYENQKLIANQFNSAIGKIQYSLSSTASALGKLQDVVNQNAQALNTLVKQLSSNCGAISSVLNDILSRLDKVEAEVQIDRLITCRLQSLQTYVTQQLIRAAEIRASANLAATKMSECVLGQSKRVDFCGKGYHLMSFPQSAPHGVVFLHVTYVPAQEKNFTTAPAICHDGKAHFPREGVFVSNGTHWFVTQRNFYEPQIITTDNTFVSGNCDVVIGIVNNTVYDPLQPELDS

SEQ ID NO: 3401 - protein, 1147 aa, Artificial Sequence; identical to SEQ ID NO: 3364
  SARS-CoV-2/Portugal/PT0034/2020__EPI_ISL_418019 spike protein (1-1147)(F970C_G999C)

SEQ ID NO: 3402 - protein, 1147 aa, Artificial Sequence; identical to SEQ ID NO: 3356
  SARS-CoV-2/Iceland/202/2020__EPI_ISL_417750 spike protein (1-1147)(F970C_G999C)

SEQ ID NO: 3403 - protein, 1147 aa, Artificial Sequence
  SARS-CoV-2/USA/WA-UW261/2020__EPI_ISL_418046 spike protein (1-1147)(F970C_G999C)
MFVFLVLLPLVSSQCVNLTTRTQLPPAYTNSFTRGVYYPDKVFRSSVLHSTQDLFLPFFSNVTWFHAIHVSGTNGTKRFDNPVLPFNDGVYFASTEKSNIIRGWIFGTTLDSKTQSLLIVNNATNVVIKVCEFQFCNDPFLGVYYHKNNKSWMESEFRVYSSANNCTFEYVSQPFLMDLEGKQGNFKNLREFVFKNIDGYFKIYSKHTPINLVRDLPQGFSALEPLVDLPIGINITRFQTLLALHRSYLTPGDSSSGWTAGAAAYYVGYLQPRTFLLKYNENGTITDAVDCALDPLSETKCTLKSFTVEKGIYQTSNFRVQPTESIVRFPNITNLCPFGEVFNATRFTSVYAWNRKRISNCVADYSVLYNSASFSTFKCYGVSPTKLNDLCFTNVYADSFVIRGDEVRQIAPGQTGKIADYNYKLPDDFTGCVIAWNSNNLDSKVGGNYNYLYRLFRKSNLKPFERDISTEIYQAGSTPCNGVEGFNCYFPLQSYGFQPTNGVGYQPYRVVVLSFELLHAPATVCGPKKSTNLVKNKCVNFNFNGLTGTGVLTESNKKFLPFQQFGRDIADTTDAVRDPQTLEILDITPCSFGGVSVITPGTNTSNQVAVLYQDVNCTEVPVAIHADQLTPTWRVYSTGSNVFQTRAGCLIGAEHVNNSYECDIPIGAGICASYQTQTNSPRRARSVASQSIIAYTMSLGAENSVAYSNNSIAIPTNFTISVTTEILPVSMTKTSVDCTMYICGDSTECSNLLLQYGSFCTQLNRALTGIAVEQDKNTQEVFAQVKQIYKTPPIKDFGGFNFSQILPDPSKPSKRSFIEDLLFNKVTLADAGFIKQYGDCLGDIAARDLICAQKFNGLTVLPPLLTDEMIAQYTSALLAGTITSGWTFGAGAALQIPFAMQMAYRFNGIGVTQNVLYENQKLIANQFNSAIGKIQDSLSSTASALGKLQDVVNQNAQALNTLVKQLSSNCGAISSVLNDILSRLDKVEAEVQIDRLITCRLQSLQTYVTQQLIRAAEIRASANLAATKMSECVLGQSKRVDFCGKGYHLMSFPQSAPHGVVFLHVTYVPAQEKNFTTAPAICHDGKAHFPREGVFVSNGTHWFVTQRNFYEPQIITTDNTFVSGNCDVVIGIVNNTVYDPLQPELDS

SEQ ID NO: 3404 - protein, 1147 aa, Artificial Sequence
  SARS-CoV-2/Portugal/PT0035/2020__EPI_ISL_418020 spike protein (1-1147)(F970C_G999C)
MFVFLVLLPLVSSQCVNLTTRTQLPPAYTNSFTRGVYYPDKVFRSSVLHSTQDLFLPFFSNVTWFHAIHVSGTNGTKRFDNPVLPFNDGVYFASTEKSNIIRGWIFGTTLDSKTQSLLIVNNATNVVIKVCEFQFCNDPFLGVYYHKNNKSWMESEFRVYSSANNCTFEYVSQPFLMDLEGKQGNFKNLREFVFKNIDGYFKIYSKHTPINLVRDLPQGFSALEPLVDLPIGINITRFQTLLALHRSYLTPGDSSSGWTAGAAAYYVGYLQPRTFLLKYNENGTITDAVDCALDPLSETKCTLKSFTVEKGIYQTSNFRVQPTESIVRFPNITNLCPFGEVFNATRFASVYAWNRKRISNCVADYSVLYNSASFSTFKCYGVSPTKLNDLCFTNVYADSFVIRGDEVRQIAPGQTGKIADYNYKLPDDFTGCVIAWNSNNLDSKVGGNYNYLYRLFRKSNLKPFERDISTEIYQAGSTPCNGVEGFNCYFPLQSYGFQPTNGVGYQPYRVVVLSFELLHAPATVCGPKKSTNLVKNKCVNFNFNGLTGTGVLTESNKKFLPFQQFGRDIADTTDAVRDPQTLEILDITPCSFGGVSVITPGTNTSNQVAVLYQDVNCTEVPVAIHADQLTPTWRVYSTGSNVFQTRAGCLIGAEHVNNSYECDIPIGAGICASYQTQTNSPRRARSVASQSIIAYTMSLGAENSVAYSNNSIAIPTNFTISVTTEILPVSMTKTSVDCTMYICGDSTECSNLLLQYGSFCTQLNRALTGIAVEQDKNTQEVFAQVKQIYKTPPIKDFGGFNFSQILPDPSKPSKRSFIEDLLFNKVTLADAGFIKQYGDCLGDISARDLICAQKFNGLTVLPPLLTDEMIAQYTSALLAGTITSGWTFGAGAALQIPFAMQMAYRFNGIGVTQNVLYENQKLIANQFNSAIGKIQDSLSSTASALGKLQDVVNQNAQALNTLVKQLSSNCGAISSVLNDILSRLDKVEAEVQIDRLITCRLQSLQTYVTQQLIRAAEIRASANLAATKMSECVLGQSKRVDFCGKGYHLMSFPQSAPHGVVFLHVTYVPAQEKNFTTAPAICHDGKAHFPREGVFVSNGTHWFVTQRNFYEPQIITTDNTFVSGNCDVVIGIVNNTVYDPLQPELDS

SEQ ID NO: 3405 - protein, 1147 aa, Artificial Sequence
  SARS-CoV-2/USA/NY-NYUMC7/2020__EPI_ISL_418192 spike protein (1-1147)(F970C_G999C)
MFVFLVLLPLVSSQCVNLTTRTQLPPAYTNSFTRGVYYPDKVFRSSVLHSTQDLFLPFFSNVTWFHAIHVSGTNGTKRFDNPVLPFNDGVYFASTEKSNIIRGWIFGTTLDSKTQSLLIVNNATNVVIKVCEFQFCNDPFLGVYHHKNNKSWMESEFRVYSSANNCTFEYVSQPFLMDLEGKQGNFKNLREFVFKNIDGYFKIYSKHTPINLVRDLPQGFSALEPLVDLPIGINITRFQTLLALHRSYLTPGDSSSGWTAGAAAYYVGYLQPRTFLLKYNENGTITDAVDCALDPLSETKCTLKSFTVEKGIYQTSNFRVQPTESIVRFPNITNLCPFGEVFNATRFASVYAWNRKRISNCVADYSVLYNSASFSTFKCYGVSPTKLNDLCFTNVYADSFVIRGDEVRQIAPGQTGKIADYNYKLPDDFTGCVIAWNSNNLDSKVGGNYNYLYRLFRKSNLKPFERDISTEIYQAGSTPCNGVEGFNCYFPLQSYGFQPTNGVGYQPYRVVVLSFELLHAPATVCGPKKSTNLVKNKCVNFNFNGLTGTGVLTESNKKFLPFQQFGRDIADTTDAVRDPQTLEILDITPCSFGGVSVITPGTNTSNQVAVLYQGVNCTEVPVAIHADQLTPTWRVYSTGSNVFQTRAGCLIGAEHVNNSYECDIPIGAGICASYQTQTNSPRRARSVASQSIIAYTMSLGAENSVAYSNNSIAIPTNFTISVTTEILPVSMTKTSVDCTMYICGDSTECSNLLLQYGSFCTQLNRALTGIAVEQDKNTQEVFAQVKQIYKTPPIKDFGGFNFSQILPDPSKPSKRSFIEDLLFNKVTLADAGFIKQYGDCLGDIAARDLICAQKFNGLTVLPPLLTDEMIAQYTSALLAGTITSGWTFGAGAALQIPFAMQMAYRFNGIGVTQNVLYENQKLIANQFNSAIGKIQDSLSSTASALGKLQDVVNQNAQALNTLVKQLSSNCGAISSVLNDILSRLDKVEAEVQIDRLITCRLQSLQTYVTQQLIRAAEIRASANLAATKMSECVLGQSKRVDFCGKGYHLMSFPQSAPHGVVFLHVTYVPAQEKNFTTAPAICHDGKAHFPREGVFVSNGTHWFVTQRNFYEPQIITTDNTFVSGNCDVVIGIVNNTVYDPLQPELDS

SEQ ID NO: 3406 - protein, 1147 aa, Artificial Sequence
  SARS-CoV-2/Iceland/189/2020__EPI_ISL_417709 spike protein (1-1147)(F970C_G999C)
MFVFLVLLPLVSSQCVNLTTRTQLPPAYTNSFTRGVYYPDKVFRSSVLHSTQDLFLPFFSNVTWFHAIHVSGTNGTKRFDNPVLPFNDGVYFASTEKSNIIRGWIFGTTLDSKTQSLLIVNNATNVVIKVCEFQFCNDPFLGVYYHKNNKSWMESEFRVYSSANNCTFEYVSQPFLMDLEGKQGNFKNLREFVFKNIDGYFKIYSKHTPINLVRDLPQGFSALEPLVDLPIGINITRFQTLLALHRSYLTPGDSSSGWTAGAAAYYVGYLQPRTFLLKYNENGTITDAVDCALDPLSETKCTLKSFTVEKGIYQTSNFRVQPTESIVRFPNITNLCPFGEVFNATRFASVYAWNRKRISNCVADYSVLYNSASFSTFKCYGVSPTKLNDLCFTNVYADSFVIRGDEVRQIAPGQTGKIADYNYKLPDDFTGCVIAWNSNNLDSKVGGNYNYLYRLFRKSNLKPFERDISTEIYQAGSTPCNGVEGFNCYFPLQSYGFQPTNGVGYQPYRVVVLSFELLHAPATVCGPKKSTNLVKNKCVNFNFNGLTGTGVLTESNKKFLPFQQFGRDIADTTDAVRDPQTLEILDITPCSFGGVSVITPGTNTSNQVAVLYQGVNCTEVPVAIHADQLTPTWRVYSTGSNVFQTRAGCLIGAEHVNNSYECDIPIGAGICASYQTQTNSPRRARSVASQSIIAYTMSLGAENSVAYSNNSIAIPTNFTISVTTEILPVSMTKTSVDCTMYICGDSTECSNLLLQYGSFCTQLNRALTGIAVEQDKNTQEVFAQVKQIYKTPPIKDFGGFNFSQILPDPSKPSKRSFIEDLLFNKVTLADAGFTKQYGDCLGDIAARDLICAQKFNGLTVLPPLLTDEMIAQYTSALLAGTITSGWTFGAGAALQIPFAMQMAYRFNGIGVTQNVLYENQKLIANQFNSAIGKIQDSLSSTASALGKLQDVVNQNAQALNTLVKQLSSNCGAISSVLNDILSRLDKVEAEVQIDRLITCRLQSLQTYVTQQLIRAAEIRASANLAATKMSECVLGQSKRVDFCGKGYHLMSFPQSAPHGVVFLHVTYVPAQEKNFTTAPAICHDGKAHFPREGVFVSNGTHWFVTQRNFYEPQIITTDNTFVSGNCDVVIGIVNNTVYDPLQPELDS

SEQ ID NO: 3407 - protein, 1147 aa, Artificial Sequence
  SARS-CoV-2/Australia/NSW56/2020__EPI_ISL_417408 spike protein (1-1147)(F970C_G999C)
MFVFLVLLPLVSSQCVNLTTRTQLPPAYTNSFTRGVYYPDKVFRSSVLHSTQDLFLPFFSNVTWFHAIHVSGTNGTKRFDNPVLPFNDGVYFASTEKSNIIRGWIFGTTLDSKTQSLLIVNNATNVVIKVCEFQFCNDPFLGVYYHKNNKSWMESEFRVYSSANNCTFEYVSQPFLMDLEGKQGNFKNLREFVFKNIDGYFKIYSKHTPINLVRDLPQGFSALEPLVDLPIGINITRFQTLLALHRSYLTPGDSSSGWTAGAAAYYVGYLQPRTFLLKYNENGTITDAVDCALDPLSETKCTLKSFTVEKGIYQTSNFRVQPTESIVRFPNITNLCPFGEVFNATRFASVYAWNRKRISNCVADYSVLYNSASFSTFKCYGVSPTKLNDLCFTNVYADSFVIRGDEVRQIAPGQTGKIADYNYKLPDDFTGCVIAWNSNNLDSKVGGNYNYLYRLFRKSNLKPFERDISTEIYQAGSTPCNGVEGFNCYFPLQSYGFQPTNGVGYQPYRVVVLSFELLHAPATVCGPKKSTNLVKNKCVNFNFNGLTGTGVLTESNKKFLPFQQFGRDIADTTDAVRDPQTLEILDITPCSFGGVSVITPGTNTSNQVAVLYQDVNCTEVPVAIHADQLTPTWRVYSTGSNVFQTRAGCLIGAEHVNNSYECDIPIGAGICASYQTQTNSPRRARSVASQSIIAYTMSLGAENSVAYSNNSIAIPTNFTISVTTEILPVSMTKTSVDCTMYICGDSTECSNLLLQYGSFCTQLNRALTGIAVEQDKNTQEVFAQVKQIYKTPPIKDFGGFNFSQILPDSSKPSKRSFIEDLLFNKVTLADAGFIKQYGDCLGDIAARDLICAQKFNGLTVLPPLLTDEMIAQYTSALLAGTITSGWTFGAGAALQIPFAMQMAYRFNGIGVTQNVLYENQKLIANQFNSAIGKIQDSLSSTASALGKLQDVVNQNAQALNTLVKQLSSNCGAISSVLNDILSRLDKVEAEVQIDRLITCRLQSLQTYVTQQLIRAAEIRASANLAATKMSECVLGQSKRVDFCGKGYHLMSFPQSAPHGVVFLHVTYVPAQEKNFTTAPAICHDGKAHFPREGVFVSNGTHWFVTQRNFYEPQIITTDNTFVSGNCDVVIGIVNNTVYDPLQPELDS

SEQ ID NO: 3408 - protein, 1147 aa, Artificial Sequence
  SARS-CoV-2/Iceland/280/2020__EPI_ISL_417608 spike protein (1-1147)(F970C_G999C)
MFVFLVLLPLVSSQCVNLTTRTQLPPAYTNSFTRGVYYPDKVFRSSVLHSTQDLFLPFFSNVTWFHAIHVSGTNGTKRFDNPVLPFNDGVYFASTEKSNIIRGWIFGTTLDSKTQSLLIVNNATNVVIKVCEFQFCNDPFLGVYYHKNNKSWMESEFRVYSSANNCTFEYVSQPFLMDLEGKQGNFKNLREFVFKNIDGYFKIYSKHTPINLVRDLPQGFSALEPLVDLPIGINITRFQTLLALHRSYLTPGDSSSGWTAGAAAYYVGYLQPRTFLLKYNENGTITDAVDCALDPLSETKCTLKSFTVEKGIYQTSNFRVQPTESIVRFPNITNLCPFGEVFNATRFASVYAWNRKRISNCVADYSVLYNSASFSTFKCYGVSPTKLNDLCFTNVYADSFVIRGDEVRQIAPGQTGKIADYNYKLPDDFTGCVIAWNSNNLDSKVGGNYNYLYRLFRKSNLKPFERDISTEIYQAGSTPCNGVEGFNCYFPLQSYGFQPTNGVGYQPYRVVVLSFELLHAPATVCGPKKSTNLVKNKCVNFNFNGLTGTGVLTESNKKFLPFQQFGRDIADTTDAVRDPQTLEILDITPCSFGGVSVITPGTNTSNQVAVLYQGVNCTEVPVAIHADQLTPTWRVYSTGSNVFQTRAGCLIGAEHVNNSYECDIPIGAGICASYHTQTNSPRRARSVASQSIIAYTMSLGAENSVAYSNNSIAIPTNFTISVTTEILPVSMTKTSVDCTMYICGDSTECSNLLLQYGSFCTQLNRALTGIAVEQDKNTQEVFAQVKQIYKTPPIKDFGGFNFSQILPDPSKPSKRSFIEDLLFNKVTLADAGFIKQYGDCLGDIAARDLICAQKFNGLTVLPPLLTDEMIAQYTSALLAGTITSGWTFGAGAALQIPFAMQMAYRFNGIGVTQNVLYENQKLIANQFNSAIGKIQDSLSSTASALGKLQDVVNQNAQALNTLVKQLSSNCGAISSVLNDILSRLDKVEAEVQIDRLITCRLQSLQTYVTQQLIRAAEIRASANLAATKMSECVLGQSKRVDFCGKGYHLMSFPQSAPHGVVFLHVTYVPAQEKNFTTAPAICHDGKAHFPREGVFVSNGTHWFVTQRNFYEPQIITTDNTFVSGNCDVVIGIVNNTVYDPLQPELDS

SEQ ID NO: 3409 - protein, 1147 aa, Artificial Sequence; identical to SEQ ID NO: 3364
  SARS-CoV-2/Iceland/247/2020__EPI_ISL_417575 spike protein (1-1147)(F970C_G999C)

SEQ ID NO: 3410 - protein, 1147 aa, Artificial Sequence
  SARS-CoV-2/Iceland/238/2020__EPI_ISL_417566 spike protein (1-1147)(F970C_G999C)
MFVFLVLLPLVSSQCVNLTTRTQLPPAYTNSFTRGVYYPDKVFRSSVLHSTQDLFLPFFSNVTWFHAIHVSGTNGTKRFDNPVLPFNDGVYFASTEKSNIIRGWIFGTTLDSKTQSLLIVNNATNVVIKVCEFQFCNDPFLGVYYHKNNKSWMESEFRVYSSANNCTFEYVSQPFLMDLEGKQGNFKNLREFVFKNIDGYFKIYSKHTPINLVRDLPQGFSALEPLVDLPIGINITRFQTLLALHRSYLTPGDSSSGWTAGAAAYYVGYLQPRTFLLKYNENGTITDAVDCALDPLSETKCTLKSFTVEKGIYQTSNFRVQPTESIVRFPNITNLCPFGEVFNATRFASVYAWNRKRISNCVADYSVLYNSASFSTFKCYGVSPTKLNDLCFTNVYADSFVIRGDEVRQIAPGQTGKIADYNYKLPDDFTGCVIAWNSNNLDSKVGGNYNYLYRLFRKSNLKPFERDISTEIYQAGSTPCNGVEGFNCYFPLQSYGFQPTNGVGYQPYRVVVLSFELLHAPATVCGPKKSTNLVKNKCVNFNFNGLTGTGVLTESNKKFLPFQQFGRDIADTTDAVRDPQTLEILDITPCSFGGVSVITPGTNTSNQVAVLYQGVNCTEVPVAIHADQLTPTWRVYSTGSNVFQTRAGCLIGAEHVNNSYECDIPIGAGICASYQTQTNSPRRARSVASQSIIAYTMSLGAENSVAYSNNSIAIPTNFTISVTTEILPVSMTKTSVDCTMYICGDSTECSNLLLQYGSFCTQLNRALTGIAVEQDKNTQEVFAQVKQIYKTPPIKDFGGFNFSQILPDPSKPSKRSFIEDLLFNKVTLADVGFIKQYGDCLGDIAARDLICAQKFNGLTVLPPLLTDEMIAQYTSALLAGTITSGWTFGAGAALQIPFAMQMAYRFNGIGVTQNVLYENQKLIANQFNSAIGKIQDSLSSTASALGKLQDVVNQNAQALNTLVKQLSSNCGAISSVLNDILSRLDKVEAEVQIDRLITCRLQSLQTYVTQQLIRAAEIRASANLAATKMSECVLGQSKRVDFCGKGYHLMSFPQSAPHGVVFLHVTYVPAQEKNFTTAPAICHDGKAHFPREGVFVSNGTHWFVTQRNFYEPQIITTDNTFVSGNCDVVIGIVNNTVYDPLQPELDS

SEQ ID NO: 3411 - protein, 1147 aa, Artificial Sequence
  SARS-CoV-2/Greece/16/2020__EPI_ISL_418265 spike protein (1-1147)(F970C_G999C)
MFVFLVLLPLVSSQCVNLTTRTQLPPAYTNSFTRGVYYPDKVFRSSVLHSTQDLFLPFFSNVTWFHAIHVSGTNGTKRFDNPVLPFNDGVYFASTEKSNIIRGWIFGTTLDSKTQSLLIVNNATNVVIKVCEFQFCNDPFLGVYYHKNNKSWMESEFRVYSSANNCTFEYVSQPFLMDLEGKQGNFKNLREFVFKNVDGYFKIYSKHTPINLVRDLPQGFSALEPLVDLPIGINITRFQTLLALHRSYLTPGDSSSGWTAGAAAYYVGYLQPRTFLLKYNENGTITDAVDCALDPLSETKCTLKSFTVEKGIYQTSNFRVQPTESIVRFPNITNLCPFGEVFNATRFASVYAWNRKRISNCVADYSVLYNSASFSTFKCYGVSPTKLNDLCFTNVYADSFVIRGDEVRQIAPGQTGKIADYNYKLPDDFTGCVIAWNSNNLDSKVGGNYNYLYRLFRKSNLKPFERDISTEIYQAGSTPCNGVEGFNCYFPLQSYGFQPTNGVGYQPYRVVVLSFELLHAPATVCGPKKSTNLVKNKCVNFNFNGLTGTGVLTESNKKFLPFQQFGRDIADTTDAVRDPQTLEILDITPCSFGGVSVITPGTNTSNQVAVLYQDVNCTEVPVAIHADQLTPTWRVYSTGSNVFQTRAGCLIGAEHVNNSYECDIPIGAGICASYQTQTNSPRRARSVASQSIIAYTMSLGAENSVAYSNNSIAIPTNFTISVTTEILPVSMTKTSVDCTMYICGDSTECSNLLLQYGSFCTQLNRALTGIAVEQDKNTQEVFAQVKQIYKTPPIKDFGGFNFSQILPDPSKPSKRSFIEDLLFNKVTLADAGFIKQYGDCLGDIAARDLICAQKFNGLTVLPPLLTDEMIAQYTSALLAGTITSGWTFGAGAALQIPFAMQMAYRFNGIGVTQNVLYENQKLIANQFNSAIGKIQDSLSSTASALGKLQDVVNQNAQALNTLVKQLSSNCGAISSVLNDILSRLDKVEAEVQIDRLITCRLQSLQTYVTQQLIRAAEIRASANLAATKMSECVLGQSKRVDFCGKGYHLMSFPQSAPHGVVFLHVTYVPAQEKNFTTAPAICHDGKAHFPREGVFVSNGTHWFVTQRNFYEPQIITTDNTFVSGNCDVVIGIVNNTVYDPLQPELDS

SEQ ID NO: 3412 - protein, 1147 aa, Artificial Sequence
  SARS-CoV-2/Iceland/319/2020__EPI_ISL_417648 spike protein (1-1147)(F970C_G999C)
MFVFLVLLPLVSSQCVNLTTRTQLPPAYTNSFTRGVYYPDKVFRSSVLHSTQDLFLPFFSNVTWFHAIHVSGTNGTKRFDNPVLPFNDGVYFASTEKSNIIRGWIFGTTLDSKTQSLLIVNNATNVVIKVCEFQFCNDPFLGVYYHKNNKSWMESEFRVYSSANNCTFEYVSQPFLIDLEGKQGNFKNLREFVFKNIDGYFKIYSKHTPINLVRDLPQGFSALEPLVDLPIGINITRFQTLLALHRSYLTPGDSSSGWTAGAAAYYVGYLQPRTFLLKYNENGTITDAVDCALDPLSETKCTLKSFTVEKGIYQTSNFRVQPTESIVRFPNITNLCPFGEVFNATRFASVYAWNRKRISNCVADYSVLYNSASFSTFKCYGVSPTKLNDLCFTNVYADSFVIRGDEVRQIAPGQTGKIADYNYKLPDDFTGCVIAWNSNNLDSKVGGNYNYLYRLFRKSNLKPFERDISTEIYQAGSTPCNGVEGFNCYFPLQSYGFQPTNGVGYQPYRVVVLSFELLHAPATVCGPKKSTNLVKNKCVNFNFNGLTGTGVLTESNKKFLPFQQFGRDIADTTDAVRDPQTLEILDITPCSFGGVSVITPGTNTSNQVAVLYQGVNCTEVPVAIHADQLTPTWRVYSTGSNVFQTRAGCLIGAEHVNNSYECDIPIGAGICASYQTQTNSPRRARSVASQSIIAYTMSLGAENSVAYSNNSIAIPTNFTISVTTEILPVSMTKTSVDCTMYICGDSTECSNLLLQYGSFCTQLNRALTGIAVEQDKNTQEVFAQVKQIYKTPPIKDFGGFNFSQILPDPSKPSKRSFIEDLLFNKVTLADAGFIKQYGDCLGDIAARDLICAQKFNGLTVLPPLLTDEMIAQYTSALLAGTITSGWTFGAGAALQIPFAMQMAYRFNGIGVTQNVLYENQKLIANQFNSAIGKIQDSLSSTASALGKLQDVVNQNAQALNTLVKQLSSNCGAISSVLNDILSRLDKVEAEVQIDRLITCRLQSLQTYVTQQLIRAAEIRASANLAATKMSECVLGQSKRVDFCGKGYHLMSFPQSAPHGVVFLHVTYVPAQEKNFTTAPAICHDGKAHFPREGVFVSNGTHWFVTQRNFYEPQIITTDNTFVSGNCDVVIGIVNNTVYDPLQPELDS

SEQ ID NO: 3413 - protein, 1147 aa, Artificial Sequence
  SARS-CoV-2/Congo/94/2020__EPI_ISL_417947 spike protein (1-1147)(F970C_G999C)
MFVFLVLLPLVSSQCVNLTTRTQLPPAYTNSFTRGVYYPDKVFRSSVLHSTQDLFLPFFSNVTWFHAIHVSGTNGTKRFDNPVLPFNDGVYFASTEKSNIIRGWIFGTTLDSKTQSLLIVNNATNVVIKVCEFQFCNDPFLGVYYHKNNKSWMESEFRVYSSANNCTFEYVSQPFLMDLEGKQGNFKNLREFVFKNIDGYFKIYSKHTPINLVRDLPQGFSALEPLVDLPIGINITRFQTLLALHRSYLTPGDSSSGWTAGAAAYYVGYLQPRTFLLKYNENGTITDAVDCALDPLSETKCTLKSFTVEKGIYQTSNFRVQPTESIVRFPNITNLCPFGEVFNATRFASVYAWNRKRISNCVADYSVLYNSASFSTFKCYGVSPTKLNDLCFTNVYADSFVIRGDEVRQIAPGQTGKIADYNYKLPDDFTGCVIAWNSNNLDSKVGGNYNYLYRLFRKSNLKPFERDISTEIYQAGSTPCNGVEGFNCYFPLQSYGFQPTNGVGYQPYRVVVLSFELLHAPATVCGPKKSTNLVKNKCVNFNFNGLTGTGVLTESNKKFLPFQQFGRDIADTTDAVRDPQTLEILDITPCSFGGVSVITPGTNTSNQVAVLYQGVNCTEVPVAIHADQLTPTWRVYSTGSNVFQTRAGCLIGAEHVNNSYECDIPIGAGICASYQTQTNSPRRARSVASQSIIAYTMSLGAENSVAYSNNSIAIPTNFTISVTTEILPVSMTKTSVDCTMYICGDSTECSNLLLQYGSFCTQLNRALTGIAVEQDKNTQEVFAQVKQIYKTPPIKDFGGFNFSQILPDPSKPSKRSFIEDILFNKVTLADAGFIKQYGDCLGDIAARDLICAQKFNGLTVLPPLLTDEMIAQYTSALLAGTITSGWTFGAGAALQIPFAMQMAYRFNGIGVTQNVLYENQKLIANQFNSAIGKIQDSLSSTASALGKLQDVVNQNAQALNTLVKQLSSNCGAISSVLNDILSRLDKVEAEVQIDRLITCRLQSLQTYVTQQLIRAAEIRASANLAATKMSECVLGQSKRVDFCGKGYHLMSFPQSAPHGVVFLHVTYVPAQEKNFTTAPAICHDGKAHFPREGVFVSNGTHWFVTQRNFYEPQIITTDNTFVSGNCDVVIGIVNNTVYDPLQPELDS

SEQ ID NO: 3414 - protein, 1147 aa, Artificial Sequence
  SARS-CoV-2/Congo/158/2020__EPI_ISL_417950 spike protein (1-1147)(F970C_G999C)
MFVFLVLLPLVSSQCVNLTTRTQLPPAYTNSFTRGVYYPDKVFRSSVLHSTQDLFLPFFSNVTWFHAIHVSGTNGTKRFDNPVLPFNDGVYFASTEKSNIIRGWIFGTTLDSKTQSLLIVNNATNVVIKVCEFQFCNDPFLGVYYHKNNKSWMESEFRVYSSANNCTFEYVSQPFLMDLEGKQGNFKNLREFVFKNIDGYFKIYSKHTPINLVRDLPQGFSALEPLVDLPIGINITRFQTLLALHRSYLTPGDSSSGWTAGAAAYYVGYLQPRTFLLKYNENGTITDAVDCALDPLSETKCTLKSFTVEKGIYQTSNFRVQPTESIVRFPNITNLCPFGEVFNATRFASVYAWNRKRISNCVADYSVLYNSASFSTFKCYGVSPTKLNDLCFTNVYADSFVIRGDEVRQIAPGQTGKIADYNYKLPDDFTGCVIAWNSNNLDSKVGGNYNYLYRLFRKSNLKPFERDISTEIYQAGSTPCNGVEGFNCYFPLQSYGFQPTNGVGYQPYRVVVLSFELLHAPATVCGPKKSTNLVKNKCVNFNFNGLTGTGVLTESNKKFLPFQQFGRDIADTTDAVRDPQTLEILDITPCSFGGVSVITPGTNTSNQVAVLYQDVNCTEVPVAIHADQLTPTWRVYSTGSNVFQTRAGCLIGAEHVNNSYECDIPIGAGICASYQTQTNSPRRARSVASQSIIAYTMSLGAENSVAYSNNSIAIPTNFTISVTTEILPVSMTKTSVDCTMYICGDSTECSNLLLQYGSFCTQLNRALTGIAVEQDKNTQEVFAQVKQIYKTPPIKDFGGFNFSQILPDPSKPSKRSFIEDLLFNKVTLADAGFIKQYGDCLGDIAARDLICAQKFNGLTVLPPLLTDEMIAQYTSALLAGTITSGWTFGAGAALQIPFAMQMAYRFNGIGVTQNVLYENQKLIANQFNSAIGKIQDSLSSTASALGKLQDVVNQNAQALNTLVKQLSSNCGAISSVLNDILSRLDKVEAEVQIDRLITCRLQSLQTYVTQQLIRAAEIRASANLAATKMSECVLGQSKRVDFCGKGYHLMSFPQSAPHGVVFLHVTYVPAQEKNFTTAPAICHDGKAHFPREGVFVSNGTHWFVTQRNFYEPQIITTDNTFLSGNCDVVIGIVNNTVYDPLQPELDS

SEQ ID NO: 3415 - protein, 1147 aa, Artificial Sequence
  SARS-CoV-2/USA/UT-00034/2020__EPI_ISL_417977 spike protein (1-1147)(F970C_G999C)
MFVFLVLLPLVSSQCVNLTTRTQLPPAYTNSFTRGVYYPDKVFRSSVLHSTQDLFLPFFSNVTWFHAIHVSGTNGTKRFDNPVLPFNDGVYFASTEKSNIIRGWIFGTTLDSKTQSLLIVNNATNVVIKVCEFQFCNDPFLGVYYYKNNKSWMESEFRVYSSANNCTFEYVSQPFLMDLEGKQGNFKNLREFVFKNIDGYFKIYSKHTPINLVRDLPQGFSALEPLVDLPIGINITRFQTLLALHRSYLTPGDSSSGWTAGAAAYYVGYLQPRTFLLKYNENGTITDAVDCALDPLSETKCTLKSFTVEKGIYQTSNFRVQPTESIVRFPNITNLCPFGEVFNATRFASVYAWNRKRISNCVADYSVLYNSASFSTFKCYGVSPTKLNDLCFTNVYADSFVIRGDEVRQIAPGQTGKIADYNYKLPDDFTGCVIAWNSNNLDSKVGGNYNYLYRLFRKSNLKPFERDISTEIYQAGSTPCNGVEGFNCYFPLQSYGFQPTNGVGYQPYRVVVLSFELLHAPATVCGPKKSTNLVKNKCVNFNFNGLTGTGVLTESNKKFLPFQQFGRDIADTTDAVRDPQTLEILDITPCSFGGVSVITPGTNTSNQVAVLYQGVNCTEVPVAIHADQLTPTWRVYSTGSNVFQTRAGCLIGAEHVNNSYECDIPIGAGICASYQTQTNSPRRARSVASQSIIAYTMSLGAENSVAYSNNSIAIPTNFTISVTTEILPVSMTKTSVDCTMYICGDSTECSNLLLQYGSFCTQLNRALTGIAVEQDKNTQEVFAQVKQIYKTPPIKDFGGFNFSQILPDPSKPSKRSFIEDLLFNKVTLADAGFIKQYGDCLGDIAARDLICAQKFNGLTVLPPLLTDEMIAQYTSALLAGTITSGWTFGAGAALQIPFAMQMAYRFNGIGVTQNVLYENQKLIANQFNSAIGKIQDSLSSTASALGKLQDVVNQNAQALNTLVKQLSSNCGAISSVLNDILSRLDKVEAEVQIDRLITCRLQSLQTYVTQQLIRAAEIRASANLAATKMSECVLGQSKRVDFCGKGYHLMSFPQSAPHGVVFLHVTYVPAQEKNFTTAPAICHDGKAHFPREGVFVSNGTHWFVTQRNFYEPQIITTDNTFVSGNCDVVIGIVNNTVYDPLQPELDS

SEQ ID NO: 3416 - protein, 1147 aa, Artificial Sequence
  SARS-CoV-2/USA/UT-00033/2020__EPI_ISL_417976 spike protein (1-1147)(F970C_G999C)
MFVFLVLLPLVSSQCVNLTTRTQLPPAYTNSFTRGVYYPDKVFRSSVLHSTQDLFLPFFSNVTWFHAIHVSGTNGTKRFDNPVLPFNDGVYFASTEKSNIIRGWIFGTTLDSKTQSLLIVNNATNVVIKVCEFQFCNDPFLGVYYHKNNKSWMESEFRVYSSANNCTFEYVSQPFLMDLEGKQGNFKNLREFVFKNIDGYFKIYSKHTPINLVRDLPQGFSALEPLVDLPIGINITRFQTLLALHRSYLTPGDSSSGLTAGAAAYYVGYLQPRTFLLKYNENGTITDAVDCALDPLSETKCTLKSFTVEKGIYQTSNFRVQPTESIVRFPNITNLCPFGEVFNATRFASVYAWNRKRISNCVADYSVLYNSASFSTFKCYGVSPTKLNDLCFTNVYADSFVIRGDEVRQIAPGQTGKIADYNYKLPDDFTGCVIAWNSNNLDSKVGGNYNYLYRLFRKSNLKPFERDISTEIYQAGSTPCNGVEGFNCYFPLQSYGFQPTNGVGYQPYRVVVLSFELLHAPATVCGPKKSTNLVKNKCVNFNFNGLTGTGVLTESNKKFLPFQQFGRDIADTTDAVRDPQTLEILDITPCSFGGVSVITPGTNTSNQVAVLYQGVNCTEVPVAIHADQLTPTWRVYSTGSNVFQTRAGCLIGAEHVNNSYECDIPIGAGICASYQTQTNSPRRARSVASQSIIAYTMSLGAENSVAYSNNSIAIPTNFTISVTTEILPVSMTKTSVDCTMYICGDSTECSNLLLQYGSFCTQLNRALTGIAVEQDKNTQEVFAQVKQIYKTPPIKDFGGFNFSQILPDPSKPSKRSFIEDLLFNKVTLADAGFIKQYGDCLGDIAARDLICAQKFNGLTVLPPLLTDEMIAQYTSALLAGTITSGWTFGAGAALQIPFAMQMAYRFNGIGVTQNVLYENQKLIANQFNSAIGKIQDSLSSTASALGKLQDVVNQNAQALNTLVKQLSSNCGAISSVLNDILSRLDKVEAEVQIDRLITCRLQSLQTYVTQQLIRAAEIRASANLAATKMSECVLGQSKRVDFCGKGYHLMSFPQSAPHGVVFLHVTYVPAQEKNFTTAPAICHDGKAHFPREGVFVSNGTHWFVTQRNFYEPQIITTDNTFVSGNCDVVIGIVNNTVYDPLQPELDS

SEQ ID NO: 3417 - protein, 1147 aa, Artificial Sequence
  SARS-CoV-2/USA/WI-13/2020__EPI_ISL_417516 spike protein (1-1147)(F970C_G999C)
MFVFLVLLPLVSSQCVNLTTRTQLPPAYTNSFTRGVYYPDKVFRSSVLHSTQDLFLPFFSNVTWFHAIHVSGTNGTKRFDNPVLPFNDGVYFASTEKSNIIRGWIFGTTLDSKTQSLLIVNNATNVVIKVCEFQFCNDPFLGVYYHKNNKSWMESEFRVYSSANNCTFEYVSQPFLMDLEGKQGNFKNLREFVFKNIDGYFKIYSKHTPINLVRDLPQGFSALEPLVDLPIGINITRFQTLLALHRSYLTPGDSSSGWTAGAAAYYVGYLQPRTFLLKYNENGTITDAVDCALDPLSETKCTLKSFTVEKGIYQTSNFRVLPTESIVRFPNITNLCPFGEVFNATRFASVYAWNRKRISNCVADYSVLYNSASFSTFKCYGVSPTKLNDLCFTNVYADSFVIRGDEVRQIAPGQTGKIADYNYKLPDDFTGCVIAWNSNNLDSKVGGNYNYLYRLFRKSNLKPFERDISTEIYQAGSTPCNGVEGFNCYFPLQSYGFQPTNGVGYQPYRVVVLSFELLHAPATVCGPKKSTNLVKNKCVNFNFNGLTGTGVLTESNKKFLPFQQFGRDIADTTDAVRDPQTLEILDITPCSFGGVSVITPGTNTSNQVAVLYQGVNCTEVPVAIHADQLTPTWRVYSTGSNVFQTRAGCLIGAEHVNNSYECDIPIGAGICASYQTQTNSPRRARSVASQSIIAYTMSLGAENSVAYSNNSIAIPTNFTISVTTEILPVSMTKTSVDCTMYICGDSTECSNLLLQYGSFCTQLNRALTGIAVEQDKNTQEVFAQVKQIYKTPPIKDFGGFNFSQILPDPSKPSKRSFIEDLLFNKVTLADAGFIKQYGDCLGDIAARDLICAQKFNGLTVLPPLLTDEMIAQYTSALLAGTITSGWTFGAGAALQIPFAMQMAYRFNGIGVTQNVLYENQKLIANQFNSAIGKIQDSLSSTASALGKLQDVVNQNAQALNTLVKQLSSNCGAISSVLNDILSRLDKVEAEVQIDRLITCRLQSLQTYVTQQLIRAAEIRASANLAATKMSECVLGQSKRVDFCGKGYHLMSFPQSAPHGVVFLHVTYVPAQEKNFTTAPAICHDGKAHFPREGVFVSNGTHWFVTQRNFYEPQIITTDNTFVSGNCDVVIGIVNNTVYDPLQPELDS

SEQ ID NO: 3418 - protein, 1146 aa, Artificial Sequence
  SARS-CoV-2/India/1-27/2020__EPI_ISL_413522 spike protein (1-1146)(F969C_G998C)
MFVFLVLLPLVSSQCVNLTTRTQLPPAYTNSFTRGVYYPDKVFRSSVLHSTQDLFLPFFSNVTWFHAIHVSGTNGTKRFDNPVLPFNDGVYFASTEKSNIIRGWIFGTTLDSKTQSLLIVNNATNVVIKVCEFQFCNDPFLGVYHKNNKSWMESEFRVYSSANNCTFEYVSQPFLMDLEGKQGNFKNLREFVFKNIDGYFKIYSKHTPINLVRDLPQGFSALEPLVDLPIGINITRFQTLLALHRSYLTPGDSSSGWTAGAAAYYVGYLQPRTFLLKYNENGTITDAVDCALDPLSETKCTLKSFTVEKGIYQTSNFRVQPTESIVRFPNITNLCPFGEVFNATRFASVYAWNRKRISNCVADYSVLYNSASFSTFKCYGVSPTKLNDLCFTNVYADSFVIRGDEVIQIAPGQTGKIADYNYKLPDDFTGCVIAWNSNNLDSKVGGNYNYLYRLFRKSNLKPFERDISTEIYQAGSTPCNGVEGFNCYFPLQSYGFQPTNGVGYQPYRVVVLSFELLHAPATVCGPKKSTNLVKNKCVNFNFNGLTGTGVLTESNKKFLPFQQFGRDIADTTDAVRDPQTLEILDITPCSFGGVSVITPGTNTSNQVAVLYQDVNCTEVPVAIHADQLTPTWRVYSTGSNVFQTRAGCLIGAEHVNNSYECDIPIGAGICASYQTQTNSPRRARSVASQSIIAYTMSLGAENSVAYSNNSIAIPTNFTISVTTEILPVSMTKTSVDCTMYICGDSTECSNLLLQYGSFCTQLNRALTGIAVEQDKNTQEVFAQVKQIYKTPPIKDFGGFNFSQILPDPSKPSKRSFIEDLLFNKVTLADAGFIKQYGDCLGDIAARDLICAQKFNGLTVLPPLLTDEMIAQYTSALLAGTITSGWTFGAGAALQIPFAMQMAYRFNGIGVTQNVLYENQKLIANQFNSAIGKIQDSLSSTASALGKLQDVVNQNAQALNTLVKQLSSNCGAISSVLNDILSRLDKVEAEVQIDRLITCRLQSLQTYVTQQLIRAAEIRASANLAATKMSECVLGQSKRVDFCGKGYHLMSFPQSAPHGVVFLHVTYVPAQEKNFTTAPAICHDGKAHFPREGVFVSNGTHWFVTQRNFYEPQIITTDNTFVSGNCDVVIGIVNNTVYDPLQPELDS

SEQ ID NO: 3419 - protein, 1141 aa, Artificial Sequence
  SARS-CoV-2/pangolin/Guangxi/P4L/2017__EPI_ISL_410538 spike protein (1-1141)(F964C_G993C)
MFVFLFVLPLVSSQCVNLTTRTGIPPGYTNSSTRGVYYPDKVFRSSILHLTQDLFLPFFSNVTWFNTINYQGGFKKFDNPVLPFNDGVYFASTEKSNIIRGWIFGTTLDARTQSLLIVNNATNVVIKVCEFQFCTDPFLGVYYHNNNKTWVENEFRVYSSANNCTFEYISQPFLMDLEGKQGNFKNLREFVFKNVDGYFKIYSKHTPIDLVRDLPRGFAALEPLVDLPIGINITRFQTLLALHRSYLTPGNLESGWTTGAAAYYVGYLQQRTFLLSYNQNGTITDAVDCSLDPLSETKCTLKSLTVEKGIYQTSNFRVQPTISIVRFPNITNLCPFGEVFNASKFASVYAWNRKRISNCVADYSVLYNSTSFSTFKCYGVSPTKLNDLCFTNVYADSFVVKGDEVRQIAPGQTGVIADYNYKLPDDFTGCVIAWNSVKQDALTGGNYGYLYRLFRKSKLKPFERDISTEIYQAGSTPCNGQVGLNCYYPLERYGFHPTTGVNYQPFRVVVLSFELLNGPATVCGPKLSTTLVKDKCVNFNFNGLTGTGVLTTSKKQFLPFQQFGRDISDTTDAVRDPQTLEILDITPCSFGGVSVITPGTNTSNQVAVLYQDVNCTEVPMAIHAEQLTPAWRVYSAGANVFQTRAGCLVGAEHVNNSYECDIPVGAGICASYHSMSSLRSVNQRSIIAYTMSLGAENSVAYSNNSIAIPTNFTISVTTEILPVSMTKTSVDCTMYICGDSIECSNLLLQYGSFCTQLNRALTGIAVEQDKNTQEVFAQVKQIYKTPPIKDFGGFNFSQILPDPSKPSKRSFIEDLLFNKVTLADAGFIKQYGDCLGDIAARDLICAQKFNGLTVLPPLLTDEMIAQYTSALLAGTITSGWTFGAGAALQIPFAMQMAYRFNGIGVTQNVLYENQKLIANQFNSAIGKIQDSLSSTASALGKLQDVVNQNAQALNTLVKQLSSNCGAISSVLNDILSRLDKVEAEVQIDRLITCRLQSLQTYVTQQLIRAAEIRASANLAATKMSECVLGQSKRVDFCGKGYHLMSFPQSAPHGVVFLHVTYVPAQEKNFTTAPAICHEGKAHFPREGVFVSNGTHWFITQRNFYEPQIITTDNTFVSGSCDVVIGIVNNTVYDPLQPELDS

SEQ ID NO: 3420 - protein, 1141 aa, Artificial Sequence
  SARS-CoV-2/pangolin/Guangxi/P5L/2017__EPI_ISL_410540 spike protein (1-1141)(F964C_G993C)
MFVFLFVLPLVSSQCVNLTTRTGIPPGYTNSSTRGVYYPDKVFRSSILHLTQDLFLPFFSNVTWFNTINYQGGFKKFDNPVLPFNDGVYFASTEKSNIIRGWIFGTTLDARTQSLLIVNNATNVVIKVCEFQFCTDPFLGVYYHNNNKTWVENEFRVYSSANNCTFEYISQPFLMDLEGKQGNFKNLREFVFKNVDGYFKIYSKHTPIDLVRDLPRGFAALEPLVDLPIGINITRFQTLLALHRSYLTPGKLESGWTTGAAAYYVGYLQQRTFLLSYNQNGTITDAVDCSLDPLSETKCTLKSLTVEKGIYQTSNFRVQPTISIVRFPNITNLCPFGEVFNASKFASVYAWNRKRISNCVADYSVLYNSTSFSTFKCYGVSPTKLNDLCFTNVYADSFVVKGDEVRQIAPGQTGVIADYNYKLPDDFTGCVIAWNSVKQDALTGGNYGYLYRLFRKSKLKPFERDISTEIYQAGSTPCNGQVGLNCYYPLERYGFHPTTGVNYQPFRVVVLSFELLNGPATVCGPKLSTTLVKDKCVNFNFNGLTGTGVLTTSKKQFLPFQQFGRDISDTTDAVRDPQTLEILDITPCSFGGVSVITPGTNTSNQVAVLYQDVNCTEVPMAIHAEQLTPAWRVYSAGANVFQTRAGCLVGAEHVNNSYECDIPVGAGICASYHSMSSFRSVNQRSIIAYTMSLGAENSVAYSNNSIAIPTNFTISVTTEILPVSMTKTSVDCTMYICGDSIECSNLLLQYGSFCTQLNRALTGIAVEQDKNTQEVFAQVKQIYKTPPIKDFGGFNFSQILPDPSKPSKRSFIEDLLFNKVTLADAGFIKQYGDCLGDIAARDLICAQKFNGLTVLPPLLTDEMIAQYTSALLAGTITSGWTFGAGAALQIPFAMQMAYRFNGIGVTQNVLYENQKLIANQFNSAIGKIQDSLSSTASALGKLQDVVNQNAQALNTLVKQLSSNCGAISSVLNDILSRLDKVEAEVQIDRLITCRLQSLQTYVTQQLIRAAEIRASANLAATKMSECVLGQSKRVDFCGKGYHLMSFPQSAPHGVVFLHVTYVPAQEKNFTTAPAICHEGKAHFPREGVFVSNGTHWFITQRNFYEPQIITTDNTFVSGSCDVVIGIVNNTVYDPLQPELDS

SEQ ID NO: 3421 - protein, 1141 aa, Artificial Sequence
  SARS-CoV-2/pangolin/Guangxi/P5E/2017__EPI_ISL_410541 spike protein (1-1141)(F964C_G993C)
MFVFLFVLPLVSSQCVNLTTRTGIPPGYTNSSTRGVYYPDKVFRSSILHLTQDLFLPFFSNVTWFNTITYQGGSKKFDNPVLPFNDGVYFASTEKSNIIRGWIFGTTLDARTQSLLIVNNATNVVIKVCEFQFCTDPFLGVYYHNNNKTWVENEFRVYSSANNCTFEYISQPFLMDLEGKQGNFKNLREFVFKNVDGYFKIYSKHTPIDLVRDLPRGFAALEPLVDLPIGINITRFQTLLALHRSYLTPGKLESGWTTGAAAYYVGYLQQRTFLLSYNQNGTITDAVDCSLDPLSETKCTLKSLTVEKGIYQTSNFRVQPTISIVRFPNITNLCPFGEVFNASKFASVYAWNRKRISNCVADYSVLYNSTSFSTFKCYGVSPTKLNDLCFTNVYADSFVVKGDEVRQIAPGQTGVIADYNYKLPDDFTGCVIAWNSVKQDALTGDNYGYLYRLFRKSKLKPFERDISTEIYQAGSTPCNGQVGLNCYYPLERYGFHPTTGVNYQPFRVVVLSFELLNGPATVCGPKLSTTLVKDKCVNFNFNGLTGTGVLTTSKKQFLPFQQFGRDISDTTDAVRDPQTLEILDITPCSFGGVSVITPGTNTSNQVAVLYQDVNCTEVPMAIHAEQLTPAWRVYSAGANVFQTRAGCLVGAEHVNNSYECDIPVGAGICASYHSMSSFRSVNQRSIIAYTMSLGAENSVAYSNNSIAIPTNFTISVTTEILPVSMTKTSVDCTMYICGDSIECSNLLLQYGSFCTQLNRALTGIAVEQDKNTQEVFAQVKQIYKTPPIKDFGGFNFSQILPDPSKPSKRSFIEDLLFNKVTLADAGFIKQYGDCLGDIAARDLICAQKFNGLTVLPPLLTDEMIAQYTSALLAGTITSGWTFGAGAALQIPFAMQMAYRFNGIGVTQNVLYENQKLIANQFNSAIGKIQDSLSSTASALGKLQDVVNQNAQALNTLVKQLSSNCGAISSVLNDILSRLDKVEAEVQIDRLITCRLQSLQTYVTQQLIRAAEIRASANLAATKMSECVLGQSKRVDFCGKGYHLMSFPQSAPHGVVFLHVTYVPAQEKNFTTAPAICHEGKAHFPREGVFVSNGTHWFITQRNFYEPQIITTDNTFVSGSCDVVIGIVNNTVYDPLQPELDS

SEQ ID NO: 3422 - protein, 1139 aa, Artificial Sequence
  SARS-CoV-2/pangolin/Guangxi/P1E/2017__EPI_ISL_410539 spike protein (1-1139)(F962C_G991C)
MFVFLFVLPLVSSQCVNLTTRTGIQPGYTNSSTRGVYYPDKVFRSSILHLTQDLFLPFFSNVTWFNTINYQGGFKKFDNPVLPFNDGVYFASTEKSNIIRGWIFGTTLDARTQSLLIVNNATNVVIKVCEFQFCTDPFLGVYYHNNNKTWVENEFRVYSSANNCTFEYISQPFLMDLEGKQGNFKNLREFVFKNVDGYFKIYSKHTPIDLVRDLPRGFAALEPLVDLPIGINITRFQTLLALHRSYLTPGKLESGWTTGAAAYYVGYLQQRTFLLSYNQNGTITDAVDCSLDPLSETKCTLKSLTVEKGIYQTSNFRVQPTISIVRFPNITNLCPFGEVFNASKFASVYAWNRKRISNCVADYSVLYNSTSFSTFKCYGVSPTKLNDLCFTNVYADSFVVKGDEVRQIAPGQTGVIADYNYKLPDDFTGCVIAWNSVKQDALTGGNYLYRLFRKSKLKPFERDISTEIYQAGSTPCNGQVGLNCYYPLERYGFHPTTGVNYQPFRVVVLSFELLNGPATVCGPKLSTTLVKDKCVNFNFNGLTGTGVLTTSKKQFLPFQQFGRDISDTTDAVRDPQTLEILDITPCSFGGVSVITPGTNTSNQVAVLYQDVNCTEVPMAIHAEQLTPAWRVYSAGANVFQTRAGCLVGAEHVNNSYECDIPVGAGICASYHSMSSLRSVNQRSIIAYTMSLGAENSVAYSNNSIAIPTNFTISVTTEILPVSMTKTSVDCTMYICGDSIECSNLLLQYGSFCTQLNRALTGIAVEQDKNTQEVFAQVKQIYKTPPIKDFGGFNFSQILPDPSKPSKRSFIEDLLFNKVTLADAGFIKQYGDCLGDIAARDLICAQKFNGLTVLPPLLTDEMIAQYTSALLAGTITSGWTFGAGAALQIPFAMQMAYRFNGIGVTQNVLYENQKLIANQFNSAIGKIQDSLSSTASALGKLQDVVNQNAQALNTLVKQLSSNCGAISSVLNDILSRLDKVEAEVQIDRLITCRLQSLQTYVTQQLIRAAEIRASANLAATKMSECVLGQSKRVDFCGKGYHLMSFPQSAPHGVVFLHVTYVPAQEKNFTTAPAICHEGKAHFPREGVFVSNGTHWFITQRNFYEPQIITTDNTFVSGSCDVVIGIVNNTVYDPLQPELDS

SEQ ID NO: 3423 - protein, 1147 aa, Artificial Sequence
  SARS-CoV-2/Wuhan/WIV05/2019__EPI_ISL_402128 spike protein (1-1147)(A972C_R995C)
MFVFLVLLPLVSSQCVNLTTRTQLPPAYTNSFTRGVYYPDKVFRSSVLHSTQDLFLPFFSNVTWFHAIHVSGTNGTKRFDNPVLPFNDGVYFASTEKSNIIRGWIFGTTLDSKTQSLLIVNNATNVVIKVCEFQFCNDPFLGVYYHKNNKSWMESEFRVYSSANNCTFEYVSQPFLMDLEGKQGNFKNLREFVFKNIDGYFKIYSKHTPINLVRDLPQGFSALEPLVDLPIGINITRFQTLLALHRSYLTPGDSSSGWTAGAAAYYVGYLQPRTFLLKYNENGTITDAVDCALDPLSETKCTLKSFTVEKGIYQTSNFRVQPTESIVRFPNITNLCPFGEVFNATRFASVYAWNRKRISNCVADYSVLYNSASFSTFKCYGVSPTKLNDLCFTNVYADSFVIRGDEVRQIAPGQTGKIADYNYKLPDDFTGCVIAWNSNNLDSKVGGNYNYLYRLFRKSNLKPFERDISTEIYQAGSTPCNGVEGFNCYFPLQSYGFQPTNGVGYQPYRVVVLSFELLHAPATVCGPKKSTNLVKNKCVNFNFNGLTGTGVLTESNKKFLPFQQFGRDIADTTDAVRDPQTLEILDITPCSFGGVSVITPGTNTSNQVAVLYQDVNCTEVPVAIHADQLTPTWRVYSTGSNVFQTRAGCLIGAEHVNNSYECDIPIGAGICASYQTQTNSPRRARSVASQSIIAYTMSLGAENSVAYSNNSIAIPTNFTISVTTEILPVSMTKTSVDCTMYICGDSTECSNLLLQYGSFCTQLNRALTGIAVEQDKNTQEVFAQVKQIYKTPPIKDFGGFNFSQILPDPSKPSKRSFIEDLLFNKVTLADAGFIKQYGDCLGDIAARDLICAQKFNGLTVLPPLLTDEMIAQYTSALLAGTITSGWTFGAGAALQIPFAMQMAYRFNGIGVTQNVLYENQKLIANQFNSAIGKIQDSLSSTASALGKLQDVVNQNAQALNTLVKQLSSNFGCISSVLNDILSRLDKVEAEVQIDCLITGRLQSLQTYVTQQLIRAAEIRASANLAATKMSECVLGQSKRVDFCGKGYHLMSFPQSAPHGVVFLHVTYVPAQEKNFTTAPAICHDGKAHFPREGVFVSNGTHWFVTQRNFYEPQIITTDNTFVSGNCDVVIGIVNNTVYDPLQPELDS

SEQ ID NO: 3424 - protein, 1143 aa, Artificial Sequence
  SARS-CoV-2/bat/Yunnan/RaTG13/2013__EPI_ISL_402131 spike protein (1-1143)(A968C_R991C)
MFVFLVLLPLVSSQCVNLTTRTQLPPAYTNSSTRGVYYPDKVFRSSVLHLTQDLFLPFFSNVTWFHAIHVSGTNGIKRFDNPVLPFNDGVYFASTEKSNIIRGWIFGTTLDSKTQSLLIVNNATNVVIKVCEFQFCNDPFLGVYYHKNNKSWMESEFRVYSSANNCTFEYVSQPFLMDLEGKQGNFKNLREFVFKNIDGYFKIYSKHTPINLVRDLPPGFSALEPLVDLPIGINITRFQTLLALHRSYLTPGDSSSGWTAGAAAYYVGYLQPRTFLLKYNENGTITDAVDCALDPLSETKCTLKSFTVEKGIYQTSNFRVQPTDSIVRFPNITNLCPFGEVFNATTFASVYAWNRKRISNCVADYSVLYNSTSFSTFKCYGVSPTKLNDLCFTNVYADSFVITGDEVRQIAPGQTGKIADYNYKLPDDFTGCVIAWNSKHIDAKEGGNFNYLYRLFRKANLKPFERDISTEIYQAGSKPCNGQTGLNCYYPLYRYGFYPTDGVGHQPYRVVVLSFELLNAPATVCGPKKSTNLVKNKCVNFNFNGLTGTGVLTESNKKFLPFQQFGRDIADTTDAVRDPQTLEILDITPCSFGGVSVITPGTNASNQVAVLYQDVNCTEVPVAIHADQLTPTWRVYSTGSNVFQTRAGCLIGAEHVNNSYECDIPIGAGICASYQTQTNSRSVASQSIIAYTMSLGAENSVAYSNNSIAIPTNFTISVTTEILPVSMTKTSVDCTMYICGDSTECSNLLLQYGSFCTQLNRALTGIAVEQDKNTQEVFAQVKQIYKTPPIKDFGGFNFSQILPDPSKPSKRSFIEDLLFNKVTLADAGFIKQYGDCLGDIAARDLICAQKFNGLTVLPPLLTDEMIAQYTSALLAGTITSGWTFGAGAALQIPFAMQMAYRFNGIGVTQNVLYENQKLIANQFNSAIGKIQDSLSSTASALGKLQDVVNQNAQALNTLVKQLSSNFGCISSVLNDILSRLDKVEAEVQIDCLITGRLQSLQTYVTQQLIRAAEIRASANLAATKMSECVLGQSKRVDFCGKGYHLMSFPQSAPHGVVFLHVTYVPAQEKNFTTAPAICHDGKAHFPREGVFVSNGTHWFVTQRNFYEPQIITTDNTFVSGSCDVVIGIVNNTVYDPLQPELDS

SEQ ID NO: 3425 - protein, 1147 aa, Artificial Sequence
  SARS-CoV-2/Wuhan/HBCDC-HB-01/2019__EPI_ISL_402132 spike protein (1-1147)(A972C_R995C)
MFVFLVLLPLVSSQCVNLTTRTQLPPAYTNSITRGVYYPDKVFRSSVLHSTQDLFLPFFSNVTWFHAIHVSGTNGTKRFDNPVLPFNDGVYFASTEKSNIIRGWIFGTTLDSKTQSLLIVNNATNVVIKVCEFQFCNDPFLGVYYHKNNKSWMESEFRVYSSANNCTFEYVSQPFLMDLEGKQGNFKNLREFVFKNIDGYFKIYSKHTPINLVRDLPQGFSALEPLVDLPIGINITRFQTLLALHRSYLTPGDSSSGWTAGAAAYYVGYLQPRTFLLKYNENGTITDAVDCALDPLSETKCTLKSFTVEKGIYQTSNFRVQPTESIVRFPNITNLCPFGEVFNATRFASVYAWNRKRISNCVADYSVLYNSASFSTFKCYGVSPTKLNDLCFTNVYADSFVIRGDEVRQIAPGQTGKIADYNYKLPDDFTGCVIAWNSNNLDSKVGGNYNYLYRLFRKSNLKPFERDISTEIYQAGSTPCNGVEGFNCYFPLQSYGFQPTNGVGYQPYRVVVLSFELLHAPATVCGPKKSTNLVKNKCVNFNFNGLTGTGVLTESNKKFLPFQQFGRDIADTTDAVRDPQTLEILDITPCSFGGVSVITPGTNTSNQVAVLYQDVNCTEVPVAIHADQLTPTWRVYSTGSNVFQTRAGCLIGAEHVNNSYECDIPIGAGICASYQTQTNSPRRARSVASQSIIAYTMSLGAENSVAYSNNSIAIPTNFTISVTTEILPVSMTKTSVDCTMYICGDSTECSNLLLQYGSFCTQLNRALTGIAVEQDKNTQEVFAQVKQIYKTPPIKDFGGFNFSQILPDPSKPSKRSFIEDLLFNKVTLADAGFIKQYGDCLGDIAARDLICAQKFNGLTVLPPLLTDEMIAQYTSALLAGTITSGWTFGAGAALQIPFAMQMAYRFNGIGVTQNVLYENQKLIANQFNSAIGKIQDSLSSTASALGKLQDVVNQNAQALNTLVKQLSSNFGCISSVLNDILSRLDKVEAEVQIDCLITGRLQSLQTYVTQQLIRAAEIRASANLAATKMSECVLGQSKRVDFCGKGYHLMSFPQSAPHGVVFLHVTYVPAQEKNFTTAPAICHDGKAHFPREGVFVSNGTHWFVTQRNFYEPQIITTDNTFVSGNCDVVIGIVNNTVYDPLQPELDS

SEQ ID NO: 3426 - protein, 1147 aa, Artificial Sequence
  SARS-CoV-2/Guangdong/20SF028/2020__EPI_ISL_403936 spike protein (1-1147)(A972C_R995C)
MFVFLVLLPLVSSQCVNLTTRTQLPPAYTNSFTRGVYYPDKVFRSSVLYSTQDLFLPFFSNVTWFHAIHVSGTNGTKRFDNPVLPFNDGVYFASTEKSNIIRGWIFGTTLDSKTQSLLIVNNATNVVIKVCEFQFCNDPFLGVYYHKNNKSWMESEFRVYSSANNCTFEYVSQPFLMDLEGKQGNFKNLREFVFKNIDGYFKIYSKHTPINLVRDLPQGFSALEPLVDLPIGINITRFQTLLALHRSYLTPGDSSSGWTAGAAAYYVGYLQPRTFLLKYNENGTITDAVDCALDPLSETKCTLKSFTVEKGIYQTSNFRVQPTESIVRFPNITNLCPFGEVFNATRFASVYAWNRKRISNCVADYSVLYNSASFSTFKCYGVSPTKLNDLCFTNVYADSFVIRGDEVRQIAPGQTGKIADYNYKLPDDFTGCVIAWNSNNLDSKVGGNYNYLYRLFRKSNLKPFERDISTEIYQAGSTPCNGVEGFNCYFPLQSYGFQPTNGVGYQPYRVVVLSFELLHAPATVCGPKKSTNLVKNKCVNFNFNGLTGTGVLTESNKKFLPFQQFGRDIADTTDAVRDPQTLEILDITPCSFGGVSVITPGTNTSNQVAVLYQDVNCTEVPVAIHADQLTPTWRVYSTGSNVFQTRAGCLIGAEHVNNSYECDIPIGAGICASYQTQTNSPRRARSVASQSIIAYTMSLGAENSVAYSNNSIAIPTNFTISVTTEILPVSMTKTSVDCTMYICGDSTECSNLLLQYGSFCTQLNRALTGIAVEQDKNTQEVFAQVKQIYKTPPIKDFGGFNFSQILPDPSKPSKRSFIEDLLFNKVTLADAGFIKQYGDCLGDIAARDLICAQKFNGLTVLPPLLTDEMIAQYTSALLAGTITSGWTFGAGAALQIPFAMQMAYRFNGIGVTQNVLYENQKLIANQFNSAIGKIQDSLSSTASALGKLQDVVNQNAQALNTLVKQLSSNFGCISSVLNDILSRLDKVEAEVQIDCLITGRLQSLQTYVTQQLIRAAEIRASANLAATKMSECVLGQSKRVDFCGKGYHLMSFPQSAPHGVVFLHVTYVPAQEKNFTTAPAICHDGKAHFPREGVFVSNGTHWFVTQRNFYEPQIITTDNTFVSGNCDVVIGIVNNTVYDPLQPELDS

SEQ ID NO: 3427 - protein, 1147 aa, Artificial Sequence
  SARS-CoV-2/Shenzhen/SZTH-001/2020__EPI_ISL_406592 spike protein (1-1147)(A972C_R995C)
MFVFLVLLPLVSSQCVNLTTRTQLPPAYTNSFTRGVYYPDKVFRSSVLHSTQDLFLPFFSNVTWFHAIHVSGTNGTKRFDNPVLPFNDGVYFASTEKSNIIRGWIFGTTLDSKTQSLLIVNNATNVVIKVCEFQFCNDPFLGVYYHKNNKSWMESEFRVYSSANNCTFEYVSQPFLMDLEGKQGNFKNLREFVFKNIDGYFKIYSKHTPINLVRDLPQGFSALEPLVDLPIGINITRFQTLLALHRSYLTPGDSSSGWTAGAAAYYVGYLQPRTFLLKYNENGTITDAVDCALDPLSETKCTLKSFTVEKGIYQTSNFRVQPTESIVRFPNITNLCPFGEVFNATRFASVYAWNRKRISNCVADYSVLYNSASFSTFKCYGVSPTKLNDLCFTNVYADSFVIRGDEVRQIAPGQTGKIADYNYKLPDDFTGCVIAWNSNNLDSKVGGNYNYLYRLFRKSNLKPFERDISTEIYQAGSTPCNGVEGFNCYFPLQSYGFQPTNGVGYQPYRVVVLSFELLHAPATVCGPKKSTNLVKNKCVNFNFNGLTGTGVLTESNKKFLPFQQFGRDIADTTDAVRDPQTLEILDITPCSFGGVSVITPGTNTSNQVAVLYQDVNCTEVPVAIHADQLTPTWRVYSTGSNVFQTRAGCLIGAEHVNNSYECDIPIGAGICASYQTQTNSPRRARSVASQSIIAYTMSLGAENSVAYSNNSIAIPTNFTISVTTEILPVSMTKTSVDCTMYICGDSTECSNLLLQYGSFCTQLNRALTGIAVEQDKNTQEVFAQVKQIYKTPPIKDFGGFNFSQILPDPSKPSKRSFIEDLLFNKVTLADAGFIKQYGDCLGDIAARDLICAQKFNGLTVLPPLLTDEMIAQYTSALLAGTITSGWTFGAGAALQIPFAMQMAYRFNGIGVTQNVLYENQKLIANQFNSAIGKIQDSLSSTASALGKLQDVVNQNAQALNTLVKQLSSNFGCISSVLNDILSRLDKVEAEVQIDCLITGRLQSLQTYVTQQLIRAAEIRASANLAATKMSECVLGQSKRVDFCGKGYHLMSFPQSAPHGVVFLHVTYVPAQEKNFTTAPAICHDGKAHFPREGVFVSNGTHWFVTQRNFYEPQIITTDNTFVSGNCDVLIGIVNNTVYDPLQPELDS

SEQ ID NO: 3428 - protein, 1147 aa, Artificial Sequence
  SARS-CoV-2/Shenzhen/SZTH-004/2020__EPI_ISL_406595 spike protein (1-1147)(A972C_R995C)
MFVFLVLLPLVSSQCVNLTTRTQLPPAYTNSFTRGVYYPDKVFRSSVLHSTQDLFLPFFSNVTWFHAIHVSGTNGTKRFDNPVLPFNDGVYFASTEKSNIIRGWIFGTTLDSKTQSLLIVNNATNVVIKVCEFQFCNDPFLGVYYHKNNKSWMESEFRVYSSANNCTFEYVSQPFLMDLEGKQGNFKNLREFVFKNIDGYFKIYSKHTPINLVRDLPQGFSALEPLVDLPIGINITRFQTLLALHRSYLTPGDSSSGWTAGAAAYYVGYLQPRTFLLKYNENGTITDAVDCALDPLSETKCTLKSFTVEKGIYQTSNFRVQPTESIVRFPNITNLCPFGEVFNATRFASVYAWDRKRISNCVAYYSVLYNSASFSTFKCYGVSPTKLNDLCFTNVYADSFVIRGDEVRQIAPGQTGKIADYNYKLPDDFTGCVIAWNSNNLDSKVGGNYNYLYRLFRKSNLKPFERDISTEIYQAGSTPCNGVEGFNCYFPLQSYGFQPTNGVGYQPYRVVVLSFELLHAPATVCGPKKSTNLVKNKCVNFNFNGLTGTGVLTESNKKFLPFQQFGRDIADTTDAVRDPQTLEILDITPCSFGGVSVITPGTNTSNQVAVLYQDVNCTEVPVAIHADQLTPTWRVYSTGSNVFQTRAGCLIGAEHVNNSYECDIPIGAGICASYQTQTNSPRRARSVASQSIIAYTMSLGAENSVAYSNNSIAIPTNFTISVTTEILPVSMTKTSVDCTMYICGDSTECSNLLLQYGSFCTQLNRALTGIAVEQDKNTQEVFAQVKQIYKTPPIKDFGGFNFSQILPDPSKPSKRSFIEDLLFNKVTLADAGFIKQYGDCLGDIAARDLICAQKFNGLTVLPPLLTDEMIAQYTSALLAGTITSGWTFGAGAALQIPFAMQMAYRFNGIGVTQNVLYENQKLIANQFNSAIGKIQDSLSSTASALGKLQDVVNQNAQALNTLVKQLSSNFGCISSVLNDILSRLDKVEAEVQIDCLITGRLQSLQTYVTQQLIRAAEIRASANLAATKMSECVLGQSKRVDFCGKGYHLMSFPQSAPHGVVFLHVTYVPAQEKNFTTAPAICHDGKAHFPREGVFVSNGTHWFVTQRNFYEPQIITTDNTFVSGNCDVVIGIVNNTVYDPLQPELDS

SEQ ID NO: 3429 - protein, 1147 aa, Artificial Sequence
  SARS-CoV-2/France/IDF0372/2020__EPI_ISL_406596 spike protein (1-1147)(A972C_R995C)
MFVFLVLLPLVSSQCVNLTTRTQLPPAYTNSFTRGVYYPDKVFRSSVLHSTQDLFLPFFSNVTWFHAIHVSGTNGTKRFDNPVLPFNDGVYFASTEKSNIIRGWIFGTTLDSKTQSLLIVNNATNVVIKVCEFQFCNDPFLGVYYHKNNKSWMESEFRVYSSANNCTFEYVSQPFLMDLEGKQGNFKNLREFVFKNIDGYFKIYSKHTPINLVRDLPQGFSALEPLVDLPIGINITRFQTLLALHRSYLTPGDSSSGWTAGAAAYYVGYLQPRTFLLKYNENGTITDAVDCALDPLSETKCTLKSFTVEKGIYQTSNFRVQPTESIVRFPNITNLCPFGEVFNATRFASVYAWNRKRISNCVADYSFLYNSASFSTFKCYGVSPTKLNDLCFTNVYADSFVIRGDEVRQIAPGQTGKIADYNYKLPDDFTGCVIAWNSNNLDSKVGGNYNYLYRLFRKSNLKPFERDISTEIYQAGSTPCNGVEGFNCYFPLQSYGFQPTNGVGYQPYRVVVLSFELLHAPATVCGPKKSTNLVKNKCVNFNFNGLTGTGVLTESNKKFLPFQQFGRDIADTTDAVRDPQTLEILDITPCSFGGVSVITPGTNTSNQVAVLYQDVNCTEVPVAIHADQLTPTWRVYSTGSNVFQTRAGCLIGAEHVNNSYECDIPIGAGICASYQTQTNSPRRARSVASQSIIAYTMSLGAENSVAYSNNSIAIPTNFTISVTTEILPVSMTKTSVDCTMYICGDSTECSNLLLQYGSFCTQLNRALTGIAVEQDKNTQEVFAQVKQIYKTPPIKDFGGFNFSQILPDPSKPSKRSFIEDLLFNKVTLADAGFIKQYGDCLGDIAARDLICAQKFNGLTVLPPLLTDEMIAQYTSALLAGTITSGWTFGAGAALQIPFAMQMAYRFNGIGVTQNVLYENQKLIANQFNSAIGKIQDSLSSTASALGKLQDVVNQNAQALNTLVKQLSSNFGCISSVLNDILSRLDKVEAEVQIDCLITGRLQSLQTYVTQQLIRAAEIRASANLAATKMSECVLGQSKRVDFCGKGYHLMSFPQSAPHGVVFLHVTYVPAQEKNFTTAPAICHDGKAHFPREGVFVSNGTHWFVTQRNFYEPQIITTDNTFVSGNCDVVIGIVNNTVYDPLQPELDS

SEQ ID NO: 3430 - protein, 1147 aa, Artificial Sequence
  SARS-CoV-2/Australia/VIC01/2020__EPI_ISL_406844 spike protein (1-1147)(A972C_R995C)
MFVFLVLLPLVSSQCVNLTTRTQLPPAYTNSFTRGVYYPDKVFRSSVLHSTQDLFLPFFSNVTWFHAIHVSGTNGTKRFDNPVLPFNDGVYFASTEKSNIIRGWIFGTTLDSKTQSLLIVNNATNVVIKVCEFQFCNDPFLGVYYHKNNKSWMESEFRVYSSANNCTFEYVSQPFLMDLEGKQGNFKNLREFVFKNIDGYFKIYSKHTPINLVRDLPQGFSALEPLVDLPIGINITRFQTLLALHRRYLTPGDSSSGWTAGAAAYYVGYLQPRTFLLKYNENGTITDAVDCALDPLSETKCTLKSFTVEKGIYQTSNFRVQPTESIVRFPNITNLCPFGEVFNATRFASVYAWNRKRISNCVADYSVLYNSASFSTFKCYGVSPTKLNDLCFTNVYADSFVIRGDEVRQIAPGQTGKIADYNYKLPDDFTGCVIAWNSNNLDSKVGGNYNYLYRLFRKSNLKPFERDISTEIYQAGSTPCNGVEGFNCYFPLQSYGFQPTNGVGYQPYRVVVLSFELLHAPATVCGPKKSTNLVKNKCVNFNFNGLTGTGVLTESNKKFLPFQQFGRDIADTTDAVRDPQTLEILDITPCSFGGVSVITPGTNTSNQVAVLYQDVNCTEVPVAIHADQLTPTWRVYSTGSNVFQTRAGCLIGAEHVNNSYECDIPIGAGICASYQTQTNSPRRARSVASQSIIAYTMSLGAENSVAYSNNSIAIPTNFTISVTTEILPVSMTKTSVDCTMYICGDSTECSNLLLQYGSFCTQLNRALTGIAVEQDKNTQEVFAQVKQIYKTPPIKDFGGFNFSQILPDPSKPSKRSFIEDLLFNKVTLADAGFIKQYGDCLGDIAARDLICAQKFNGLTVLPPLLTDEMIAQYTSALLAGTITSGWTFGAGAALQIPFAMQMAYRFNGIGVTQNVLYENQKLIANQFNSAIGKIQDSLSSTASALGKLQDVVNQNAQALNTLVKQLSSNFGCISSVLNDILSRLDKVEAEVQIDCLITGRLQSLQTYVTQQLIRAAEIRASANLAATKMSECVLGQSKRVDFCGKGYHLMSFPQSAPHGVVFLHVTYVPAQEKNFTTAPAICHDGKAHFPREGVFVSNGTHWFVTQRNFYEPQIITTDNTFVSGNCDVVIGIVNNTVYDPLQPELDS

SEQ ID NO: 3431 - protein, 1147 aa, Artificial Sequence
  SARS-CoV-2/Germany/BavPat1/2020__EPI_ISL_406862 spike protein (1-1147)(A972C_R995C)
MFVFLVLLPLVSSQCVNLTTRTQLPPAYTNSFTRGVYYPDKVFRSSVLHSTQDLFLPFFSNVTWFHAIHVSGTNGTKRFDNPVLPFNDGVYFASTEKSNIIRGWIFGTTLDSKTQSLLIVNNATNVVIKVCEFQFCNDPFLGVYYHKNNKSWMESEFRVYSSANNCTFEYVSQPFLMDLEGKQGNFKNLREFVFKNIDGYFKIYSKHTPINLVRDLPQGFSALEPLVDLPIGINITRFQTLLALHRSYLTPGDSSSGWTAGAAAYYVGYLQPRTFLLKYNENGTITDAVDCALDPLSETKCTLKSFTVEKGIYQTSNFRVQPTESIVRFPNITNLCPFGEVFNATRFASVYAWNRKRISNCVADYSVLYNSASFSTFKCYGVSPTKLNDLCFTNVYADSFVIRGDEVRQIAPGQTGKIADYNYKLPDDFTGCVIAWNSNNLDSKVGGNYNYLYRLFRKSNLKPFERDISTEIYQAGSTPCNGVEGFNCYFPLQSYGFQPTNGVGYQPYRVVVLSFELLHAPATVCGPKKSTNLVKNKCVNFNFNGLTGTGVLTESNKKFLPFQQFGRDIADTTDAVRDPQTLEILDITPCSFGGVSVITPGTNTSNQVAVLYQGVNCTEVPVAIHADQLTPTWRVYSTGSNVFQTRAGCLIGAEHVNNSYECDIPIGAGICASYQTQTNSPRRARSVASQSIIAYTMSLGAENSVAYSNNSIAIPTNFTISVTTEILPVSMTKTSVDCTMYICGDSTECSNLLLQYGSFCTQLNRALTGIAVEQDKNTQEVFAQVKQIYKTPPIKDFGGFNFSQILPDPSKPSKRSFIEDLLFNKVTLADAGFIKQYGDCLGDIAARDLICAQKFNGLTVLPPLLTDEMIAQYTSALLAGTITSGWTFGAGAALQIPFAMQMAYRFNGIGVTQNVLYENQKLIANQFNSAIGKIQDSLSSTASALGKLQDVVNQNAQALNTLVKQLSSNFGCISSVLNDILSRLDKVEAEVQIDCLITGRLQSLQTYVTQQLIRAAEIRASANLAATKMSECVLGQSKRVDFCGKGYHLMSFPQSAPHGVVFLHVTYVPAQEKNFTTAPAICHDGKAHFPREGVFVSNGTHWFVTQRNFYEPQIITTDNTFVSGNCDVVIGIVNNTVYDPLQPELDS

SEQ ID NO: 3432 - protein, 1147 aa, Artificial Sequence
  SARS-CoV-2/Wuhan/HBCDC-HB-02/2020__EPI_ISL_412978 spike protein (1-1147)(A972C_R995C)
MFVFLVLLPLVSSQCVNLTTRTQLPPAYTNSFTRGVYYPDKVFRSSVLHSTQDLFLPFFSNVTWFHAIHVSGTNGTKRFDNPVLPFNDGVYFASTEKSNIIRGWIFGTTLDSKTQSLLIVNNATNVVIKVCEFQFCNDPFLGVYYHKNNKSWMESEFRVYSSANNCTFEYVSQPFLMDLEGKQGNFKNLREFVFKNIDGYFKIYSKHTPINLVRDLPQGFSALEPLVDLPIGINITRFQTLLALHRSYLTPGDSSSGWTAGAAAYYVGYLQPRTFLLKYNENGTITDAVDCALDPLSETKCTLKSFTVEKGIYQTSNFRVQPTESIVRFPNITNLCPFGEVFNATRFASVYAWNRKRISNCVADYSVLYNSASFSTFKCYGVSPTKLNDLCFTNVYADSFVIRGDEVRQIAPGQTGKIADYNYKLPDDFTGCVIAWNSNNLDSKVGGNYNYLYRLFRKSNLKPFERDISTEIYQAGSTPCNGVEGFNCYFPLQSYGFQPTNGVGYQPYRVVVLSFELLHAPATVCGPKKSTNLVKNKCVNFNFNGLTGTGVLTESNKKFLPFQQFGRDIADTTDAVRDPQTLEILDITPCSFGGVSVITPGTNTSNQVAVLYQDVNCTEVPVAIHADQLTPTWRVYSTGSNVFQTRAGCLIGAEHVNNSYECDIPIGAGICASYQTQTNSPRRARSVASQSIIAYTMSLGAENSVAYSNNSIAIPTNFTISVTTEILPVSMTKTSVDCTMYICGDSTECSNFLLQYGSFCTQLNRALTGIAVEQDKNTQEVFAQVKQIYKTPPIKDFGGFNFSQILPDPSKPSKRSFIEDLLFNKVTLADAGFIKQYGDCLGDIAARDLICAQKFNGLTVLPPLLTDEMIAQYTSALLAGTITSGWTFGAGAALQIPFAMQMAYRFNGIGVTQNVLYENQKLIANQFNSAIGKIQDSLSSTASALGKLQDVVNQNAQALNTLVKQLSSNFGCISSVLNDILSRLDKVEAEVQIDCLITGRLQSLQTYVTQQLIRAAEIRASANLAATKMSECVLGQSKRVDFCGKGYHLMSFPQSAPHGVVFLHVTYVPAQEKNFTTAPAICHDGKAHFPREGVFVSNGTHWFVTQRNFYEPQIITTDNTFVSGNCDVVIGIVNNTVYDPLQPELDS

SEQ ID NO: 3433 - protein, 1147 aa, Artificial Sequence
  SARS-CoV-2/Australia/QLD02/2020__EPI_ISL_407896 spike protein (1-1147)(A972C_R995C)
MFVFLVLLPLVSSQCVNLTTRTQLPPAYTNSFTRGVYYPDKVFRSSVLHSTQDLFLPFFSNVTWFHAIHVSGTNGTKRFDNPVLPFNDGVYFASTEKSNIIRGWIFGTTLDSKTQSLLIVNNATNVVIKVCEFQFCNDPFLGVYYHKNNKSWMESEFRVYSSANNCTFEYVSQPFLMDLEGKQGNFKNLREFVFKNIDGYFKIYSKHTPINLVRDLPQGFSALEPLVDLPIGINITRFQTLLALHRSYLTPGDSSSGWTAGAAAYYVGYLQPRTFLLKYNENGTITDAVDCALDPLSETKCTLKSFTVEKGIYQTSNFRVQPTESIVRFPNITNLCPFGEVFNATRFASVYAWNRKRISNCVADYSVLYNSASFSTFKCYGVSPTKLNDLCFTNVYADSFVIRGDEVRQIAPGQTGKIADYNYKLPDDFTGCVIAWNSNNLDSKVGGNYNYLYRLFRKSNLKPFERDISTEIYQAGSTPCNGVEGFNCYFPLQSYGFQPTNGVGYQPYRVVVLSFELLHAPATVCGPKKSTNLVKNKCVNFNFNGLTGTGVLTESNKKFLPFQQFGRDIADTTDAVRDPQTLEILDITPCSFGGVSVITPGTNTSNQVAVLYQDVNCTEVPVAIHADQLTPTWRVYSTGSNVFQTRAGCLIGAEHVNNSYECDIPIGAGICASYQTQTNSPRRARSVASQSIIAYTMSLGAENSVAYSNNSIAIPTNFTISVTTEILPVSMTKTSVDCTMYICGDSTECSNLLLQYGSFCTQLNRALTGIAVEQDKNTQEVFAQVKQIYKTPPIKDFGGFNFSQILPDPSKPSKRSFIEDLLFNKVTLADAGFIKQYGDCLGDIAARDLICAQKFNGLTVLPPLLTDEMIAQYTSALLAGTITSGWTFGAGAALQIPFAMQMAYRFNGIGVTQNVLYENQKLIANQFNSAIGKIQDSLSSTASALGKLQDVVNQNAQALNTLVKQLSSNFGCISSVLNDILSRLDKVEAEVQIDCLITGRLQSLQTYVTQQLIRAAEIRASANLAATKMSECVLGQSKRVDFCGKGYHLMSFPQSAPHGVVFLHVTYVPAQEKNFTTAPAICHDGKAHFPREGVFVSNGTHWFVTQRNFYEPQIITTDNTFVSGNCDVVIGIVNNTVYDPLQLELDS

SEQ ID NO: 3434 - protein, 1147 aa, Artificial Sequence
  SARS-CoV-2/India/1-31/2020__EPI_ISL_413523 spike protein (1-1147)(A972C_R995C)
MFVFLVLLPLVSSQCVNLTTRTQLPPAYTNSFTRGVYYPDKVFRSSVLHSTQDLFLPFFSNVTWFHAIHVSGTNGTKRFDNPVLPFNDGVYFASTEKSNIIRGWIFGTTLDSKTQSLLIVNNATNVVIKVCEFQFCNDPFLGVYYHKNNKSWMESEFRVYSSANNCTFEYVSQPFLMDLEGKQGNFKNLREFVFKNIDGYFKIYSKHTPINLVRDLPQGFSALEPLVDLPIGINITRFQTLLALHRSYLTPGDSSSGWTAGAAAYYVGYLQPRTFLLKYNENGTITDAVDCALDPLSETKCTLKSFTVEKGIYQTSNFRVQPTESIVRFPNITNLCPFGEVFNATRFASVYAWNRKRISNCVADYSVLYNSASFSTFKCYGVSPTKLNDLCFTNVYADSFVIRGDEVRQIAPGQTGKIADYNYKLPDDFTGCVIAWNSNNLDSKVGGNYNYLYRLFRKSNLKPFERDISTEIYQAGSTPCNGVEGFNCYFPLQSYGFQPTNGVGYQPYRVVVLSFELLHAPATVCGPKKSTNLVKNKCVNFNFNGLTGTGVLTESNKKFLPFQQFGRDIADTTDAVRDPQTLEILDITPCSFGGVSVITPGTNTSNQVAVLYQDVNCTEVPVAIHADQLTPTWRVYSTGSNVFQTRAGCLIGAEHVNNSYECDIPIGAGICASYQTQTNSPRRARSVASQSIIAYTMSLGAENSVAYSNNSIAIPTNFTISVTTEILPVSMTKTSVDCTMYICGDSTECSNLLLQYGSFCTQLNRALTGIAVEQDKNTQEVFAQVKQIYKTPPIKDFGGFNFSQILPDPSKPSKRSFIEDLLFNKVTLADAGFIKQYGDCLGDIAARDLICAQKFNGLTVLPPLLTDEMIAQYTSALLAGTITSGWTFGAGAALQIPFAMQMAYRFNGIGVTQNVLYENQKLIANQFNSVIGKIQDSLSSTASALGKLQDVVNQNAQALNTLVKQLSSNFGCISSVLNDILSRLDKVEAEVQIDCLITGRLQSLQTYVTQQLIRAAEIRASANLAATKMSECVLGQSKRVDFCGKGYHLMSFPQSAPHGVVFLHVTYVPAQEKNFTTAPAICHDGKAHFPREGVFVSNGTHWFVTQRNFYEPQIITTDNTFVSGNCDVVIGIVNNTVYDPLQPELDS

SEQ ID NO: 3435 - protein, 1147 aa, Artificial Sequence
  SARS-CoV-2/Guangdong/GD2020087-P0008/2020__EPI_ISL_413863 spike protein (1-1147)(A972C_R995C)
MFVFLVLLPLVSSQCVNLTTRTQLPPAYTNSFTRGVYYPDKVFRSSVLHSTQDLFLPFFSNVTWFHAIHVSGTNGTKRFDNPVLPFNDGVYFASTEKSNIIRGWIFGTTLDSKTQSLLIVNNATNVVIKVCEFQFCNDPFLGVYYHKNNKSWMESEFRVYSSANNCTFEYVSQPFLMDLEGKQGNFKNLREFVFKNIDGYFKIYSKHTPINLVRDLPQGFSALEPLVDLPIGINITRFQTLLALHRSYLTPGDSSSGWTAGAAAYYVGYLQPRTFLLKYNENGTITDAVDCALDPLSETKCTLKSFTVEKGIYQTSNFRVQPTESIVRFPNITNLCPFGEVFNATRFASVYAWNRKRISNCVADYSVLYNSASFSTFKCYGVSPTKLNDLCFTNVYADSFVIRGDEVREIAPGQTGKIADYNYKLPDDFTGCVIAWNSNNLDSKVGGNYNYLYRLFRKSNLKPFERDISTEIYQAGSTPCNGVEGFNCYFPLQSYGFQPTNGVGYQPYRVVVLSFELLHAPATVCGPKKSTNLVKNKCVNFNFNGLTGTGVLTESNKKFLPFQQFGRDIADTTDAVRDPQTLEILDITPCSFGGVSVITPGTNTSNQVAVLYQDVNCTEVPVAIHADQLTPTWRVYSTGSNVFQTRAGCLIGAEHVNNSYECDIPIGAGICASYQTQTNSPRRARSVASQSIIAYTMSLGAENSVAYSNNSIAIPTNFTISVTTEILPVSMTKTSVDCTMYICGDSTECSNLLLQYGSFCTQLNRALTGIAVEQDKNTQEVFAQVKQIYKTPPIKDFGGFNFSQILPDPSKPSKRSFIEDLLFNKVTLADAGFIKQYGDCLGDIAARDLICAQKFNGLTVLPPLLTDEMIAQYTSALLAGTITSGWTFGAGAALQIPFAMQMAYRFNGIGVTQNVLYENQKLIANQFNSAIGKIQDSLSSTASALGKLQDVVNQNAQALNTLVKQLSSNFGCISSVLNDILSRLDKVEAEVQIDCLITGRLQSLQTYVTQQLIRAAEIRASANLAATKMSECVLGQSKRVDFCGKGYHLMSFPQSAPHGVVFLHVTYVPAQEKNFTTAPAICHDGKAHFPREGVFVSNGTHWFVTQRNFYEPQIITTDNTFVSGNCDVVIGIVNNTVYDPLQPELDS

SEQ ID NO: 3436 - protein, 1147 aa, Artificial Sequence
  SARS-CoV-2/Sweden/01/2020__EPI_ISL_411951 spike protein (1-1147)(A972C_R995C)
MFVFLVLLPLVSSQCVNLTTRTQLPPAYTNSFTRGVYYPDKVFRSSVLHSTQDLFLPFFSNVTWFHAIHVSGTNGTKRFDNPVLPFNDGVYFASTEKSNIIRGWIFGTTLDSKTQSLLIVNNATNVVIKVCEFQFCNDPFLGVYYHKNNKSWMESEFRVYSSANNCTFEYVSQPFLMDLEGKQGNFKNLREFVFKNIDGYFKIYSKHTPINLVRDLPQGFSALEPLVDLPIGINITRFQTLLALHRSYLTPGDSSSGWTAGAAAYYVGYLQPRTFLLKYNENGTITDAVDCALDPLSETKCTLKSFTVEKGIYQTSNFRVQPTESIVRFPNITNLCPFGEVFNATRFASVYAWNRKRISNCVADYSVLYNSASFSTFKCYGVSPTKLNDLCFTNVYADSFVIRGDEVRQIAPGQTGKIADYNYKLPDDFTGCVIAWNSNNLDSKVGGNYNYLYRLFRKSNLKPFERDISTEIYQAGSTPCNGVEGFNCYFPLQSYGFQPTNGVGYQPYRVVVLSFELLHAPATVCGPKKSTNLVKNKCVNFNFNGLTGTGVLTESNKKFLPFQQFGRDIADTTDAVRDPQTLEILDITPCSFGGVSVITPGTNTSNQVAVLYQDVNCTEVPVAIHADQLTPTWRVYSTGSNVFQTRAGCLIGAEHVNNSYECDIPIGAGICASYQTQTNSPRRARSVASQSIIAYTMSLGAENSVAYSNNSIAIPTNFTISVTTEILPVSMTKTSVDCTMYICGDSTECSNLLLQYGSFCTQLNRALTGIAVEQDKNTQEVFAQVKQIYKTPPIKDCGGFNFSQILPDPSKPSKRSFIEDLLFNKVTLADAGFIKQYGDCLGDIAARDLICAQKFNGLTVLPPLLTDEMIAQYTSALLAGTITSGWTFGAGAALQIPFAMQMAYRFNGIGVTQNVLYENQKLIANQFNSAIGKIQDSLSSTASALGKLQDVVNQNAQALNTLVKQLSSNFGCISSVLNDILSRLDKVEAEVQIDCLITGRLQSLQTYVTQQLIRAAEIRASANLAATKMSECVLGQSKRVDFCGKGYHLMSFPQSAPHGVVFLHVTYVPAQEKNFTTAPAICHDGKAHFPREGVFVSNGTHWFVTQRNFYEPQIITTDNTFVSGNCDVVIGIVNNTVYDPLQPELDS

SEQ ID NO: 3437 - protein, 1147 aa, Artificial Sequence
  SARS-CoV-2/Tianmen/HBCDC-HB-07/2020__EPI_ISL_412983 spike protein (1-1147)(A972C_R995C)
MFVFLVLLPLVSSQCVNLTTRTQLPPAYTNSFTRGVYYPDKVFRSSVLHSTQDLFLPFFSNVTWFHAIHVSGTNGTKRFDNPVLPFNDGVYFASTEKSNIIRGWIFGTTLDSKTQSLLIVNNATNVVIKVCEFQFCNDPFLGVYYHKNNKSWMESEFRVYSSANNCTFEYVSQPFLMDLEGKQGNFKNLREFVFKNIDGYFKIYSKHTPINLVRDLPQGFSALEPLVDLPIGINITRFQTLLALHRSYLTPGDSSSGWTAGAAAYYVGYLQPRTFLLKYNENGTITDAVDCALDPLSETKCTLKSFTVEKGIYQTSNFRVQPTESIVRFPNITNLCPFGEVFNATRFASVYAWNRKRISNCVADYSVLYNSASFSTFKCYGVSPTKLNDLCFTNVYADSFVIRGDEVRQIAPGQTGKIADYNYKLPDDFTGCVIAWNSNNLDSKVGGNYNYLYRLFRKSNLKPFERDISTEIYQAGSTPCNGVEGFNCYFPLQSYGFQPTNGVGYQPYRVVVLSFELLHAPATVCGPKKSTNLVKNKCVNFNFNGLTGTGVLTESNKKFLPFQQFGRDIADTTDAVRDPQTLEILDITPCSFGGVSVITPGTNTSNQVAVLYQDLNCTEVPVAIHADQLTPTWRVYSTGSNVFQTRAGCLIGAEHVNNSYECDIPIGAGICASYQTQTNSPRRARSVASQSIIAYTMSLGAENSVAYSNNSIAIPTNFTISVTTEILPVSMTKTSVDCTMYICGDSTECSNLLLQYGSFCTQLNRALTGIAVEQDKNTQEVFAQVKQIYKTPPIKDFGGFNFSQILPDPSKPSKRSFIEDLLFNKVTLADAGFIKQYGDCLGDIAARDLICAQKFNGLTVLPPLLTDEMIAQYTSALLAGTITSGWTFGAGAALQIPFAMQMAYRFNGIGVTQNVLYENQKLIANQFNSAIGKIQDSLSSTASALGKLQDVVNQNAQALNTLVKQLSSNFGCISSVLNDILSRLDKVEAEVQIDCLITGRLQSLQTYVTQQLIRAAEIRASANLAATKMSECVLGQSKRVDFCGKGYHLMSFPQSAPHGVVFLHVTYVPAQEKNFTTAPAICHDGKAHFPREGVFVSNGTHWFVTQRNFYEPQIITTDNTFVSGNCDVVIGIVNNTVYDPLQPELDS

SEQ ID NO: 3438 - protein, 1147 aa, Artificial Sequence
  SARS-CoV-2/Hong Kong/case42_VM20002493/2020__EPI_ISL_414527 spike protein (1-1147)(A972C_R995C)
MFVFLVLLPLVSSQCVNLTTRTQLPPAYTNSFTRGVYYPDKVFRSSVLHSTQDLFLPFFSNVTWFHAIHVSGTNGTKRFDNPVLPFNDGVYFASTEKSNIIRGWIFGTTLDSKTQSLLIVNNATNVVIKVCEFQFCNDPFLGVYYHKNNKSWMESEFRVYSSANNCTFEYVSQPFLMDLEGKQGNFKNLREFVFKNIDGYFKIYSKHTPINLVRDLPQGFSALEPLVDLPIGINITRFQTLLALHRSYLTPGDSSSGWTAGAAAYYVGYLQPRTFLLKYNENGTITDAVDCALDPLSETKCTLKSFTVEKGIYQTSNFRVQPTESIVRFPNITNLCPFGEVFNATRFASVYAWNRKRISNCVADYSVLYNSASFSTFKCYGVSPTKLNDLCFTNVYADSFVIRGDEVRQIAPGQTGKIADYNYKLPDDFTGCVIAWNSNNLDSKVGGNYNYLYRLFRKSNLKPFERDISTEIYQAGSTPCNGVEGFNCYFPLQSYGFQPTNGVGYQPYRVVVLSFELLHAPATVCGPKKSTNLVKNKCVNFNFNGLTGTGVLTESNKKFLPFQQFGRDIADTTDAVRDPQTLEILDITPCSFGGVSVITPGTNTSNQVAVLYQDVNCTEVPVAIHADQLTPTWRVYSTGSNVFQTRAGCLIGAEHVNNSYECDIPIGAGICASYQTQTNSPRRARSVASQSIIAYTMSLGAENSVAYSNNSIAIPTNFAISVTTEILPVSMTKTSVDCTMYICGDSTECSNLLLQYGSFCTQLNRALTGIAVEQDKNTQEVFAQVKQIYKTPPIKDFGGFNFSQILPDPSKPSKRSFIEDLLFNKVTLADAGFIKQYGDCLGDIAARDLICAQKFNGLTVLPPLLTDEMIAQYTSALLAGTITSGWTFGAGAALQIPFAMQMAYRFNGIGVTQNVLYENQKLIANQFNSAIGKIQDSLSSTASALGKLQDVVNQNAQALNTLVKQLSSNFGCISSVLNDILSRLDKVEAEVQIDCLITGRLQSLQTYVTQQLIRAAEIRASANLAATKMSECVLGQSKRVDFCGKGYHLMSFPQSAPHGVVFLHVTYVPAQEKNFTTAPAICHDGKAHFPREGVFVSNGTHWFVTQRNFYEPQIITTDNTFVSGNCDVVIGIVNNTVYDPLQPELDS

SEQ ID NO: 3439 - protein, 1147 aa, Artificial Sequence
  SARS-CoV-2/USA/CruiseA-23/2020__EPI_ISL_414482 spike protein (1-1147)(A972C_R995C)
MFVFLVLLPLVSSQCVNLTTRTQLPPAYTNSFTRGVYYPDKVFRSSVLHSTQDLFLPFFSNVTWFHAIHVSGTNGTKRFDNPVLPFNDGVYFASTEKSNIIRGWIFGTTLDSKTQSLLIVNNATNVVIKVCEFQFCNDPFLGVYYHKNNKSWMESEFRVYSSANNCTFEYVSQPFLMDLEVKQGNFKNLREFVFKNIDGYFKIYSKHTPINLVRDLPQGFSALEPLVDLPIGINITRFQTLLALHRSYLTPGDSSSGWTAGAAAYYVGYLQPRTFLLKYNENGTITDAVDCALDPLSETKCTLKSFTVEKGIYQTSNFRVQPTESIVRFPNITNLCPFGEVFNATRFASVYAWNRKRISNCVADYSVLYNSASFSTFKCYGVSPTKLNDLCFTNVYADSFVIRGDEVRQIAPGQTGKIADYNYKLPDDFTGCVIAWNSNNLDSKVGGNYNYLYRLFRKSNLKPFERDISTEIYQAGSTPCNGVEGFNCYFPLQSYGFQPTNGVGYQPYRVVVLSFELLHAPATVCGPKKSTNLVKNKCVNFNFNGLTGTGVLTESNKKFLPFQQFGRDIADTTDAVRDPQTLEILDITPCSFGGVSVITPGTNTSNQVAVLYQDVNCTEVPVAIHADQLTPTWRVYSTGSNVFQTRAGCLIGAEHVNNSYECDIPIGAGICASYQTQTNSPRRARSVASQSIIAYTMSLGAENSVAYSNNSIAIPTNFTISVTTEILPVSMTKTSVDCTMYICGDSTECSNLLLQYGSFCTQLNRALTGIAVEQDKNTQEVFAQVKQIYKTPPIKDFGGFNFSQILPDPSKPSKRSFIEDLLFNKVTLADAGFIKQYGDCLGDIAARDLICAQKFNGLTVLPPLLTDEMIAQYTSALLAGTITSGWTFGAGAALQIPFAMQMAYRFNGIGVTQNVLYENQKLIANQFNSAIGKIQDSLSSTASALGKLQDVVNQNAQALNTLVKQLSSNFGCISSVLNDILSRLDKVEAEVQIDCLITGRLQSLQTYVTQQLIRAAEIRASANLAATKMSECVLGQSKRVDFCGKGYHLMSFPQSAPHGVVFLHVTYVPAQEKNFTTAPAICHDGKAHFPREGVFVSNGTHWFVTQRNFYEPQIITTDNTFVSGNCDVVIGIVNNTVYDPLQPELDS

SEQ ID NO: 3440 - protein, 1147 aa, Artificial Sequence
  SARS-CoV-2/Hong Kong/case85_VM20002868/2020__EPI_ISL_414519 spike protein (1-1147)(A972C_R995C)
MFVFLVLVPLVSSQCVNLTTRTQLPPAYTNSFTRGVYYPDKVFRSSVLHSTQDLFLPFFSNVTWFHAIHVSGTNGTKRFDNPVLPFNDGVYFASTEKSNIIRGWIFGTTLDSKTQSLLIVNNATNVVIKVCEFQFCNDPFLGVYYHKNNKSWMESEFRVYSSANNCTFEYVSQPFLMDLEGKQGNFKNLREFVFKNIDGYFKIYSKHTPINLVRDLPQGFSALEPLVDLPIGINITRFQTLLALHRSYLTPGDSSSGWTAGAAAYYVGYLQPRTFLLKYNENGTITDAVDCALDPLSETKCTLKSFTVEKGIYQTSNFRVQPTESIVRFPNITNLCPFGEVFNATRFASVYAWNRKRISNCVADYSVLYNSASFSTFKCYGVSPTKLNDLCFTNVYADSFVIRGDEVRQIAPGQTGKIADYNYKLPDDFTGCVIAWNSNNLDSKVGGNYNYLYRLFRKSNLKPFERDISTEIYQAGSTPCNGVEGFNCYFPLQSYGFQPTNGVGYQPYRVVVLSFELLHAPATVCGPKKSTNLVKNKCVNFNFNGLTGTGVLTESNKKFLPFQQFGRDIADTTDAVRDPQTLEILDITPCSFGGVSVITPGTNTSNQVAVLYQDVNCTEVPVAIHADQLTPTWRVYSTGSNVFQTRAGCLIGAEHVNNSYECDIPIGAGICASYQTQTNSPRRARSVASQSIIAYTMSLGAENSVAYSNNSIAIPTNFTISVTTEILPVSMTKTSVDCTMYICGDSTECSNLLLQYGSFCTQLNRALTGIAVEQDKNTQEVFAQVKQIYKTPPIKDFGGFNFSQILPDPSKPSKRSFIEDLLFNKVTLADAGFIKQYGDCLGDIAARDLICAQKFNGLTVLPPLLTDEMIAQYTSALLAGTITSGWTFGAGAALQIPFAMQMAYRFNGIGVTQNVLYENQKLIANQFNSAIGKIQDSLSSTASALGKLQDVVNQNAQALNTLVKQLSSNFGCISSVLNDILSRLDKVEAEVQIDCLITGRLQSLQTYVTQQLIRAAEIRASANLAATKMSECVLGQSKRVDFCGKGYHLMSFPQSAPHGVVFLHVTYVPAQEKNFTTAPAICHDGKAHFPREGVFVSNGTHWFVTQRNFYEPQIITTDNTFVSGNCDVVIGIVNNTVYDPLQPELDS

SEQ ID NO: 3441 - protein, 1147 aa, Artificial Sequence; identical to SEQ ID NO: 3431
  SARS-CoV-2/England/200990660/2020__EPI_ISL_414523 spike protein (1-1147)(A972C_R995C)

SEQ ID NO: 3442 - protein, 1147 aa, Artificial Sequence
  SARS-CoV-2/Australia/NSW09/2020__EPI_ISL_413595 spike protein (1-1147)(A972C_R995C)
MFVFLVLLPLVSSQCVNLTTRTQLPPAYTNSFTRGVYYPDKVFRSSVLHSTQDLFLPFFSNVTWFHAIHVSGTNGTKRFDNPVLPFNDGVYFASTEKSNIIRGWIFGTTLDSKTQSLLIVNNATNVVIKVCEFQFCNDPFLGVYYHKNNKSWMESEFRVYSSANNCTFEYVSQPFLMDLEGKQGNFKNLREFVFKNIDGYFKIYSKHTPINLVRDLPQGFSALEPLVDLPIGINITRFQTLLALHRSYLTPGDSSSGWTAGAAAYYVGYLQPRTFLLKYNENGTITDAVDCALDPLSETKCTLKSFTVEKGIYQTSNFRVQPTESIVRFPNITNLCPFGEVFNATRFASVYAWNRKRISNCVADYSVLYNSASFSTFKCYGVSPTKLNDLCFTNVYADSFVIRGDEVRQIAPGQTGKIADYNYKLPDDFTGCVIAWNSNNLDSKVGGNYNYLYRLFRKSNLKPFERDISTEIYQAGSTPCNGVEGFNCYFPLQSYGFQPTNGVGYQPYRVVVLSFELLHAPATVCGPKKSTNLVKNKCVNFNFNGLTGTGVLTESNKKFLPFQQFGRDIADTTDAVRDPQTLEILDITPCSFGGVSVITPGTNTSNQVAVLYQDVNCTEVPVAIHADQLTPTWRVYSTGSNVFQTRAGCLIGAEHVNNSYECDIPIGAGICASYQTQTNSPRRARSVASQSIIAYTMSLGAENSVAYSNNSIAIPTNFTISVTTEILPVSMTKTSVDCTMYICGDSTECSNLLLQYGSFCTQLNRALTGIAVEQDKNTQEVFAQVKQIYKTPPIKDFGGFNFSQILPDPSKPSKRSFIEDLLFNKVTLADAGFIKQYGDCLGDIAARDLICAQKFNGLTVLPPLLTDEMIAQYTSALLAGTITSGWTFGAGAALQIPFAMQMAYRFNGIGVTQNVLYENQKLIANQFNSAIGKIQDSLSFTASALGKLQDVVNQNAQALNTLVKQLSSNFGCISSVLNDILSRLDKVEAEVQIDCLITGRLQSLQTYVTQQLIRAAEIRASANLAATKMSECVLGQSKRVDFCGKGYHLMSFPQSAPHGVVFLHVTYVPAQEKNFTTAPAICHDGKAHFPREGVFVSNGTHWFVTQRNFYEPQIITTDNTFVSGNCDVVIGIVNNTVYDPLQPELDS

SEQ ID NO: 3443 - protein, 1147 aa, Artificial Sequence; identical to SEQ ID NO: 3423
  SARS-CoV-2/Australia/NSW10/2020__EPI_ISL_413596 spike protein (1-1147)(A972C_R995C)

SEQ ID NO: 3444 - protein, 1147 aa, Artificial Sequence
  SARS-CoV-2/Switzerland/1000477797/2020__EPI_ISL_413023 spike protein (1-1147)(A972C_R995C)
MFVFLVLLPLVSSQCVNLTTRTQLPPAYTNSFTRGVYYPDKVFRSSVLHSTQDLFLPFFSNVTWFHAIHVSGTNGTKRFDNPVLPFNDGVYFASTEKSNIIRGWIFGTTLDSKTQSLLIVNNATNVVIKVCEFQFCNDPFLGVYYHKNNKSWMESEFRVYSSANNCTFEYVSQPFLMDLEGKQGNFKNLREFVFKNIDGYFNIYSKHTPINLVRDLPQGFSALEPLVDLPIGINITRFQTLLALHRSYLTPGDSSSGWTAGAAAYYVGYLQPRTFLLKYNENGTITDAVDCALDPLSETKCTLKSFTVEKGIYQTSNFRVQPTESIVRFPNITNLCPFGEVFNATRFASVYAWNRKRISNCVADYSVLYNSASFSTFKCYGVSPTKLNDLCFTNVYADSFVIRGDEVRQIAPGQTGKIADYNYKLPDDFTGCVIAWNSNNLDSKVGGNYNYLYRLFRKSNLKPFERDISTEIYQAGSTPCNGVEGFNCYFPLQSYGFQPTNGVGYQPYRVVVLSFELLHAPATVCGPKKSTNLVKNKCVNFNFNGLTGTGVLTESNKKFLPFQQFGRDIADTTDAVRDPQTLEILDITPCSFGGVSVITPGTNTSNQVAVLYQGVNCTEVPVAIHADQLTPTWRVYSTGSNVFQTRAGCLIGAEHVNNSYECDIPIGAGICASYQTQTNSPRRARSVASQSIIAYTMSLGAENSVAYSNNSIAIPTNFTISVTTEILPVSMTKTSVDCTMYICGDSTECSNLLLQYGSFCTQLNRALTGIAVEQDKNTQEVFAQVKQIYKTPPIKDFGGFNFSQILPDPSKPSKRSFIEDLLFNKVTLADAGFIKQYGDCLGDIAARDLICAQKFNGLTVLPPLLTDEMIAQYTSALLAGTITSGWTFGAGAALQIPFAMQMAYRFNGIGVTQNVLYENQKLIANQFNSAIGKIQDSLSSTASALGKLQDVVNQNAQALNTLVKQLSSNFGCISSVLNDILSRLDKVEAEVQIDCLITGRLQSLQTYVTQQLIRAAEIRASANLAATKMSECVLGQSKRVDFCGKGYHLMSFPQSAPHGVVFLHVTYVPAQEKNFTTAPAICHDGKAHFPREGVFVSNGTHWFVTQRNFYEPQIITTDNTFVSGNCDVVIGIVNNTVYDPLQPELDS

SEQ ID NO: 3445 - protein, 1147 aa, Artificial Sequence
  SARS-CoV-2/Belgium/BA-02291/2020__EPI_ISL_415159 spike protein (1-1147)(A972C_R995C)
MFVFLVLLPLVSSQCVNLTTRTQLPPAYTNSFTRGVYYPDKVFRSSVLHSTQDLFLPFFSNVTWFHAIHVSGTNGTKRFDNPVLPFNDGVYFASTEKSNIIRGWIFGTTLDSKTQSLLIVNNATNVVIKVCEFQFCNDPFLGVYYHKNNKSWMESEFRVYSSANNCTFEYVSQPFLMDLEGKQGNFKNLREFVFKNIDGYFKIYSKHTPINLVRDLPQGFSALEPLVDLPIGINITRFQTLLALHRSYLTPGDSSSGWTAGAAAYYVGYLQPRTFLLKYNENGTITDAVDCALDPLSETKCTLKSFTVEKGIYQTSNFRVQPTESIVRFPNITNLCPFGEVFNATRFASVYAWNRKRISNCVADYSVLYNSASFSTFKCYGVSPTKLNDLCFTNVYADSFVIRGDEVRQIAPGQTGKIADYNYKLPDDFTGCVIAWNSNNLDSKVGGNYNYLYRLFRRSNLKPFERDISTEIYQAGSTPCNGVEGFNCYFPLQSYGFQPTNGVGYQPYRVVVLSFELLPAPATVCGPKKSTNLVKNKCVNFNFNGLTGTGVLTESNKKFLPFQQFGRDIADTTDAVRDPQTLEILDITPCSFGGVSVITPGTNTSNQVAVLYQGVNCTEVPVAIHADQLTPTWRVYSTGSNVFQTRAGCLIGAEHVNNSYECDIPIGAGICASYQTQTNSPRRARSVASQSIIAYTMSLGAENSVAYSNNSIAIPTNFTISVTTEILPVSMTKTSVDCTMYICGDSTECSNLLLQYGSFCTQLNRALTGIAVEQDKNTQEVFAQVKQIYKTPPIKDFGGFNFSQILPDPSKPSKRSFIEDLLFNKVTLADAGFIKQYGDCLGDIAARDLICAQKFNGLTVLPPLLTDEMIAQYTSALLAGTITSGWTFGAGAALQIPFAMQMAYRFNGIGVTQNVLYENQKLIANQFNSAIGKIQDSLSSAAPALGKLQDVVNQNAQALNTLVKQLSSNFGCISSVLNDILSRLDKVEAEVQIDCLITGRLQSLQTYVTQQLIRAAEIRASANLAATKMSECVLGQSKRVDFCGKGYHLMSFPQSAPHGVVFLHVTYVPAQEKNFTTAPAICHDGKAHFPREGVFVSNGTHWFVTQRNFYEPQIITTDNTFVSGNCDVVIGIVNNTVYDPLQPELDS

SEQ ID NO: 3446 - protein, 1147 aa, Artificial Sequence
  SARS-CoV-2/USA/WA8-UW5/2020__EPI_ISL_413486 spike protein (1-1147)(A972C_R995C)
MFVFLVLLPLVSSQCVNLTTRTQLPPAYTNSFTRGVYYPDKVFRSSVLHSTQDLFLPFFSNVTWFHAIHVSGTNGTKRFDNPVLPFNDGVYFASTEKSNIIRGWIFGTTLDSKTQSLLIVNNATNVVIKVCEFQFCNDPFLGVYYHKNNKSWMESEFRVYSSANNCTFEYVSQPFLMDLEGKQGNFKNLREFVFKNIDGYFKIYSKHTPINLVRDLPQGFSALEPLVDLPIGINITRFQTLLALHRSYLTPGDSSSGWTAGAAAYYVGYLQPRTFLLKYNENGTITDAVDCALDPLSETKCTLKSFTVEKGIYQTSNFRVQPTESIVRFPNITNLCPFGEVFNATRFASVYAWNRKRISNCVADYSVLYNSASFSTFKCYGVSPTKLNDLCFTNVYADSFVIRGDEVRQIAPGQTGKIADYNYKLPDDFTGCVIAWNSNNLDSKVGGNYNYLYRLFRKSNLKPFERDISTEIYQAGSTPCNGVEGFNCYFPLQSYGFQPTNGVGYQPYRVVVLSFELLHAPATVCGPKKSTNLVKNKCVNFNFNGLTGTGVLTESNKKFLPFQQFGRDIADTTDAVRDPQTLEILDITPCSFGGVSVITPGTNTSNQVAVLYQDVNCTEVPVAIHADQLTPTWRVYSTGSNVFQTRAGCLIGAEYVNNSYECDIPIGAGICASYQTQTNSPRRARSVASQSIIAYTMSLGAENSVAYSNNSIAIPTNFTISVTTEILPVSMTKTSVDCTMYICGDSTECSNLLLQYGSFCTQLNRALTGIAVEQDKNTQEVFAQVKQIYKTPPIKDFGGFNFSQILPDPSKPSKRSFIEDLLFNKVTLADAGFIKQYGDCLGDIAARDLICAQKFNGLTVLPPLLTDEMIAQYTSALLAGTITSGWTFGAGAALQIPFAMQMAYRFNGIGVTQNVLYENQKLIANQFNSAIGKIQDSLSSTASALGKLQDVVNQNAQALNTLVKQLSSNFGCISSVLNDILSRLDKVEAEVQIDCLITGRLQSLQTYVTQQLIRAAEIRASANLAATKMSECVLGQSKRVDFCGKGYHLMSFPQSAPHGVVFLHVTYVPAQEKNFTTAPAICHDGKAHFPREGVFVSNGTHWFVTQRNFYEPQIITTDNTFVSGNCDVVIGIVNNTVYDPLQPELDS

SEQ ID NO: 3447 - protein, 1147 aa, Artificial Sequence
  SARS-CoV-2/England/20102000506/2020__EPI_ISL_415147 spike protein (1-1147)(A972C_R995C)
MFVFLVLLPLVSSQCVNLTTRTQLPPAYTNSFTRGVYYPDKVFRSSVLHSTQDLFLPFFSNVTWFHAIHVSGTNGTKRFDNPVLPFNDGVYFASTEKSNIIRGWIFGTTLDSKTQSLLIVNNATNVVIKVCEFQFCNDPFLGVYYHKNNKSWMESEFRVYSSANNCTFEYVSQPFLMDLEGKQGNFKNLREFVFKNIDGYFKIYSKHTPINLVRDLPQGFSALEPLVDLPIGINITRFQTLLALHRSYLTPGDSSSGWTAGAAAYYVGYLQPRTFLLKYNENGTITDAVDCALDPLSETKCTLKSFTVEKGIYQTSNFRVQPTESIVRFPNITNLCPFGEVFNATRFASVYAWNRKRISNCVADYSVLYNSASFSTFKCYGVSPTKLNDLCFTNVYADSFVIRGDEVRQIAPGQTGKIADYNYKLPDDFTGCVIAWNSNNLDSKVGGNYNYLYRLFRKSNLKPFERDISTEIYQAGSTPCNGVEGFNCYFPLQSYGFQPTNGVGYQPYRVVVLSFELLHAPATVCGPKKSTNLVKNKCVNFNFNGLTGTGVLTESNKKFLPFQQFGRDIADTTDAVRDPQTLEILDITPCSFGGVSVITPGTNTSNQVAVLYQGVNCTEVPVAIHADQLTPTWRVYSTGSNVFQTRAGCLIGAEHVNNSYECDIPIGAGICASYQTQTNSPRRARSVASQSIIAYTMSLGAENSVAYSNNSIAIPTNFTISVTTEILPVSMTKTSVDCTMYICGDSTECSNLLLQYGSFCTQLNRALTGIAVEQDKNTQEVFAQVKQIYKTPPIKDFGGFNFSQILPDPSKPSKRSFIEDLLFNKVTLADAGFIKQYGYCLGDIAARDLICAQKFNGLTVLPPLLTDEMIAQYTSALLAGTITSGWTFGAGAALQIPFAMQMAYRFNGIGVTQNVLYENQKLIANQFNSAIGKIQDSLSSTASALGKLQDVVNQNAQALNTLVKQLSSNFGCISSVLNDILSRLDKVEAEVQIDCLITGRLQSLQTYVTQQLIRAAEIRASANLAATKMSECVLGQSKRVDFCGKGYHLMSFPQSAPHGVVFLHVTYVPAQEKNFTTAPAICHDGKAHFPREGVFVSNGTHWFVTQRNFYEPQIITTDNTFVSGNCDVVIGIVNNTVYDPLQPELDS

SEQ ID NO: 3448 - protein, 1147 aa, Artificial Sequence
  SARS-CoV-2/Belgium/VAG-03013/2020__EPI_ISL_415155 spike protein (1-1147)(A972C_R995C)
MFVFLVLLPLVSSQCVNLTTRTQLPPAYTNSFTRGVYYPDKVFRSSVLHSTQDLFLPFFSNVTWFHAIHVSGTNGTKRFDNPVLPFNDGVYFASTEKSNIIRGWIFGTTLDSKTQSLLIVNNATNVVIKVCEFQFCNDPFLGVYYHKNNKSWMESEFRVYSSANNCTFEYVSQPFLMDLEGKQGNFKNLREFVFKNIDGYFKIYSKHTPINLVRDLPQGFSALEPLVDLPIGINITRFQTLLALHRSYLTPGDSSSGWTAGAAAYYVGYLQPRTFLLKYNENGTITDAVDCALDPLSETKCTLKSFTVEKGIYQTSNFRVQPTESIVRFPNITNLCPFGEVFNATRFASVYAWNRKRISNCVADYSVLYNSASFSTFKCYGVSPTKLNDLCFTNVYADSFVIRGDEVRQIAPGQTGKIADYNYKLPDDFTGCVIAWNSNNLDSKVGGNYNYLYRLFRKSNLKPFERDISTEIYQAGSTPCNGVEGFNCYFPLQSYGFQPTNGVGYQPYRVVVLSFELLHAPATVCGPKKSTNLVKNKCVNFNFNGLTGTGVLTESNKKFLPFQQFGRDIADTTDAVRDPQTLEILDITPCSFGGVSVITPGTNTSNQVAVLYQGVNCTEVPVAIHADQLTPTWRVYSTGSNVFQTRAGCLIGAEHVNNSYECDIPIGAGICASYQTQTNSPRRARSVASQSIIAYTMSLGAENSVAYSNNSIAIPTNFTISVTTEILPVSMTKTSVDCTMYICGDSTECSNLLLQYGSFCTQLNRALTGIAVEQDKNTQEVFAQVKQIYKTPPIKDFGGFNFSQILPDPSKPSKRSFIEDLLFNKVTLADAGFIKQYGDCLGDIAARDLICAQKFNGLTVLPPLLTDEMIAQYTSALLAGTITSGWTFGAGAALQIPFAMQMAYRFNGIGVTQNVLYENQKLIANQFNSAIGKIQDSLSSTATALGKLQDVVNQNAQALNTLVKQLSSNFGCISSVLNDILSRLDKVEAEVQIDCLITGRLQSLQTYVTQQLIRAAEIRASANLAATKMSECVLGQSKRVDFCGKGYHLMSFPQSAPHGVVFLHVTYVPAQEKNFTTAPAICHDGKAHFPREGVFVSNGTHWFVTQRNFYEPQIITTDNTFVSGNCDVVIGIVNNTVYDPLQPELDS

SEQ ID NO: 3449 - protein, 1147 aa, Artificial Sequence
  SARS-CoV-2/Belgium/BC-03016/2020__EPI_ISL_415157 spike protein (1-1147)(A972C_R995C)
MFVFLVLLPLVSSQCVNLTTRTQLPPAYTNSFTRGVYYPDKVFRSSVLHSTQDLFLPFFSNVTWFHAIHVSGTNGTKRFDNPVLPFNDGVYFASTEKSNIIRGWIFGTTLDSKTQSLLIVNNATNVVIKVCEFQFCNDPFLGVYYHKNNKSWMESEFRVYSSANNCTFEYVSQPFLMDLEGKQGNFKNLREFVFKNIDGYFKIYSKHTPINLVRDLPQGFSALEPLVDLPIGINITRFQTLLALHRSYLTPGDSSSGWTAGAAAYYVGYLQPRTFLLKYNENGTITDAVDCALDPLSETKCTLKSFTVEKGIYQTSNFRVQPTESIVRFPNITNLCPFGEVFNATRFASVYAWNRKRISNCVADYSVLYNSASFSTFKCYGVSPTKLNDLCFTNVYADSFVIRGDEVRQIAPGQTGKIADYNYKLPDDFTGCVIAWNSNNLDSKVGGNYNYLYRLFRKSNLKPFERDISTEIYQAGSTPCNGVEGFNCYFPLQSYGFQPTNGVGYQPYRVVVLSFELLHAPATVCGPKKSTNLVKNKCVNFNFNGLTGTGVLTESNKKFLPFQQFGRDIADTTDAVRDPQTLEILDITPCSFGGVSVITPGTNTSNQVAVLYQGVNCTEVPVAIHADQLTPTWRVYSTGSNVFQTRAGCLIGAEHVNNSYECDIPIGAGICASYQTQTNSPRRARSVASQSIIAYTMSLGAENSVAYSNNSIAIPTNFTISVTTEILPVSMTKTSVDCTMYICGDSTECSNLLLQYGSFCTQLNRALTGIAVEQDKNTQEVFAQVKQIYKTPPIKDFGGFNFSQILPDPSKPSKRSFIEDLLFNKVTLADAGFIKQYGDCLGDIAARDLICAQKFNGLTVLPPLLTDEMIAQYTSALLAGTITSGWTFGAGAALQIPFAMQMAYRFNGIGVTQNVLYENQKLIANQFNSAIGKIQDSLSSTAPALGKLQDVVNQNAQALNTLVKQLSSNFGCISSVLNDILSRLDKVEAEVQIDCLITGRLQSLQTYVTQQLIRAAEIRASANLAATKMSECVLGQSKRVDFCGKGYHLMSFPQSAPHGVVFLHVTYVPAQEKNFTTAPAICHDGKAHFPREGVFVSNGTHWFVTQRNFYEPQIITTDNTFVSGNCDVVIGIVNNTVYDPLQPELDS

SEQ ID NO: 3450 - protein, 1147 aa, Artificial Sequence
  SARS-CoV-2/Germany/BavPat3/2020__EPI_ISL_414521 spike protein (1-1147)(A972C_R995C)
MFVFLVLLPLVSSQCVNLTTRTQLPPAYTNSFTRGVYYPDKVFRSSVLHSTQDLFLPFFSNVTWFHAIHVSGTNGTKRFDNPVLPFNDGVYFASTEKSNIIRGWIFGTTLDSKTQSLLIVNNATNVVIKVCEFQFCNDPFLGVYYHKNNKSWMESEFRVYSSANNCTFEYVSQPFLMDLEGKQGNFKNLREFVFKNIDGYFKIYSKHTPINLVRDLPQGFSALEPLVDLPIGINITRFQTLLALHRSYLTPGDSSSGWTAGAAAYYVGYLQPRTFLLKYNENGTITDAVDCALDPLSETKCTLKSFTVEKGIYQTSNFRVQPTESIVRFPNITNLCPFGEVFNATRFASVYAWNRKRISNCVADYSVLYNSASFSTFKCYGVSPTKLNDLCFTNVYADSFVIRGDEVRQIAPGQTGKIADYNYKLPDDFTGCVIAWNSNNLDSKVGGNYNYLYRLFRKSNLKPFERDISTEIYQAGSTPCNGVEGFNCYFPLQSYGFQPTNGVGYQPYRVVVLSFELLHAPATVCGPKKSTNLVKNKCVNFNFNGLTGTGVLTESNKKFLPFQQFGRDIADTTDAVRDPQTLEILDITPCSFGGVSVITPGTNTSNQVAVLYQDVNCTEVPVAIHADQLTPTWRVYSTGSNVFQTRAGCLIGAEHVNNSYECDIPIGAGICASYQTQTNSPRRARSVASQSIIAYTMSLGAENSVAYSNNSIAIPTNFTISVTTEILPVSMTKTSVDCTMYICGDSTECSNLLLQYGSFCTQLNRALTGIAVEQDKNTQQVFAQVKQIYKTPPIKDFGGFNFSQILPDPSKPSKRSFIEDLLFNKVTLADAGFIKQYGDCLGDIAARDLICAQKFNGLTVLPPLLTDEMIAQYTSALLAGTITSGWTFGAGAALQIPFAMQMAYRFNGIGVTQNVLYENQKLIANQFNSAIGKIQDSLSSTASALGKLQDVVNQNAQALNTLVKQLSSNFGCISSVLNDILSRLDKVEAEVQIDCLITGRLQSLQTYVTQQLIRAAEIRASANLAATKMSECVLGQSKRVDFCGKGYHLMSFPQSAPHGVVFLHVTYVPAQEKNFTTAPAICHDGKAHFPREGVFVSNGTHWFVTQRNFYEPQIITTDNTFVSGNCDVVIGIVNNTVYDPLQPELDS

SEQ ID NO: 3451 - protein, 1147 aa, Artificial Sequence
  SARS-CoV-2/France/HF1805/2020__EPI_ISL_414628 spike protein (1-1147)(A972C_R995C)
MFVFLVLLPLVSSQCVNLTTRTQLPPAYTNSFTRGVYYPDKVFRSSVLHSTQDLFLPFFSNVTWFHAIHVSGTNGTKRFDNPVLPFNDGVYFASTEKSNIIRGWIFGTTLDSKTQSLLIVNNATNVVIKVCEFQFCNDPFLGVYYHKNNKSWMESEFRVYSSANNCTFEYVSQPFLMDLEGKQGNFKNLREFVFKNIDGYFKIYSKHTPINLVRDLPQGFSALEPLVDLPIGINITRFQTLLALHRSYLTPGDSSSGWTAGAAAYYVGYLQPRTFLLKYNENGTITDAVDCALDPLSETKCTLKSFTVEKGIYQTSNFRVQPTESIVRFPNITNLCPFGEVFNATRFASVYAWNRKRISNCVADYSVLYNSASFSTFKCYGVSPTKLNDLCFTNVYADSFVIRGDEVRQIAPGQTGKIADYNYKLPDDFTGCVIAWNSNNLDSKVGGNYNYLYRLFRKSNLKPFERDISTEIYQAGSTPCNGVEGFNCYFPLQSYGFQPTNGVGYQPYRVVVLSFELLHAPATVCGPKKSTNLVKNKCVNFNFNGLTGTGVLTESNKKFLPFQQFGRDIADTTDAVRDPQTLEILDITPCSFGGVSVITPGTNTSNQVAVLYQGVNCTEVPVAIHADQLTPTWRVYSTGSNVFQTRAGCLIGAEHVNNSYECDIPIGAGICASYQTQTNSPRRARSVASQSIIAYTMSLGAENSVAYSNNSIAIPTNFTISVTTEILPVSMTKTSVDCTMYICGDSTECSNLLLQYGSFCTQLNRALTGIAVEQDKNTQEVFAQVKQIYKTPPIKDFGGFNFSQILPDPSKPSKRSFIEDLLFNKVTLADAGFIKQYGDCLGDIAARDLICAQKFNGLTVLPPLLTDEMIAQYTSALLAGTITSGWTFGAGAALQIPFAMQMAYRFNGIGVTQNVLYENQKLIANQFNSAIGKIQDSLSSTASALGKLQDVVNQNAQALNTLVKQLSSNFGCISSVLNDILSRLDKVEAEVQIDCLITGRLQSLQTYVTQQLIRAAEIRASANLAATKMSECVLGQSKRVDFCGKGYHLMSFPQSAPHGVVFLHVTYVPAQEKNFTTAPAICHDGKAHFPREGVFVSNGTHWFVTQRNFYEPQIITTDNTFVSGNCDVVIGVVNNTVYDPLQPELDS

SEQ ID NO: 3452 - protein, 1147 aa, Artificial Sequence
  SARS-CoV-2/Netherlands/ZuidHolland_9/2020__EPI_ISL_414445 spike protein (1-1147)(A972C_R995C)
MFVFLVLLPLVSSQCVNLTTRTQLPPAYTNSFTRGVYYPDKVFRSSVLHSTQDLFLPFFSNVTWFHAIHVSGTNGTKRFDNPVLPFNDGVYFASTEKSNIIRGWIFGTTLDSKTQSLLIVNNATNVVIKVCEFQFCNDPFLGVYYHKNNKSWMESEFRVYSSANNCTFEYVSQPFLMDLEGKQGNFKNLREFVFKNIDGYFKIYSKHTPINLVRDLPQGFSALEPLVDLPIGINITRFQTLLALHRSYLTPGDSSSGWTAGAAAYYVGYLQPRTFLLKYNENGTITDAVDCALDPLSETKCTLKSFTVEKGIYQTSNFRVQPTESIVRFPNITNLCPFGEVFNATRFASVYAWNRKRISNCVADYSVLYNSASFSTFKCYGVSPTKLNDLCFTNVYADSFVIRGDEVRQIAPGQTGKIADYNYKLPDDFTGCVIAWNSNNLDSKVGGNYNYLYRLFRKSNLKPFERDISTEIYQAGSTPCNGVEGFNCYFPLQSYGFQPTNGVGYQPYRVVVLSFELLHAPATVCGPKKSTNLVKNKCVNFNFNGLTGTGVLTESNKKFLPFQQFGRDIADTTDAVRDPQTLEILDITPCSFGGVSVITPGTNTSNQVAVLYQGVNCTEVPVAIHADQLTPTWRVYSTGSNVFQTRAGCLIGAEHVNNSYECDIPIGAGICASYQTQTNSPRRARSVASQSIIAYTMSLGAENSVAYSNNSIAIPTNFTISVTTEILPVSMTKTSVDCTMYICGDSTECSNLLLQYGSFCTQLNRALTGIAVEQDKNTQEVFAQVKQIYKTPPIKDFGGFNFSQILPDPSKPSKRSFIEDLLFNKVTLADAGFIKQYGDCLGDIAARDLICVQKFNGLTVLPPLLTDEMIAQYTSALLAGTITSGWTFGAGAALQIPFAMQMAYRFNGIGVTQNVLYENQKLIANQFNSAIGKIQDSLSSTASALGKLQDVVNQNAQALNTLVKQLSSNFGCISSVLNDILSRLDKVEAEVQIDCLITGRLQSLQTYVTQQLIRAAEIRASANLAATKMSECVLGQSKRVDFCGKGYHLMSFPQSAPHGVVFLHVTYVPAQEKNFTTAPAICHDGKAHFPREGVFVSNGTHWFVTQRNFYEPQIITTDNTFVSGNCDVVIGIVNNTVYDPLQPELDS

SEQ ID NO: 3453 - protein, 1147 aa, Artificial Sequence
  SARS-CoV-2/Finland/FIN03032020A/2020__EPI_ISL_413602 spike protein (1-1147)(A972C_R995C)
MFVFLVLLPLVSSQCVNLTTRTQLPPAYTNSFTRGVYYPDKVFRSSVLHSTQDLFLPFFSNVTWFHAIHVSGTNGTKRFDNPVLPFNDGVYFASTEKSNIIRGWIFGTTLDSKTQSLLIVNNATNVVIKVCEFQFCNDPFLGVYYHKNNKSWMESEFRVYSSANNCTFEYVSQPFLMDLEGKQGNFKNLREFVFKNIDGYFKIYSKHTPINLVRDLPQGFSALEPLVDLPIGINITRFQTLLALHRSYLTPGDSSSGWTAGAAAYYVGYLQPRTFLLKYNENGTITDAVDCALDPLSETKCTLKSFTVEKGIYQTSNFRVQPTESIVRFPNITNLCPFGEVFNATRFASVYAWNRKRISNCVADYSVLYNSASFSTFKCYGVSPTKLNDLCFTNVYADSFVIRGDEVRQIAPGQTGKIADYNYKLPDDFTGCVISWNSNNLDSKVGGNYNYLYRLFRKSNLKPFERDISTEIYQAGSTPCNGVEGFNCYFPLQSYGFQPTNGVGYQPYRVVVLSFELLHAPATVCGPKKSTNLVKNKCVNFNFNGLTGTGVLTESNKKFLPFQQFGRDIADTTDAVRDPQTLEILDITPCSFGGVSVITPGTNTSNQVAVLYQGVNCTEVPVAIHADQLTPTWRVYSTGSNVFQTRAGCLIGAEHVNNSYECDIPIGAGICASYQTQTNSPRRARSVASQSIIAYTMSLGAENSVAYSNNSIAIPTNFTISVTTEILPVSMTKTSVDCTMYICGDSTECSNLLLQYGSFCTQLNRALTGIAVEQDKNTQEVFAQVKQIYKTPPIKDFGGFNFSQILPDPSKPSKRSFIEDLLFNKVTLADAGFIKQYGDCLGDIAARDLICAQKFNGLTVLPPLLTDEMIAQYTSALLAGTITSGWTFGAGAALQIPFAMQMAYRFNGIGVTQNVLYENQKLIANQFNSAIGKIQDSLSSTASALGKLQDVVNQNAQALNTLVKQLSSNFGCISSVLNDILSRLDKVEAEVQIDCLITGRLQSLQTYVTQQLIRAAEIRASANLAATKMSECVLGQSKRVDFCGKGYHLMSFPQSAPHGVVFLHVTYVPAQEKNFTTAPAICHDGKAHFPREGVFVSNGTHWFVTQRNFYEPQIITTDNTFVSGNCDVVIGIVNNTVYDPLQPELDS

SEQ ID NO: 3454 - protein, 1147 aa, Artificial Sequence
  SARS-CoV-2/France/GE1977/2020__EPI_ISL_414632 spike protein (1-1147)(A972C_R995C)
MFVFLVLLPLVSSQCVNLTTRTQLPPAYTNSFTRGVYYPDKVFRSSVLHSTQDLFLPFFSNVTWFHAIHVSGTNGTKRFDNPVLPFNDGVYFASTEKSNIIRGWIFGTTLDSKTQSLLIVNNATNVVIKVCEFQFCNDPFLGVYYHKNNKSWMESEFRVYSSANNCTFEYVSQPFLMDLEGKQGNFKNLREFVFKNIDGYFKIYSKHTPINLVRDLPQGFSALEPLVDLPIGINITRFQTLLALHRSYLTPGDSSSGWTAGAAAYYVGYLQPRTFLLKYNENGTITDAVDCALDPLSETKCTLKSFTVEKGIYQTSNFRVQPTESIVRFPNITNLCPFGEVFNATRFASVYAWNRKRISNCVADYSVLYNSASFSTFKCYGVSPTKLNDLCFTNVYADSFVIRGDEVRQIAPGQTGKIADYNYKLPDDFTGCVIAWNSNNLDSKVGGNYNYLYRLFRKSNLKPFERDISTEIYQAGSTPCNGVEGFNCYFPLQSYGFQPTNGVGYQPYRVVVLSFELLHAPATVCGPKKSTNLVKNKCVNFNFNGLTGTGVLTESNKKFLPFQQFGRDIADTTDAVRDPQTLEILDITPCSFGGVSVITPGTNTSNQVAVLYQGVNCTEVPVAIHADQLTPTWRVYSTGSNVFQTRAGCLIGAEHVNNSYECDIPIGAGICASYQTQTNSPRRARSVASQSIIAYTMSLGAENSVAYSNNSIAIPTNFTISVTTEILPVSMTKTSVDCTMYICGDSTECSNLLLQYGSFCTQLNRALTGIAVEQDKNTQEVFAQVKQIYKTPPIKDFGGFNFSQILPDPSKPSKRSFIEDLLFNKVTLADAGFIKQYGDCLGDIAARDLICAQKFNGLTVLPPLLTDEMIAQYTSALLAGTITSGWTFGAGAALQIPFAMQMAYRFNGIGVTQNVLYENQKLIANQFNSAIGKIQDSLFSTASALGKLQDVVNQNAQALNTLVKQLSSNFGCISSVLNDILSRLDKVEAEVQIDCLITGRLQSLQTYVTQQLIRAAEIRASANLAATKMSECVLGQSKRVDFCGKGYHLMSFPQSAPHGVVFLHVTYVPAQEKNFTTAPAICHDGKAHFPREGVFVSNGTHWFVTQRNFYEPQIITTDNTFVSGNCDVVIGIVNNTVYDPLQPELDS

SEQ ID NO: 3455 - protein, 1147 aa, Artificial Sequence
  SARS-CoV-2/Finland/FIN-313/2020__EPI_ISL_414641 spike protein (1-1147)(A972C_R995C)
MFVFLVLLPLVSSQCVNLTTRTQLPPAYTNSFTRGVYYPDKVFRSSVLHSTQDLFLPFFSNVTWFHAIHVSGTNGTKRFDNPVLPFNDGVYFASTEKSNIIRGWIFGTTLDSKTQSLLIVNNATNVVIKVCEFQFCNDPFLGVYYHKNNKSWMESEFRVYSSANNCTFEYVSQPFLMDLEGKQGNFKNLREFVFKNIDGYFKIYSKHTPINLVRDLPQGFSALEPLVDLPIGINITRFKTLLALHRSYLTPGDSSSGWTAGAAAYYVGYLQPRTFLLKYNENGTITDAVDCALDPLSETKCTLKSFTVEKGIYQTSNFRVQPTESIVRFPNITNLCPFGEVFNATRFASVYAWNRKRISNCVADYSVLYNSASFSTFKCYGVSPTKLNDLCFTNVYADSFVIRGDEVRQIAPGQTGKIADYNYKLPDDFTGCVIAWNSNNLDSKVGGNYNYLYRLFRKSNLKPFERDISTEIYQAGSTPCNGVEGFNCYFPLQSYGFQPTNGVGYQPYRVVVLSFELLHAPATVCGPKKSTNLVKNKCVNFNFNGLTGTGVLTESNKKFLPFQQFGRDIADTTDAVRDPQTLEILDITPCSFGGVSVITPGTNTSNQVAVLYQGVNCTEVPVAIHADQLTPTWRVYSTGSNVFQTRAGCLIGAEHVNNSYECDIPIGAGICASYQTQTNSPRRARSVASQSIIAYTMSLGAENSVAYSNNSIAIPTNFTISVTTEILPVSMTKTSVDCTMYICGDSTECSNLLLQYGSFCTQLNRALTGIAVEQDKNTQEVFAQVKQIYKTPPIKDFGGFNFSQILPDPSKPSKRSFIEDLLFNKVTLADAGFIKQYGDCLGDIAARDLICAQKFNGLTVLPPLLTDEMIAQYTSALLAGTITSGWTFGAGAALQIPFAMQMAYRFNGIGVTQNVLYENQKLIANQFNSAIGKIQDSLSSTASALGKLQDVVNQNAQALNTLVKQLSSNFGCISSVLNDILSRLDKVEAEVQIDCLITGRLQSLQTYVTQQLIRAAEIRASANLAATKMSECVLGQSKRVDFCGKGYHLMSFPQSAPHGVVFLHVTYVPAQEKNFTTAPAICHDGKAHFPREGVFVSNGTHWFVTQRNFYEPQIITTDNTFVSGNCDVVIGIVNNTVYDPLQPELDS

SEQ ID NO: 3456 - protein, 1147 aa, Artificial Sequence
  SARS-CoV-2/Netherlands/ZuidHolland_2/2020__EPI_ISL_414556 spike protein (1-1147)(A972C_R995C)
MFVFLVLLPLVSSQCVNLTTRTQLPPAYTNSFTRGVYYPDKVFRSSVLHSTQDLFLPFFSNVTWFHAIHVSGTNGTKRFDNPVLPFNDGVYFASTEKSNIIRGWIFGTTLDSKTQSLLIVNNATNVVIKVCEFQFCNDPFLGVYYHKNNKSWMESEFRVYSSANNCTFEYVSQPFLMDLEGKQGNFKNLREFVFKNIDGYFKIYSKHTPINLVRDLPQGFSALEPLVDLPIGINITRFQTLLALHRSYLTPGDSSSGWTAGAAAYYVGYLQPRTFLLKYNENGTITDAVDCALDPLSETKCTLKSFTVEKGIYQTSNFRVQPTESIVRFPNITNLCPFGEVFNATRFASVYAWNRKRISNCVADYSVLYNSASFSTFKCYGVSPTKLNDLCFTNVYADSFVIRGDEVRQIAPGQTGKIADYNYKLPDDFTGCVIAWNSNNLDSKVGGNYNYLYRLFRKSNLKPFERDISTEIYQAGSTPCNGVEGFNCYFPLQSYGFQPTNGVGYQPYRVVVLSFELLHAPATVCGPKKSTNLVKNKCVNFNFNGLTGTGVLTESNKKFLPFQQFGRDIADTTDAVRDPQTLEILDITPCSFGGVSVITPGTNTSNQVAVLYQGVNCTEVPVAIHADQLTPTWRVYSTGSNVFQTRAGCLIGAEHVNNSYECDIPIGAGICASYQTQTNSPRRARSVASQSIIAYTMSLGAENSVAYSNNSIAIPTNFTISVTTEILPVSMTKTSVDCTMYICGDSTECSNLLLQYGSFCTQLNRALTGIALEQDKNTQEVFAQVKQIYKTPPIKDFGGFNFSQILPDPSKPSKRSFIEDLLFNKVTLADAGFIKQYGDCLGDIAARDLICAQKFNGLTVLPPLLTDEMIAQYTSALLAGTITSGWTFGAGAALQIPFAMQMAYRFNGIGVTQNVLYENQKLIANQFNSAIGKIQDSLSSTASALGKLQDVVNQNAQALNTLVKQLSSNFGCISSVLNDILSRLDKVEAEVQIDCLITGRLQSLQTYVTQQLIRAAEIRASANLAATKMSECVLGQSKRVDFCGKGYHLMSFPQSAPHGVVFLHVTYVPAQEKNFTTAPAICHDGKAHFPREGVFVSNGTHWFVTQRNFYEPQIITTDNTFVSGNCDVVIGIVNNTVYDPLQPELDS

SEQ ID NO: 3457 - protein, 1147 aa, Artificial Sequence
  SARS-CoV-2/USA/WA-UW31/2020__EPI_ISL_414618 spike protein (1-1147)(A972C_R995C)
MFVFLVLLPLVSSQCVNLTTRTQLPPAYTNSFTRGVYYPDKVFRSSVLHSTQDLFLPFFSNVTWFHAIHVSGTNGTKRFDNPVLPFNDGVYFASTEKSNIIRGWIFGTTLDSKTQSLLIVNNATNVVIKVCEFQFCNDPFLGVYYHKNNKSWMESEFRVYSSANNCTFEYVSQPFLMDLEGKQGNFKNLREFVFKNIDGYFKIYSKHTPINLVRDLPQGFSALEPLVDLPIGINITRFQTLLALHRSYLTPGDSSSGWTAGAAAYYVGYLQPRTFLLKYNENGTITDAVDCALDPLSETKCTLKSFTVEKGIYQTSNFRVQPTESIVRFPNITNLCPFGEVFNATRFASVYAWNRKRISNCVADYSVLYNSASFSTFKCYGVSPTKLNDLCFTNVYADSFVIRGDEVRQIAPGQTGKIADYNYKLPDDFTGCVIAWNSNNLDSKVGGNYNYLYRLFRKSNLKPFERDISTEIYQAGSTPCNGAEGFNCYFPLQSYGFQPTNGVGYQPYRVVVLSFELLHAPATVCGPKKSTNLVKNKCVNFNFNGLTGTGVLTESNKKFLPFQQFGRDIADTTDAVRDPQTLEILDITPCSFGGVSVITPGTNTSNQVAVLYQDVNCTEVPVAIHADQLTPTWRVYSTGSNVFQTRAGCLIGAEHVNNSYECDIPIGAGICASYQTQTNSPRRARSVASQSIIAYTMSLGAENSVAYSNNSIAIPTNFTISVTTEILPVSMTKTSVDCTMYICGDSTECSNLLLQYGSFCTQLNRALTGIAVEQDKNTQEVFAQVKQIYKTPPIKDFGGFNFSQILPDPSKPSKRSFIEDLLFNKVTLADAGFIKQYGDCLGDIAARDLICAQKFNGLTVLPPLLTDEMIAQYTSALLAGTITSGWTFGAGAALQIPFAMQMAYRFNGIGVTQNVLYENQKLIANQFNSAIGKIQDSLSSTASALGKLQDVVNQNAQALNTLVKQLSSNFGCISSVLNDILSRLDKVEAEVQIDCLITGRLQSLQTYVTQQLIRAAEIRASANLAATKMSECVLGQSKRVDFCGKGYHLMSFPQSAPHGVVFLHVTYVPAQEKNFTTAPAICHDGKAHFPREGVFVSNGTHWFVTQRNFYEPQIITTDNTFVSGNCDVVIGIVNNTVYDPLQPELDS

SEQ ID NO: 3458 - protein, 1147 aa, Artificial Sequence
  SARS-CoV-2/South Korea/SNU01/2020__EPI_ISL_411929 spike protein (1-1147)(A972C_R995C)
MFVFLVLLPLVSSQCVNLTTRTQLPPAYTNSFTRGVYYPDKVFRSSVLHSTQDLFLPFFSNVTWFHAIHVSGTNGTKRFDNPVLPFNDGVYFASTEKSNIIRGWIFGTTLDSKTQSLLIVNNATNVVIKVCEFQFCNDPFLGVYYHKNNKSWMESEFRVYSSANNCTFEYVSQPFLMDLEGKQGNFKNLREFVFKNIDGYFKIYSKHTPINLVRDLPQGFWALEPLVDLPIGINITRFQTLLALHRSYLTPGDSSSGWTAGAAAYYVGYLQPRTFLLKYNENGTITDAVDCALDPLSETKCTLKSFTVEKGIYQTSNFRVQPTESIVRFPNITNLCPFGEVFNATRFASVYAWNRKRISNCVADYSVLYNSASFSTFKCYGVSPTKLNDLCFTNVYADSFVIRGDEVRQIAPGQTGKIADYNYKLPDDFTGCVIAWNSNNLDSKVGGNYNYLYRLFRKSNLKPFERDISTEIYQAGSTPCNGVEGFNCYFPLQSYGFQPTNGVGYQPYRVVVLSFELLHAPATVCGPKKSTNLVKNKCVNFNFNGLTGTGVLTESNKKFLPFQQFGRDIADTTDAVRDPQTLEILDITPCSFGGVSVITPGTNTSNQVAVLYQDVNCTEVPVAIHADQLTPTWRVYSTGSNVFQTRAGCLIGAEHVNNSYECDIPIGAGICASYQTQTNSPRRARSVASQSIIAYTMSLGAENSVAYSNNSIAIPTNFTISVTTEILPVSMTKTSVDCTMYICGDSTECSNLLLQYGSFCTQLNRALTGIAVEQDKNTQEVFAQVKQIYKTPPIKDFGGFNFSQILPDPSKPSKRSFIEDLLFNKVTLADAGFIKQYGDCLGDIAARDLICAQKFNGLTVLPPLLTDEMIAQYTSALLAGTITSGWTFGAGAALQIPFAMQMAYRFNGIGVTQNVLYENQKLIANQFNSAIGKIQDSLSSTASALGKLQDVVNQNAQALNTLVKQLSSNFGCISSVLNDILSRLDKVEAEVQIDCLITGRLQSLQTYVTQQLIRAAEIRASANLAATKMSECVLGQSKRVDFCGKGYHLMSFPQSAPHGVVFLHVTYVPAQEKNFTTAPAICHDGKAHFPREGVFVSNGTHWFVTQRNFYEPQIITTDNTFVSGNCDVVIGIVNNTVYDPLQPELDS

SEQ ID NO: 3459 - protein, 1147 aa, Artificial Sequence
  SARS-CoV-2/China/WF0004/2020__EPI_ISL_413694 spike protein (1-1147)(A972C_R995C)
MFVFLVLLPLVSSQCVNLTTRTQLPPAYTNSFTRGVYYPDKVFRSSVLHSTQDLFLPFFSNVTWFHAIHVSGTNGTKRFDNPVLPFNDGVYFASTEKSNIIRGWIFGTTLDSKTQSLLIVNNATNVVIKVCEFQFCNDPFLGVYYHKNNKSWTESEFRVYSSANNCTFEYVSQPFLMDLEGKQGNFKNLREFVFKNIDGYFKIYSKHTPINLVRDLPQGFSALEPLVDLPIGINITRFQTLLALHRSYLTPGDSSSGWTAGAAAYYVGYLQPRTFLLKYNENGTITDAVDCALDPLSETKCTLKSFTVEKGIYQTSNFRVQPTESIVRFPNITNLCPFGEVFNATRFASVYAWNRKRISNCVADYSVLYNSASFSTFKCYGVSPTKLNDLCFTNVYADSFVIRGDEVRQIAPGQTGKIADYNYKLPDDFTGCVIAWNSNNLDSKVGGNYNYLYRLFRKSNLKPFERDISTEIYQAGSTPCNGVEGFNCYFPLQSYGFQPTNGVGYQPYRVVVLSFELLHAPATVCGPKKSTNLVKNKCVNFNFNGLTGTGVLTESNKKFLPFQQFGRDIADTTDAVRDPQTLEILDITPCSFGGVSVITPGTNTSNQVAVLYQDVNCTEVPVAIHADQLTPTWRVYSTGSNVFQTRAGCLIGAEHVNNSYECDIPIGAGICASYQTQTNSPRRARSVASQSIIAYTMSLGAENSVAYSNNSIAIPTNFTISVTTEILPVSMTKTSVDCTMYICGDSTECSNLLLQYGSFCTQLNRALTGIAVEQDKNTQEVFAQVKQIYKTPPIKDFGGFNFSQILPDPSKPSKRSFIEDLLFNKVTLADAGFIKQYGDCLGDIAARDLICAQKFNGLTVLPPLLTDEMIAQYTSALLAGTITSGWTFGAGAALQIPFAMQMAYRFNGIGVTQNVLYENQKLIANQFNSAIGKIQDSLSSTASALGKLQDVVNQNAQALNTLVKQLSSNFGCISSVLNDILSRLDKVEAEVQIDCLITGRLQSLQTYVTQQLIRAAEIRASANLAATKMSECVLGQSKRFDFCGKGYHLMSFPQSAPHGVVFLHVTYVPAQEKNFTTAPAICHDGKAHFPREGVFVSNGTHWFVTQRNFYEPQIITTDNTFVSGNCDVVIGIVNNTVYDPLQPELDS

SEQ ID NO: 3460 - protein, 1147 aa, Artificial Sequence
  SARS-CoV-2/China/WF0028/2020__EPI_ISL_413791 spike protein (1-1147)(A972C_R995C)
MFVFLVLLPLVSSQCVNLTTRTQLPPAYTNSFTRGVYYPDKVFRSSVLHSTQDLFLPFFSNVTWFHAIHVSGTNGTKRFDNPVLPFNDGVYFASTEKSNIIRGWIFGTTLDSKTQSLLIVNNATNVVIKVCEFQFCNDPFLGVYYHKNNKSWMESEFRVYSSANNCTFEYVSQPFLMDLEGKQGNFKNLREFVFKNIDGYFKIYSKHTPINLVRDLPQGFSALEPLVDLPIGINITRFQTLLALHRSYLTPGDSSSGWTAGAAAYYVGYLQPRTFLLKYNENGTITDAVDCALDPLSETKCTLKSFTVEKGIYQTSNFRVQPTESIVRFPNITNLCPFGEVFNATRFASVYAWNRKRISNCVADYSVLYNSASFSTFKCYGVSPTKLNDLCFTNVYADSFVIRGDEVRQIAPGQTGKIADYNYKLPDDFTGCVIAWNSNNLDSKVGGNYNYLYRLFRKSNLKPFERDISTEIYQAGSTPCNGVEGFNCYFPLQSYGFQPTNGVGYQPYRVVVLSFELLHAPATVCGPKKSTNLVKNKCVNFNFNGLTGTGVLTESNKKFLPFQQFGRDIADTTDAVRDPQTLEILDITPCSFGGVSVITPGTNTSNQVAVLYQDVNCTEVPVAIHADQLTPTWRVYSTGSNVFQTRAGCLIGAEHVNNSYECDIPIGAGICASYQTQTNSPRRARSVASQSIIAYTMSLGAENSVAYSNNSIAIPTNFTISVTTEILPVSMTKTSVDCTMYICGDSTECSNLLLQYGSFCTQLNRALTGIAVEQDKNTQEVFAQVKQIYKTPPIKDFGGFNFSQILPDPSKPSKRSFIEDLLFNKVTLADAGFIKQYGDCLGDIAARDLICAQKFNGLTVLPPLLTDEMIAQYTSALLAGTITSGWTFGAGAALQIPFAMQMAYRFNGIGVTQNVLYENQKLIANQFNSAIGKIQDSLSSTASALGKLQDVVNQNAQALNTLVKQLSSNFGCISSVLNDILSRLDKVEAEVQIDCLITGRLQSLQTYVTQQLIRAAEIRASANLAATKMSECVLGQSKRVDFCGKGYHLMSFPQSAPHGVVFLHVTYVPAQEKNFTTAPAICHDGKAHFPREGVFVSNGTHWFVTQRNFYEPQIITTDNTFVSGNCDVVIGIVNNTVYDPLQPELES

SEQ ID NO: 3461 - protein, 1147 aa, Artificial Sequence
  SARS-CoV-2/2019-nCoV/USA-CruiseA-18/2020__MT159716.1 spike protein (1-1147)(A972C_R995C)
MFVFLVLLPLVSSQCVNLTTRTQLPPAYTNSFTRGVYYPDKVFRSSVLHSTQDLFLPFFSNVTWFHAIHVSGTNGTKRFDNPVLPFNDGVYFASTEKSNIIRGWIFGTTLDSKTQSLLIVNNATNVVIKVCEFQFCNDPFLGVYYHKNNKSWMESELRVYSSANNCTFEYVSQPFLMDLEGKQGNFKNLREFVFKNIDGYFKIYSKHTPINLVRDLPQGFSALEPLVDLPIGINITRFQTLLALHRSYLTPGDSSSGWTAGAAAYYVGYLQPRTFLLKYNENGTITDAVDCALDPLSETKCTLKSFTVEKGIYQTSNFRVQPTESIVRFPNITNLCPFGEVFNATRFASVYAWNRKRISNCVADYSVLYNSASFSTFKCYGVSPTKLNDLCFTNVYADSFVIRGDEVRQIAPGQTGKIADYNYKLPDDFTGCVIAWNSNNLDSKVGGNYNYLYRLFRKSNLKPFERDISTEIYQAGSTPCNGVEGFNCYFPLQSYGFQPTNGVGYQPYRVVVLSFELLHAPATVCGPKKSTNLVKNKCVNFNFNGLTGTGVLTESNKKFLPFQQFGRDIADTTDAVRDPQTLEILDITPCSFGGVSVITPGTNTSNQVAVLYQDVNCTEVPVAIHADQLTPTWRVYSTGSNVFQTRAGCLIGAEHVNNSYECDIPIGAGICASYQTQTNSPRRARSVASQSIIAYTMSLGAENSVAYSNNSIAIPTNFTISVTTEILPVSMTKTSVDCTMYICGDSTECSNLLLQYGSFCTQLNRALTGIAVEQDKNTQEVFAQVKQIYKTPPIKDFGGFNFSQILPDPSKPSKRSFIEDLLFNKVTLADAGFIKQYGDCLGDIAARDLICAQKFNGLTVLPPLLTDEMIAQYTSALLAGTITSGWTFGAGAALQIPFAMQMAYRFNGIGVTQNVLYENQKLIANQFNSAIGKIQDSLSSTASALGKLQDVVNQNAQALNTLVKQLSSNFGCISSVLNDILSRLDKVEAEVQIDCLITGRLQSLQTYVTQQLIRAAEIRASANLAATKMSECVLGQSKRVDFCGKGYHLMSFPQSAPHGVVFLHVTYVPAQEKNFTTAPAICHDGKAHFPREGVFVSNGTHWFVTQRNFYEPQIITTDNTFVSGNCDVVIGIVNNTVYDPLQPELDS

SEQ ID NO: 3462 - protein, 1147 aa, Artificial Sequence
  SARS-CoV-2/SARS-CoV-2/Yunnan-01/human/2020/CHN__MT049951.1 spike protein (1-1147)(A972C_R995C)
MFVFLVLLPLVSSQCVNLTTRTQLPPANTNSFTRGVYYPDKVFRSSVLHSTQDLFLPFFSNVTWFHAIHVSGTNGTKRFDNPVLPFNDGVYFASTEKSNIIRGWIFGTTLDSKTQSLLIVNNATNVVIKVCEFQFCNDPFLGVYYHKNNKSWMESEFRVYSSANNCTFEYVSQPFLMDLEGKQGNFKNLREFVFKNIDGYFKIYSKHTPINLVRDLPQGFSALEPLVDLPIGINITRFQTLLALHRSYLTPGDSSSGWTAGAAAYYVGYLQPRTFLLKYNENGTITDAVDCALDPLSETKCTLKSFTVEKGIYQTSNFRVQPTESIVRFPNITNLCPFGEVFNATRFASVYAWNRKRISNCVADYSVLYNSASFSTFKCYGVSPTKLNDLCFTNVYADSFVIRGDEVRQIAPGQTGKIADYNYKLPDDFTGCVIAWNSNNLDSKVGGNYNYLYRLFRKSNLKPFERDISTEIYQAGSTPCNGVEGFNCYFPLQSYGFQPTNGVGYQPYRVVVLSFELLHAPATVCGPKKSTNLVKNKCVNFNFNGLTGTGVLTESNKKFLPFQQFGRDIADTTDAVRDPQTLEILDITPCSFGGVSVITPGTNTSNQVAVLYQDVNCTEVPVAIHADQLTPTWRVYSTGSNVFQTRAGCLIGAEHVNNSYECDIPIGAGICASYQTQTNSPRRARSVASQSIIAYTMSLGAENSVAYSNNSIAIPTNFTISVTTEILPVSMTKTSVDCTMYICGDSTECSNLLLQYGSFCTQLNRALTGIAVEQDKNTQEVFAQVKQIYKTPPIKDFGGFNFSQILPDPSKPSKRSFIEDLLFNKVTLADAGFIKQYGDCLGDIAARDLICAQKFNGLTVLPPLLTDEMIAQYTSALLAGTITSGWTFGAGAALQIPFAMQMAYRFNGIGVTQNVLYENQKLIANQFNSAIGKIQDSLSSTASALGKLQDVVNQNAQALNTLVKQLSSNFGCISSVLNDILSRLDKVEAEVQIDCLITGRLQSLQTYVTQQLIRAAEIRASANLAATKMSECVLGQSKRVDFCGKGYHLMSFPQSAPHGVVFLHVTYVPAQEKNFTTAPAICHDGKAHFPREGVFVSNGTHWFVTQRNFYEPQIITTDNTFVSGNCDVVIGIVNNTVYDPLQPELDS

SEQ ID NO: 3463 - protein, 1147 aa, Artificial Sequence
  SARS-CoV-2/USA/WA-UW292/2020__EPI_ISL_418077 spike protein (1-1147)(A972C_R995C)
MFVFLVLLPLVSSQCVNLTTRTQLPPAYTNSFTRGVYYPDKVFRSSVLHSTQDLFLPFFSNVTWFHAIHVSGTNGTKRFDNPVLPFNDGVYFASTEKSNIIRGWIFGTTLDSKTQSLLIVNNATNVVIKVCEFQFCNDPFLGVYYHKNNKSWMESEFRVYSSANNCTFEYVSQPFLMDLEGKQGNFKNLREFVFKNIDGYFKIYSKHTPINLVRDLPQGFSALEPLVDLPIGINITRFQTLLALHRSYLTPGDSSSGWTAGAAAYYVGYLQPRTFLLKYNENGTITDAVDCALDPLSETKCTLKSFTVEKGIYQTSNFRVQPTESIVRFPNITNLCPFGEVFNATRFASVYAWNRKRISNCVADYSVLYNSASFSTFKCYGVSPTKLNDLCFTNVYADSFVIRGDEVRQIAPGQTGKIADYNYKLPDDFTGCVIAWNSNNLDSKVGGNYNYLYRLFRKSNLKPFERDISTEIYQASSTPCNGVEGFNCYFPLQSYGFQPTNGVGYQPYRVVVLSFELLHAPATVCGPKKSTNLVKNKCVNFNFNGLTGTGVLTESNKKFLPFQQFGRDIADTTDAVRDPQTLEILDITPCSFGGVSVITPGTNTSNQVAVLYQDVNCTEVPVAIHADQLTPTWRVYSTGSNVFQTRAGCLIGAEHVNNSYECDIPIGAGICASYQTQTNSPRRARSVASQSIIAYTMSLGAENSVAYSNNSIAIPTNFTISVTTEILPVSMTKTSVDCTMYICGDSTECSNLLLQYGSFCTQLNRALTGIAVEQDKNTQEVFAQVKQIYKTPPIKDFGGFNFSQILPDPSKPSKRSFIEDLLFNKVTLADAGFIKQYGDCLGDIAARDLICAQKFNGLTVLPPLLTDEMIAQYTSALLAGTITSGWTFGAGAALQIPFAMQMAYRFNGIGVTQNVLYENQKLIANQFNSAIGKIQDSLSSTASALGKLQDVVNQNAQALNTLVKQLSSNFGCISSVLNDILSRLDKVEAEVQIDCLITGRLQSLQTYVTQQLIRAAEIRASANLAATKMSECVLGQSKRVDFCGKGYHLMSFPQSAPHGVVFLHVTYVPAQEKNFTTAPAICHDGKAHFPREGVFVSNGTHWFVTQRNFYEPQIITTDNTFVSGNCDVVIGIVNNTVYDPLQPELDS

SEQ ID NO: 3464 - protein, 1147 aa, Artificial Sequence
  SARS-CoV-2/Iceland/192/2020__EPI_ISL_417819 spike protein (1-1147)(A972C_R995C)
MFVFFVLLPLVSSQCVNLTTRTQLPPAYTNSFTRGVYYPDKVFRSSVLHSTQDLFLPFFSNVTWFHAIHVSGTNGTKRFDNPVLPFNDGVYFASTEKSNIIRGWIFGTTLDSKTQSLLIVNNATNVVIKVCEFQFCNDPFLGVYYHKNNKSWMESEFRVYSSANNCTFEYVSQPFLMDLEGKQGNFKNLREFVFKNIDGYFKIYSKHTPINLVRDLPQGFSALEPLVDLPIGINITRFQTLLALHRSYLTPGDSSSGWTAGAAAYYVGYLQPRTFLLKYNENGTITDAVDCALDPLSETKCTLKSFTVEKGIYQTSNFRVQPTESIVRFPNITNLCPFGEVFNATRFASVYAWNRKRISNCVADYSVLYNSASFSTFKCYGVSPTKLNDLCFTNVYADSFVIRGDEVRQIAPGQTGKIADYNYKLPDDFTGCVIAWNSNNLDSKVGGNYNYLYRLFRKSNLKPFERDISTEIYQAGSTPCNGVEGFNCYFPLQSYGFQPTNGVGYQPYRVVVLSFELLHAPATVCGPKKSTNLVKNKCVNFNFNGLTGTGVLTESNKKFLPFQQFGRDIADTTDAVRDPQTLEILDITPCSFGGVSVITPGTNTSNQVAVLYQGVNCTEVPVAIHADQLTPTWRVYSTGSNVFQTRAGCLIGAEHVNNSYECDIPIGAGICASYQTQTNSPRRARSVASQSIIAYTMSLGAENSVAYSNNSIAIPTNFTISVTTEILPVSMTKTSVDCTMYICGDSTECSNLLLQYGSFCTQLNRALTGIAVEQDKNTQEVFAQVKQIYKTPPIKDFGGFNFSQILPDPSKPSKRSFIEDLLFNKVTLADAGFIKQYGDCLGDIAARDLICAQKFNGLTVLPPLLTDEMIAQYTSALLAGTITSGWTFGAGAALQIPFAMQMAYRFNGIGVTQNVLYENQKLIANQFNSAIGKIQDSLSSTASALGKLQDVVNQNAQALNTLVKQLSSNFGCISSVLNDILSRLDKVEAEVQIDCLITGRLQSLQTYVTQQLIRAAEIRASANLAATKMSECVLGQSKRVDFCGKGYHLMSFPQSAPHGVVFLHVTYVPAQEKNFTTAPAICHDGKAHFPREGVFVSNGTHWFVTQRNFYEPQIITTDNTFVSGNCDVVIGIVNNTVYDPLQPELDS

SEQ ID NO: 3465 - protein, 1147 aa, Artificial Sequence
  SARS-CoV-2/Belgium/ULG-6939/2020__EPI_ISL_417020 spike protein (1-1147)(A972C_R995C)
MFVFLVLLPLVSSQCVNLTTRTQLPPAYTNSFTRGVYYPDKVFRSSVLHSTQDLFLPFFSNVTWFHAIHVSGTNGTKRFDNPVLPFNDGVYFASTEKSNIIRGWIFGTTLDSKTQSLLIVNNATNVVIKVCEFQFCNDPFLGVYYHKNNKSWMESEFRVYSSANNCTFEYVSQPFLMDLEGKQGNFKNLREFVFKNIDGYFKIYSKHTPINLVRDLPQGFSALEPLVDLPIGINITRFQTLLALHRSYLTPGDSSSGWTAGAAAYYVGYLQPRTFLLKYNENGTITDAVDCALDPLSETKCTLKSFTVEKGIYQTSNFRVQPTESIVRFPNITNLCPFGEVFNATRFASVYAWNRKRISNCVADYSVLYNSASFSTFKCYGVSPTKLNDLCFTNVYADSFVIRGDEVRQIAPGQTGKIADYNYKLPDDFTGCVIAWNSNNLDSKVGGNYNYLYRLFRKSNLKPFERDISTEIYQAGSTPCNGVEGFNCYFPLQSYGFQPTNGVGYQPYRVVVLSFELLHAPATVCGPKKSTNLVKNKCVNFNFNGLTGTGVLTESNKKFLPFQQFGRDIADTTDAVRDPQTLEILDITPCSFGGVSVITPGTNTSNQVAVLYQGVNCTEVPVAIHADQLTPTWRVYSTGSNVFQTRAGCLIGAEHVNNSYECDIPIGAGICASYQTQTNSPRRARSVASQSIIAYTMSLGAENSVVYSNNSIAIPTNFTISVTTEILPVSMTKTSVDCTMYICGDSTECSNLLLQYGSFCTQLNRALTGIAVEQDKNTQEVFAQVKQIYKTPPIKDFGGFNFSQILPDPSKPSKRSFIEDLLFNKVTLADAGFIKQYGDCLGDIAARDLICAQKFNGLTVLPPLLTDEMIAQYTSALLAGTITSGWTFGAGAALQIPFAMQMAYRFNGIGVTQNVLYENQKLIANQFNSAIGKIQDSLSSTASALGKLQDVVNQNAQALNTLVKQLSSNFGCISSVLNDILSRLDKVEAEVQIDCLITGRLQSLQTYVTQQLIRAAEIRASANLAATKMSECVLGQSKRVDFCGKGYHLMSFPQSAPHGVVFLHVTYVPAQEKNFTTAPAICHDGKAHFPREGVFVSNGTHWFVTQRNFYEPQIITTDNTFVSGNCDVVIGIVNNTVYDPLQPELDS

SEQ ID NO: 3466 - protein, 1147 aa, Artificial Sequence
  SARS-CoV-2/France/HF2496/2020__EPI_ISL_418231 spike protein (1-1147)(A972C_R995C)
MFVFLVLLPLVSSQCVNLTTRTQLPPAYTNSFTRGVYYPDKVFRSSVLHSTQDLFLPFFSNVTWFHAIHVSGTNGTKRFDNPVLPFNDGVYFASTEKSNIIRGWIFGTTLDSKTQSLLIVNNATNVVIKVCEFQFCNDPFLGVYYHKNNKSWMESEFRVYSSANNCTFEYVSQPFLMDLEGKQGNFKNLREFVFKNIDGYFKIYSKHTPINLVRDLPQGFSALEPLVDLPIGINITRFQTLLALHRSYLTPGDSSSGWTAGAAAYYVGYLQPRTFLLKYNENGTITDAVDCALDPLSETKCTLKSFTVEKGIYQTSNFRVQPTESIVRFPNITNLCPFGEVFNATRFASVYAWNRKRISNCVADYSVLYNSASFSTFKCYGVSPTKLNDLCFTNVYADSFVIRGDEVRQIAPGQTGKIADYNYKLPDDFTGCVIAWNSNNLDSKVGGNYNYLYRLFRKSNLKPFERDISTEIYQAGSTPCNGVEGFNCYFPLQSYGFQPTNGVGYQPYRVVVLSFELLHAPATVCGPKKSTNLVKNKCVNFNFNGLTGTGVLTESNKKFLPFQQFGRDIADTTDAVRDPQTLEILDITPCSFGGVSVITPGTNTSNQVAVLYQGVNCTEVPVAIHADQLTPTWRVYSTGSNVFQTRAGCLIGAEHVNNSYECDIPIGAGICASYQTQTNSPRRARSVASQSIIAYTMSLGAENSVAYSNNSIAIPTNFTISVTTEILPVSMTKTSVDCTMYICGDSTECSNLLLQYGSFCTQLNRALTGIAVEQDKNTQEVFAQVKQIYKTPPIKDFGGFNFSQILPDPSKPSKRSFIEDLLFNKVTLADAGFIKQYGDCLGDIVARDLICAQKFNGLTVLPPLLTDEMIAQYTSALLAGTITSGWTFGAGAALQIPFAMQMAYRFNGIGVTQNVLYENQKLIANQFNSAIGKIQDSLSSTASALGKLQDVVNQNAQALNTLVKQLSSNFGCISSVLNDILSRLDKVEAEVQIDCLITGRLQSLQTYVTQQLIRAAEIRASANLAATKMSECVLGQSKRVDFCGKGYHLMSFPQSAPHGVVFLHVTYVPAQEKNFTTAPAICHDGKAHFPREGVFVSNGTHWFVTQRNFYEPQIITTDNTFVSGNCDVVIGIVNNTVYDPLQPELDS

SEQ ID NO: 3467 - protein, 1147 aa, Artificial Sequence
  SARS-CoV-2/USA/WA-UW291/2020__EPI_ISL_418076 spike protein (1-1147)(A972C_R995C)
MFVFLVLLPLVSSQCVNLTTRTQLPPAYTNSFTRGVYYPDKVFRSSVLHSTQDLFLPFFSNVTWFHAIHVSGTNGTKRFDNPVLPFNDGVYFASTEKSNIIRGWIFGTTLDSKTQSLLIVNNATNVVIKVCEFQFCNDPFLGVYYHKNNKSWMESEFRVYSSANNCTFEYVSQPFLMDLEGKQGNFKNLREFVFKNIDGYFKIYSKHTPINLVRDLPQGFSALEPLVDLPIGINITRFQTLLALHRSYLTPGDSSSGWTAGAAAYYVGYLQPRTFLLKYNENGTITDAVDCALDPLSETKCTLKSFTVEKGIYQTSNFRVQPTESIVRFPNITNLCPFGEVFNATRFASVYAWNRKRISNCVADYSVLYNSASFSTFKCYGVSPTKLNDLCFTNVYADSFVIRGDEVRQIAPGQTGKIADYNYKLPDDFTGCVIAWNSNNLDSKVGGNYNYLYRLFRKSNLKPFERDISTEIYQAGSTPCNGVEGFNCYFPLQSYGFQPTNGVGYQPYRVVVLSFELLHAPATVCGPKKSTNLVKNKCVNFNFNGLTGTGVLTESNKKFLPFQQFGRDIADTTDAVRDPQTLEILDITPCSFGGVSVITPGTNTSNQVAVLYQGVNCTEVPVAIHADQLTPTWRVYSTGSNVFQTRAGCLIGAEHVNNSYECDIPIGAGICASYQTQTNSPRRARSVASQSIIAYTMSLGAENSVAYSNNSIAIPTNFTISVTTEILPVSMTKTSVDCTMYICGDSTECSNLLLQYGSFCTQLNRALTGIAVEQDKNTQEVFAQVKQIYKTPPIKDFGGFNFSQILPDPSKPSKRSFIEDLLFNKVTLADAGFIKQYGDCLGDIAARDLICAQKFNGLTVLPPLLTDEMIAQYTSALLAGTITSGWTFGAGAALQIPFAMQMAYRFNGIGVTQNVLYENQKLIANQFNSAIGKIQYSLSSTASALGKLQDVVNQNAQALNTLVKQLSSNFGCISSVLNDILSRLDKVEAEVQIDCLITGRLQSLQTYVTQQLIRAAEIRASANLAATKMSECVLGQSKRVDFCGKGYHLMSFPQSAPHGVVFLHVTYVPAQEKNFTTAPAICHDGKAHFPREGVFVSNGTHWFVTQRNFYEPQIITTDNTFVSGNCDVVIGIVNNTVYDPLQPELDS

SEQ ID NO: 3468 - protein, 1147 aa, Artificial Sequence; identical to SEQ ID NO: 3431
  SARS-CoV-2/Portugal/PT0034/2020__EPI_ISL_418019 spike protein (1-1147)(A972C_R995C)

SEQ ID NO: 3469 - protein, 1147 aa, Artificial Sequence; identical to SEQ ID NO: 3423
  SARS-CoV-2/Iceland/202/2020__EPI_ISL_417750 spike protein (1-1147)(A972C_R995C)

SEQ ID NO: 3470 - protein, 1147 aa, Artificial Sequence
  SARS-CoV-2/USA/WA-UW261/2020__EPI_ISL_418046 spike protein (1-1147)(A972C_R995C)
MFVFLVLLPLVSSQCVNLTTRTQLPPAYTNSFTRGVYYPDKVFRSSVLHSTQDLFLPFFSNVTWFHAIHVSGTNGTKRFDNPVLPFNDGVYFASTEKSNIIRGWIFGTTLDSKTQSLLIVNNATNVVIKVCEFQFCNDPFLGVYYHKNNKSWMESEFRVYSSANNCTFEYVSQPFLMDLEGKQGNFKNLREFVFKNIDGYFKIYSKHTPINLVRDLPQGFSALEPLVDLPIGINITRFQTLLALHRSYLTPGDSSSGWTAGAAAYYVGYLQPRTFLLKYNENGTITDAVDCALDPLSETKCTLKSFTVEKGIYQTSNFRVQPTESIVRFPNITNLCPFGEVFNATRFTSVYAWNRKRISNCVADYSVLYNSASFSTFKCYGVSPTKLNDLCFTNVYADSFVIRGDEVRQIAPGQTGKIADYNYKLPDDFTGCVIAWNSNNLDSKVGGNYNYLYRLFRKSNLKPFERDISTEIYQAGSTPCNGVEGFNCYFPLQSYGFQPTNGVGYQPYRVVVLSFELLHAPATVCGPKKSTNLVKNKCVNFNFNGLTGTGVLTESNKKFLPFQQFGRDIADTTDAVRDPQTLEILDITPCSFGGVSVITPGTNTSNQVAVLYQDVNCTEVPVAIHADQLTPTWRVYSTGSNVFQTRAGCLIGAEHVNNSYECDIPIGAGICASYQTQTNSPRRARSVASQSIIAYTMSLGAENSVAYSNNSIAIPTNFTISVTTEILPVSMTKTSVDCTMYICGDSTECSNLLLQYGSFCTQLNRALTGIAVEQDKNTQEVFAQVKQIYKTPPIKDFGGFNFSQILPDPSKPSKRSFIEDLLFNKVTLADAGFIKQYGDCLGDIAARDLICAQKFNGLTVLPPLLTDEMIAQYTSALLAGTITSGWTFGAGAALQIPFAMQMAYRFNGIGVTQNVLYENQKLIANQFNSAIGKIQDSLSSTASALGKLQDVVNQNAQALNTLVKQLSSNFGCISSVLNDILSRLDKVEAEVQIDCLITGRLQSLQTYVTQQLIRAAEIRASANLAATKMSECVLGQSKRVDFCGKGYHLMSFPQSAPHGVVFLHVTYVPAQEKNFTTAPAICHDGKAHFPREGVFVSNGTHWFVTQRNFYEPQIITTDNTFVSGNCDVVIGIVNNTVYDPLQPELDS

SEQ ID NO: 3471 - protein, 1147 aa, Artificial Sequence
  SARS-CoV-2/Portugal/PT0035/2020__EPI_ISL_418020 spike protein (1-1147)(A972C_R995C)
MFVFLVLLPLVSSQCVNLTTRTQLPPAYTNSFTRGVYYPDKVFRSSVLHSTQDLFLPFFSNVTWFHAIHVSGTNGTKRFDNPVLPFNDGVYFASTEKSNIIRGWIFGTTLDSKTQSLLIVNNATNVVIKVCEFQFCNDPFLGVYYHKNNKSWMESEFRVYSSANNCTFEYVSQPFLMDLEGKQGNFKNLREFVFKNIDGYFKIYSKHTPINLVRDLPQGFSALEPLVDLPIGINITRFQTLLALHRSYLTPGDSSSGWTAGAAAYYVGYLQPRTFLLKYNENGTITDAVDCALDPLSETKCTLKSFTVEKGIYQTSNFRVQPTESIVRFPNITNLCPFGEVFNATRFASVYAWNRKRISNCVADYSVLYNSASFSTFKCYGVSPTKLNDLCFTNVYADSFVIRGDEVRQIAPGQTGKIADYNYKLPDDFTGCVIAWNSNNLDSKVGGNYNYLYRLFRKSNLKPFERDISTEIYQAGSTPCNGVEGFNCYFPLQSYGFQPTNGVGYQPYRVVVLSFELLHAPATVCGPKKSTNLVKNKCVNFNFNGLTGTGVLTESNKKFLPFQQFGRDIADTTDAVRDPQTLEILDITPCSFGGVSVITPGTNTSNQVAVLYQDVNCTEVPVAIHADQLTPTWRVYSTGSNVFQTRAGCLIGAEHVNNSYECDIPIGAGICASYQTQTNSPRRARSVASQSIIAYTMSLGAENSVAYSNNSIAIPTNFTISVTTEILPVSMTKTSVDCTMYICGDSTECSNLLLQYGSFCTQLNRALTGIAVEQDKNTQEVFAQVKQIYKTPPIKDFGGFNFSQILPDPSKPSKRSFIEDLLFNKVTLADAGFIKQYGDCLGDISARDLICAQKFNGLTVLPPLLTDEMIAQYTSALLAGTITSGWTFGAGAALQIPFAMQMAYRFNGIGVTQNVLYENQKLIANQFNSAIGKIQDSLSSTASALGKLQDVVNQNAQALNTLVKQLSSNFGCISSVLNDILSRLDKVEAEVQIDCLITGRLQSLQTYVTQQLIRAAEIRASANLAATKMSECVLGQSKRVDFCGKGYHLMSFPQSAPHGVVFLHVTYVPAQEKNFTTAPAICHDGKAHFPREGVFVSNGTHWFVTQRNFYEPQIITTDNTFVSGNCDVVIGIVNNTVYDPLQPELDS

SEQ ID NO: 3472 - protein, 1147 aa, Artificial Sequence
  SARS-CoV-2/USA/NY-NYUMC7/2020__EPI_ISL_418192 spike protein (1-1147)(A972C_R995C)
MFVFLVLLPLVSSQCVNLTTRTQLPPAYTNSFTRGVYYPDKVFRSSVLHSTQDLFLPFFSNVTWFHAIHVSGTNGTKRFDNPVLPFNDGVYFASTEKSNIIRGWIFGTTLDSKTQSLLIVNNATNVVIKVCEFQFCNDPFLGVYHHKNNKSWMESEFRVYSSANNCTFEYVSQPFLMDLEGKQGNFKNLREFVFKNIDGYFKIYSKHTPINLVRDLPQGFSALEPLVDLPIGINITRFQTLLALHRSYLTPGDSSSGWTAGAAAYYVGYLQPRTFLLKYNENGTITDAVDCALDPLSETKCTLKSFTVEKGIYQTSNFRVQPTESIVRFPNITNLCPFGEVFNATRFASVYAWNRKRISNCVADYSVLYNSASFSTFKCYGVSPTKLNDLCFTNVYADSFVIRGDEVRQIAPGQTGKIADYNYKLPDDFTGCVIAWNSNNLDSKVGGNYNYLYRLFRKSNLKPFERDISTEIYQAGSTPCNGVEGFNCYFPLQSYGFQPTNGVGYQPYRVVVLSFELLHAPATVCGPKKSTNLVKNKCVNFNFNGLTGTGVLTESNKKFLPFQQFGRDIADTTDAVRDPQTLEILDITPCSFGGVSVITPGTNTSNQVAVLYQGVNCTEVPVAIHADQLTPTWRVYSTGSNVFQTRAGCLIGAEHVNNSYECDIPIGAGICASYQTQTNSPRRARSVASQSIIAYTMSLGAENSVAYSNNSIAIPTNFTISVTTEILPVSMTKTSVDCTMYICGDSTECSNLLLQYGSFCTQLNRALTGIAVEQDKNTQEVFAQVKQIYKTPPIKDFGGFNFSQILPDPSKPSKRSFIEDLLFNKVTLADAGFIKQYGDCLGDIAARDLICAQKFNGLTVLPPLLTDEMIAQYTSALLAGTITSGWTFGAGAALQIPFAMQMAYRFNGIGVTQNVLYENQKLIANQFNSAIGKIQDSLSSTASALGKLQDVVNQNAQALNTLVKQLSSNFGCISSVLNDILSRLDKVEAEVQIDCLITGRLQSLQTYVTQQLIRAAEIRASANLAATKMSECVLGQSKRVDFCGKGYHLMSFPQSAPHGVVFLHVTYVPAQEKNFTTAPAICHDGKAHFPREGVFVSNGTHWFVTQRNFYEPQIITTDNTFVSGNCDVVIGIVNNTVYDPLQPELDS

SEQ ID NO: 3473 - protein, 1147 aa, Artificial Sequence
  SARS-CoV-2/Iceland/189/2020__EPI_ISL_417709 spike protein (1-1147)(A972C_R995C)
MFVFLVLLPLVSSQCVNLTTRTQLPPAYTNSFTRGVYYPDKVFRSSVLHSTQDLFLPFFSNVTWFHAIHVSGTNGTKRFDNPVLPFNDGVYFASTEKSNIIRGWIFGTTLDSKTQSLLIVNNATNVVIKVCEFQFCNDPFLGVYYHKNNKSWMESEFRVYSSANNCTFEYVSQPFLMDLEGKQGNFKNLREFVFKNIDGYFKIYSKHTPINLVRDLPQGFSALEPLVDLPIGINITRFQTLLALHRSYLTPGDSSSGWTAGAAAYYVGYLQPRTFLLKYNENGTITDAVDCALDPLSETKCTLKSFTVEKGIYQTSNFRVQPTESIVRFPNITNLCPFGEVFNATRFASVYAWNRKRISNCVADYSVLYNSASFSTFKCYGVSPTKLNDLCFTNVYADSFVIRGDEVRQIAPGQTGKIADYNYKLPDDFTGCVIAWNSNNLDSKVGGNYNYLYRLFRKSNLKPFERDISTEIYQAGSTPCNGVEGFNCYFPLQSYGFQPTNGVGYQPYRVVVLSFELLHAPATVCGPKKSTNLVKNKCVNFNFNGLTGTGVLTESNKKFLPFQQFGRDIADTTDAVRDPQTLEILDITPCSFGGVSVITPGTNTSNQVAVLYQGVNCTEVPVAIHADQLTPTWRVYSTGSNVFQTRAGCLIGAEHVNNSYECDIPIGAGICASYQTQTNSPRRARSVASQSIIAYTMSLGAENSVAYSNNSIAIPTNFTISVTTEILPVSMTKTSVDCTMYICGDSTECSNLLLQYGSFCTQLNRALTGIAVEQDKNTQEVFAQVKQIYKTPPIKDFGGFNFSQILPDPSKPSKRSFIEDLLFNKVTLADAGFTKQYGDCLGDIAARDLICAQKFNGLTVLPPLLTDEMIAQYTSALLAGTITSGWTFGAGAALQIPFAMQMAYRFNGIGVTQNVLYENQKLIANQFNSAIGKIQDSLSSTASALGKLQDVVNQNAQALNTLVKQLSSNFGCISSVLNDILSRLDKVEAEVQIDCLITGRLQSLQTYVTQQLIRAAEIRASANLAATKMSECVLGQSKRVDFCGKGYHLMSFPQSAPHGVVFLHVTYVPAQEKNFTTAPAICHDGKAHFPREGVFVSNGTHWFVTQRNFYEPQIITTDNTFVSGNCDVVIGIVNNTVYDPLQPELDS

SEQ ID NO: 3474 - protein, 1147 aa, Artificial Sequence
  SARS-CoV-2/Australia/NSW56/2020__EPI_ISL_417408 spike protein (1-1147)(A972C_R995C)
MFVFLVLLPLVSSQCVNLTTRTQLPPAYTNSFTRGVYYPDKVFRSSVLHSTQDLFLPFFSNVTWFHAIHVSGTNGTKRFDNPVLPFNDGVYFASTEKSNIIRGWIFGTTLDSKTQSLLIVNNATNVVIKVCEFQFCNDPFLGVYYHKNNKSWMESEFRVYSSANNCTFEYVSQPFLMDLEGKQGNFKNLREFVFKNIDGYFKIYSKHTPINLVRDLPQGFSALEPLVDLPIGINITRFQTLLALHRSYLTPGDSSSGWTAGAAAYYVGYLQPRTFLLKYNENGTITDAVDCALDPLSETKCTLKSFTVEKGIYQTSNFRVQPTESIVRFPNITNLCPFGEVFNATRFASVYAWNRKRISNCVADYSVLYNSASFSTFKCYGVSPTKLNDLCFTNVYADSFVIRGDEVRQIAPGQTGKIADYNYKLPDDFTGCVIAWNSNNLDSKVGGNYNYLYRLFRKSNLKPFERDISTEIYQAGSTPCNGVEGFNCYFPLQSYGFQPTNGVGYQPYRVVVLSFELLHAPATVCGPKKSTNLVKNKCVNFNFNGLTGTGVLTESNKKFLPFQQFGRDIADTTDAVRDPQTLEILDITPCSFGGVSVITPGTNTSNQVAVLYQDVNCTEVPVAIHADQLTPTWRVYSTGSNVFQTRAGCLIGAEHVNNSYECDIPIGAGICASYQTQTNSPRRARSVASQSIIAYTMSLGAENSVAYSNNSIAIPTNFTISVTTEILPVSMTKTSVDCTMYICGDSTECSNLLLQYGSFCTQLNRALTGIAVEQDKNTQEVFAQVKQIYKTPPIKDFGGFNFSQILPDSSKPSKRSFIEDLLFNKVTLADAGFIKQYGDCLGDIAARDLICAQKFNGLTVLPPLLTDEMIAQYTSALLAGTITSGWTFGAGAALQIPFAMQMAYRFNGIGVTQNVLYENQKLIANQFNSAIGKIQDSLSSTASALGKLQDVVNQNAQALNTLVKQLSSNFGCISSVLNDILSRLDKVEAEVQIDCLITGRLQSLQTYVTQQLIRAAEIRASANLAATKMSECVLGQSKRVDFCGKGYHLMSFPQSAPHGVVFLHVTYVPAQEKNFTTAPAICHDGKAHFPREGVFVSNGTHWFVTQRNFYEPQIITTDNTFVSGNCDVVIGIVNNTVYDPLQPELDS

SEQ ID NO: 3475 - protein, 1147 aa, Artificial Sequence
  SARS-CoV-2/Iceland/280/2020__EPI_ISL_417608 spike protein (1-1147)(A972C_R995C)
MFVFLVLLPLVSSQCVNLTTRTQLPPAYTNSFTRGVYYPDKVFRSSVLHSTQDLFLPFFSNVTWFHAIHVSGTNGTKRFDNPVLPFNDGVYFASTEKSNIIRGWIFGTTLDSKTQSLLIVNNATNVVIKVCEFQFCNDPFLGVYYHKNNKSWMESEFRVYSSANNCTFEYVSQPFLMDLEGKQGNFKNLREFVFKNIDGYFKIYSKHTPINLVRDLPQGFSALEPLVDLPIGINITRFQTLLALHRSYLTPGDSSSGWTAGAAAYYVGYLQPRTFLLKYNENGTITDAVDCALDPLSETKCTLKSFTVEKGIYQTSNFRVQPTESIVRFPNITNLCPFGEVFNATRFASVYAWNRKRISNCVADYSVLYNSASFSTFKCYGVSPTKLNDLCFTNVYADSFVIRGDEVRQIAPGQTGKIADYNYKLPDDFTGCVIAWNSNNLDSKVGGNYNYLYRLFRKSNLKPFERDISTEIYQAGSTPCNGVEGFNCYFPLQSYGFQPTNGVGYQPYRVVVLSFELLHAPATVCGPKKSTNLVKNKCVNFNFNGLTGTGVLTESNKKFLPFQQFGRDIADTTDAVRDPQTLEILDITPCSFGGVSVITPGTNTSNQVAVLYQGVNCTEVPVAIHADQLTPTWRVYSTGSNVFQTRAGCLIGAEHVNNSYECDIPIGAGICASYHTQTNSPRRARSVASQSIIAYTMSLGAENSVAYSNNSIAIPTNFTISVTTEILPVSMTKTSVDCTMYICGDSTECSNLLLQYGSFCTQLNRALTGIAVEQDKNTQEVFAQVKQIYKTPPIKDFGGFNFSQILPDPSKPSKRSFIEDLLFNKVTLADAGFIKQYGDCLGDIAARDLICAQKFNGLTVLPPLLTDEMIAQYTSALLAGTITSGWTFGAGAALQIPFAMQMAYRFNGIGVTQNVLYENQKLIANQFNSAIGKIQDSLSSTASALGKLQDVVNQNAQALNTLVKQLSSNFGCISSVLNDILSRLDKVEAEVQIDCLITGRLQSLQTYVTQQLIRAAEIRASANLAATKMSECVLGQSKRVDFCGKGYHLMSFPQSAPHGVVFLHVTYVPAQEKNFTTAPAICHDGKAHFPREGVFVSNGTHWFVTQRNFYEPQIITTDNTFVSGNCDVVIGIVNNTVYDPLQPELDS

SEQ ID NO: 3476 - protein, 1147 aa, Artificial Sequence; identical to SEQ ID NO: 3431
  SARS-CoV-2/Iceland/247/2020__EPI_ISL_417575 spike protein (1-1147)(A972C_R995C)

SEQ ID NO: 3477 - protein, 1147 aa, Artificial Sequence
  SARS-CoV-2/Iceland/238/2020__EPI_ISL_417566 spike protein (1-1147)(A972C_R995C)
MFVFLVLLPLVSSQCVNLTTRTQLPPAYTNSFTRGVYYPDKVFRSSVLHSTQDLFLPFFSNVTWFHAIHVSGTNGTKRFDNPVLPFNDGVYFASTEKSNIIRGWIFGTTLDSKTQSLLIVNNATNVVIKVCEFQFCNDPFLGVYYHKNNKSWMESEFRVYSSANNCTFEYVSQPFLMDLEGKQGNFKNLREFVFKNIDGYFKIYSKHTPINLVRDLPQGFSALEPLVDLPIGINITRFQTLLALHRSYLTPGDSSSGWTAGAAAYYVGYLQPRTFLLKYNENGTITDAVDCALDPLSETKCTLKSFTVEKGIYQTSNFRVQPTESIVRFPNITNLCPFGEVFNATRFASVYAWNRKRISNCVADYSVLYNSASFSTFKCYGVSPTKLNDLCFTNVYADSFVIRGDEVRQIAPGQTGKIADYNYKLPDDFTGCVIAWNSNNLDSKVGGNYNYLYRLFRKSNLKPFERDISTEIYQAGSTPCNGVEGFNCYFPLQSYGFQPTNGVGYQPYRVVVLSFELLHAPATVCGPKKSTNLVKNKCVNFNFNGLTGTGVLTESNKKFLPFQQFGRDIADTTDAVRDPQTLEILDITPCSFGGVSVITPGTNTSNQVAVLYQGVNCTEVPVAIHADQLTPTWRVYSTGSNVFQTRAGCLIGAEHVNNSYECDIPIGAGICASYQTQTNSPRRARSVASQSIIAYTMSLGAENSVAYSNNSIAIPTNFTISVTTEILPVSMTKTSVDCTMYICGDSTECSNLLLQYGSFCTQLNRALTGIAVEQDKNTQEVFAQVKQIYKTPPIKDFGGFNFSQILPDPSKPSKRSFIEDLLFNKVTLADVGFIKQYGDCLGDIAARDLICAQKFNGLTVLPPLLTDEMIAQYTSALLAGTITSGWTFGAGAALQIPFAMQMAYRFNGIGVTQNVLYENQKLIANQFNSAIGKIQDSLSSTASALGKLQDVVNQNAQALNTLVKQLSSNFGCISSVLNDILSRLDKVEAEVQIDCLITGRLQSLQTYVTQQLIRAAEIRASANLAATKMSECVLGQSKRVDFCGKGYHLMSFPQSAPHGVVFLHVTYVPAQEKNFTTAPAICHDGKAHFPREGVFVSNGTHWFVTQRNFYEPQIITTDNTFVSGNCDVVIGIVNNTVYDPLQPELDS

SEQ ID NO: 3478 - protein, 1147 aa, Artificial Sequence
  SARS-CoV-2/Greece/16/2020__EPI_ISL_418265 spike protein (1-1147)(A972C_R995C)
MFVFLVLLPLVSSQCVNLTTRTQLPPAYTNSFTRGVYYPDKVFRSSVLHSTQDLFLPFFSNVTWFHAIHVSGTNGTKRFDNPVLPFNDGVYFASTEKSNIIRGWIFGTTLDSKTQSLLIVNNATNVVIKVCEFQFCNDPFLGVYYHKNNKSWMESEFRVYSSANNCTFEYVSQPFLMDLEGKQGNFKNLREFVFKNVDGYFKIYSKHTPINLVRDLPQGFSALEPLVDLPIGINITRFQTLLALHRSYLTPGDSSSGWTAGAAAYYVGYLQPRTFLLKYNENGTITDAVDCALDPLSETKCTLKSFTVEKGIYQTSNFRVQPTESIVRFPNITNLCPFGEVFNATRFASVYAWNRKRISNCVADYSVLYNSASFSTFKCYGVSPTKLNDLCFTNVYADSFVIRGDEVRQIAPGQTGKIADYNYKLPDDFTGCVIAWNSNNLDSKVGGNYNYLYRLFRKSNLKPFERDISTEIYQAGSTPCNGVEGFNCYFPLQSYGFQPTNGVGYQPYRVVVLSFELLHAPATVCGPKKSTNLVKNKCVNFNFNGLTGTGVLTESNKKFLPFQQFGRDIADTTDAVRDPQTLEILDITPCSFGGVSVITPGTNTSNQVAVLYQDVNCTEVPVAIHADQLTPTWRVYSTGSNVFQTRAGCLIGAEHVNNSYECDIPIGAGICASYQTQTNSPRRARSVASQSIIAYTMSLGAENSVAYSNNSIAIPTNFTISVTTEILPVSMTKTSVDCTMYICGDSTECSNLLLQYGSFCTQLNRALTGIAVEQDKNTQEVFAQVKQIYKTPPIKDFGGFNFSQILPDPSKPSKRSFIEDLLFNKVTLADAGFIKQYGDCLGDIAARDLICAQKFNGLTVLPPLLTDEMIAQYTSALLAGTITSGWTFGAGAALQIPFAMQMAYRFNGIGVTQNVLYENQKLIANQFNSAIGKIQDSLSSTASALGKLQDVVNQNAQALNTLVKQLSSNFGCISSVLNDILSRLDKVEAEVQIDCLITGRLQSLQTYVTQQLIRAAEIRASANLAATKMSECVLGQSKRVDFCGKGYHLMSFPQSAPHGVVFLHVTYVPAQEKNFTTAPAICHDGKAHFPREGVFVSNGTHWFVTQRNFYEPQIITTDNTFVSGNCDVVIGIVNNTVYDPLQPELDS

SEQ ID NO: 3479 - protein, 1147 aa, Artificial Sequence
  SARS-CoV-2/Iceland/319/2020__EPI_ISL_417648 spike protein (1-1147)(A972C_R995C)
MFVFLVLLPLVSSQCVNLTTRTQLPPAYTNSFTRGVYYPDKVFRSSVLHSTQDLFLPFFSNVTWFHAIHVSGTNGTKRFDNPVLPFNDGVYFASTEKSNIIRGWIFGTTLDSKTQSLLIVNNATNVVIKVCEFQFCNDPFLGVYYHKNNKSWMESEFRVYSSANNCTFEYVSQPFLIDLEGKQGNFKNLREFVFKNIDGYFKIYSKHTPINLVRDLPQGFSALEPLVDLPIGINITRFQTLLALHRSYLTPGDSSSGWTAGAAAYYVGYLQPRTFLLKYNENGTITDAVDCALDPLSETKCTLKSFTVEKGIYQTSNFRVQPTESIVRFPNITNLCPFGEVFNATRFASVYAWNRKRISNCVADYSVLYNSASFSTFKCYGVSPTKLNDLCFTNVYADSFVIRGDEVRQIAPGQTGKIADYNYKLPDDFTGCVIAWNSNNLDSKVGGNYNYLYRLFRKSNLKPFERDISTEIYQAGSTPCNGVEGFNCYFPLQSYGFQPTNGVGYQPYRVVVLSFELLHAPATVCGPKKSTNLVKNKCVNFNFNGLTGTGVLTESNKKFLPFQQFGRDIADTTDAVRDPQTLEILDITPCSFGGVSVITPGTNTSNQVAVLYQGVNCTEVPVAIHADQLTPTWRVYSTGSNVFQTRAGCLIGAEHVNNSYECDIPIGAGICASYQTQTNSPRRARSVASQSIIAYTMSLGAENSVAYSNNSIAIPTNFTISVTTEILPVSMTKTSVDCTMYICGDSTECSNLLLQYGSFCTQLNRALTGIAVEQDKNTQEVFAQVKQIYKTPPIKDFGGFNFSQILPDPSKPSKRSFIEDLLFNKVTLADAGFIKQYGDCLGDIAARDLICAQKFNGLTVLPPLLTDEMIAQYTSALLAGTITSGWTFGAGAALQIPFAMQMAYRFNGIGVTQNVLYENQKLIANQFNSAIGKIQDSLSSTASALGKLQDVVNQNAQALNTLVKQLSSNFGCISSVLNDILSRLDKVEAEVQIDCLITGRLQSLQTYVTQQLIRAAEIRASANLAATKMSECVLGQSKRVDFCGKGYHLMSFPQSAPHGVVFLHVTYVPAQEKNFTTAPAICHDGKAHFPREGVFVSNGTHWFVTQRNFYEPQIITTDNTFVSGNCDVVIGIVNNTVYDPLQPELDS

SEQ ID NO: 3480 - protein, 1147 aa, Artificial Sequence
  SARS-CoV-2/Congo/94/2020__EPI_ISL_417947 spike protein (1-1147)(A972C_R995C)
MFVFLVLLPLVSSQCVNLTTRTQLPPAYTNSFTRGVYYPDKVFRSSVLHSTQDLFLPFFSNVTWFHAIHVSGTNGTKRFDNPVLPFNDGVYFASTEKSNIIRGWIFGTTLDSKTQSLLIVNNATNVVIKVCEFQFCNDPFLGVYYHKNNKSWMESEFRVYSSANNCTFEYVSQPFLMDLEGKQGNFKNLREFVFKNIDGYFKIYSKHTPINLVRDLPQGFSALEPLVDLPIGINITRFQTLLALHRSYLTPGDSSSGWTAGAAAYYVGYLQPRTFLLKYNENGTITDAVDCALDPLSETKCTLKSFTVEKGIYQTSNFRVQPTESIVRFPNITNLCPFGEVFNATRFASVYAWNRKRISNCVADYSVLYNSASFSTFKCYGVSPTKLNDLCFTNVYADSFVIRGDEVRQIAPGQTGKIADYNYKLPDDFTGCVIAWNSNNLDSKVGGNYNYLYRLFRKSNLKPFERDISTEIYQAGSTPCNGVEGFNCYFPLQSYGFQPTNGVGYQPYRVVVLSFELLHAPATVCGPKKSTNLVKNKCVNFNFNGLTGTGVLTESNKKFLPFQQFGRDIADTTDAVRDPQTLEILDITPCSFGGVSVITPGTNTSNQVAVLYQGVNCTEVPVAIHADQLTPTWRVYSTGSNVFQTRAGCLIGAEHVNNSYECDIPIGAGICASYQTQTNSPRRARSVASQSIIAYTMSLGAENSVAYSNNSIAIPTNFTISVTTEILPVSMTKTSVDCTMYICGDSTECSNLLLQYGSFCTQLNRALTGIAVEQDKNTQEVFAQVKQIYKTPPIKDFGGFNFSQILPDPSKPSKRSFIEDILFNKVTLADAGFIKQYGDCLGDIAARDLICAQKFNGLTVLPPLLTDEMIAQYTSALLAGTITSGWTFGAGAALQIPFAMQMAYRFNGIGVTQNVLYENQKLIANQFNSAIGKIQDSLSSTASALGKLQDVVNQNAQALNTLVKQLSSNFGCISSVLNDILSRLDKVEAEVQIDCLITGRLQSLQTYVTQQLIRAAEIRASANLAATKMSECVLGQSKRVDFCGKGYHLMSFPQSAPHGVVFLHVTYVPAQEKNFTTAPAICHDGKAHFPREGVFVSNGTHWFVTQRNFYEPQIITTDNTFVSGNCDVVIGIVNNTVYDPLQPELDS

SEQ ID NO: 3481 - protein, 1147 aa, Artificial Sequence
  SARS-CoV-2/Congo/158/2020__EPI_ISL_417950 spike protein (1-1147)(A972C_R995C)
MFVFLVLLPLVSSQCVNLTTRTQLPPAYTNSFTRGVYYPDKVFRSSVLHSTQDLFLPFFSNVTWFHAIHVSGTNGTKRFDNPVLPFNDGVYFASTEKSNIIRGWIFGTTLDSKTQSLLIVNNATNVVIKVCEFQFCNDPFLGVYYHKNNKSWMESEFRVYSSANNCTFEYVSQPFLMDLEGKQGNFKNLREFVFKNIDGYFKIYSKHTPINLVRDLPQGFSALEPLVDLPIGINITRFQTLLALHRSYLTPGDSSSGWTAGAAAYYVGYLQPRTFLLKYNENGTITDAVDCALDPLSETKCTLKSFTVEKGIYQTSNFRVQPTESIVRFPNITNLCPFGEVFNATRFASVYAWNRKRISNCVADYSVLYNSASFSTFKCYGVSPTKLNDLCFTNVYADSFVIRGDEVRQIAPGQTGKIADYNYKLPDDFTGCVIAWNSNNLDSKVGGNYNYLYRLFRKSNLKPFERDISTEIYQAGSTPCNGVEGFNCYFPLQSYGFQPTNGVGYQPYRVVVLSFELLHAPATVCGPKKSTNLVKNKCVNFNFNGLTGTGVLTESNKKFLPFQQFGRDIADTTDAVRDPQTLEILDITPCSFGGVSVITPGTNTSNQVAVLYQDVNCTEVPVAIHADQLTPTWRVYSTGSNVFQTRAGCLIGAEHVNNSYECDIPIGAGICASYQTQTNSPRRARSVASQSIIAYTMSLGAENSVAYSNNSIAIPTNFTISVTTEILPVSMTKTSVDCTMYICGDSTECSNLLLQYGSFCTQLNRALTGIAVEQDKNTQEVFAQVKQIYKTPPIKDFGGFNFSQILPDPSKPSKRSFIEDLLFNKVTLADAGFIKQYGDCLGDIAARDLICAQKFNGLTVLPPLLTDEMIAQYTSALLAGTITSGWTFGAGAALQIPFAMQMAYRFNGIGVTQNVLYENQKLIANQFNSAIGKIQDSLSSTASALGKLQDVVNQNAQALNTLVKQLSSNFGCISSVLNDILSRLDKVEAEVQIDCLITGRLQSLQTYVTQQLIRAAEIRASANLAATKMSECVLGQSKRVDFCGKGYHLMSFPQSAPHGVVFLHVTYVPAQEKNFTTAPAICHDGKAHFPREGVFVSNGTHWFVTQRNFYEPQIITTDNTFLSGNCDVVIGIVNNTVYDPLQPELDS

SEQ ID NO: 3482 - protein, 1147 aa, Artificial Sequence
  SARS-CoV-2/USA/UT-00034/2020__EPI_ISL_417977 spike protein (1-1147)(A972C_R995C)
MFVFLVLLPLVSSQCVNLTTRTQLPPAYTNSFTRGVYYPDKVFRSSVLHSTQDLFLPFFSNVTWFHAIHVSGTNGTKRFDNPVLPFNDGVYFASTEKSNIIRGWIFGTTLDSKTQSLLIVNNATNVVIKVCEFQFCNDPFLGVYYYKNNKSWMESEFRVYSSANNCTFEYVSQPFLMDLEGKQGNFKNLREFVFKNIDGYFKIYSKHTPINLVRDLPQGFSALEPLVDLPIGINITRFQTLLALHRSYLTPGDSSSGWTAGAAAYYVGYLQPRTFLLKYNENGTITDAVDCALDPLSETKCTLKSFTVEKGIYQTSNFRVQPTESIVRFPNITNLCPFGEVFNATRFASVYAWNRKRISNCVADYSVLYNSASFSTFKCYGVSPTKLNDLCFTNVYADSFVIRGDEVRQIAPGQTGKIADYNYKLPDDFTGCVIAWNSNNLDSKVGGNYNYLYRLFRKSNLKPFERDISTEIYQAGSTPCNGVEGFNCYFPLQSYGFQPTNGVGYQPYRVVVLSFELLHAPATVCGPKKSTNLVKNKCVNFNFNGLTGTGVLTESNKKFLPFQQFGRDIADTTDAVRDPQTLEILDITPCSFGGVSVITPGTNTSNQVAVLYQGVNCTEVPVAIHADQLTPTWRVYSTGSNVFQTRAGCLIGAEHVNNSYECDIPIGAGICASYQTQTNSPRRARSVASQSIIAYTMSLGAENSVAYSNNSIAIPTNFTISVTTEILPVSMTKTSVDCTMYICGDSTECSNLLLQYGSFCTQLNRALTGIAVEQDKNTQEVFAQVKQIYKTPPIKDFGGFNFSQILPDPSKPSKRSFIEDLLFNKVTLADAGFIKQYGDCLGDIAARDLICAQKFNGLTVLPPLLTDEMIAQYTSALLAGTITSGWTFGAGAALQIPFAMQMAYRFNGIGVTQNVLYENQKLIANQFNSAIGKIQDSLSSTASALGKLQDVVNQNAQALNTLVKQLSSNFGCISSVLNDILSRLDKVEAEVQIDCLITGRLQSLQTYVTQQLIRAAEIRASANLAATKMSECVLGQSKRVDFCGKGYHLMSFPQSAPHGVVFLHVTYVPAQEKNFTTAPAICHDGKAHFPREGVFVSNGTHWFVTQRNFYEPQIITTDNTFVSGNCDVVIGIVNNTVYDPLQPELDS

SEQ ID NO: 3483 - protein, 1147 aa, Artificial Sequence
  SARS-CoV-2/USA/UT-00033/2020__EPI_ISL_417976 spike protein (1-1147)(A972C_R995C)
MFVFLVLLPLVSSQCVNLTTRTQLPPAYTNSFTRGVYYPDKVFRSSVLHSTQDLFLPFFSNVTWFHAIHVSGTNGTKRFDNPVLPFNDGVYFASTEKSNIIRGWIFGTTLDSKTQSLLIVNNATNVVIKVCEFQFCNDPFLGVYYHKNNKSWMESEFRVYSSANNCTFEYVSQPFLMDLEGKQGNFKNLREFVFKNIDGYFKIYSKHTPINLVRDLPQGFSALEPLVDLPIGINITRFQTLLALHRSYLTPGDSSSGLTAGAAAYYVGYLQPRTFLLKYNENGTITDAVDCALDPLSETKCTLKSFTVEKGIYQTSNFRVQPTESIVRFPNITNLCPFGEVFNATRFASVYAWNRKRISNCVADYSVLYNSASFSTFKCYGVSPTKLNDLCFTNVYADSFVIRGDEVRQIAPGQTGKIADYNYKLPDDFTGCVIAWNSNNLDSKVGGNYNYLYRLFRKSNLKPFERDISTEIYQAGSTPCNGVEGFNCYFPLQSYGFQPTNGVGYQPYRVVVLSFELLHAPATVCGPKKSTNLVKNKCVNFNFNGLTGTGVLTESNKKFLPFQQFGRDIADTTDAVRDPQTLEILDITPCSFGGVSVITPGTNTSNQVAVLYQGVNCTEVPVAIHADQLTPTWRVYSTGSNVFQTRAGCLIGAEHVNNSYECDIPIGAGICASYQTQTNSPRRARSVASQSIIAYTMSLGAENSVAYSNNSIAIPTNFTISVTTEILPVSMTKTSVDCTMYICGDSTECSNLLLQYGSFCTQLNRALTGIAVEQDKNTQEVFAQVKQIYKTPPIKDFGGFNFSQILPDPSKPSKRSFIEDLLFNKVTLADAGFIKQYGDCLGDIAARDLICAQKFNGLTVLPPLLTDEMIAQYTSALLAGTITSGWTFGAGAALQIPFAMQMAYRFNGIGVTQNVLYENQKLIANQFNSAIGKIQDSLSSTASALGKLQDVVNQNAQALNTLVKQLSSNFGCISSVLNDILSRLDKVEAEVQIDCLITGRLQSLQTYVTQQLIRAAEIRASANLAATKMSECVLGQSKRVDFCGKGYHLMSFPQSAPHGVVFLHVTYVPAQEKNFTTAPAICHDGKAHFPREGVFVSNGTHWFVTQRNFYEPQIITTDNTFVSGNCDVVIGIVNNTVYDPLQPELDS

SEQ ID NO: 3484 - protein, 1147 aa, Artificial Sequence
  SARS-CoV-2/USA/WI-13/2020__EPI_ISL_417516 spike protein (1-1147)(A972C_R995C)
MFVFLVLLPLVSSQCVNLTTRTQLPPAYTNSFTRGVYYPDKVFRSSVLHSTQDLFLPFFSNVTWFHAIHVSGTNGTKRFDNPVLPFNDGVYFASTEKSNIIRGWIFGTTLDSKTQSLLIVNNATNVVIKVCEFQFCNDPFLGVYYHKNNKSWMESEFRVYSSANNCTFEYVSQPFLMDLEGKQGNFKNLREFVFKNIDGYFKIYSKHTPINLVRDLPQGFSALEPLVDLPIGINITRFQTLLALHRSYLTPGDSSSGWTAGAAAYYVGYLQPRTFLLKYNENGTITDAVDCALDPLSETKCTLKSFTVEKGIYQTSNFRVLPTESIVRFPNITNLCPFGEVFNATRFASVYAWNRKRISNCVADYSVLYNSASFSTFKCYGVSPTKLNDLCFTNVYADSFVIRGDEVRQIAPGQTGKIADYNYKLPDDFTGCVIAWNSNNLDSKVGGNYNYLYRLFRKSNLKPFERDISTEIYQAGSTPCNGVEGFNCYFPLQSYGFQPTNGVGYQPYRVVVLSFELLHAPATVCGPKKSTNLVKNKCVNFNFNGLTGTGVLTESNKKFLPFQQFGRDIADTTDAVRDPQTLEILDITPCSFGGVSVITPGTNTSNQVAVLYQGVNCTEVPVAIHADQLTPTWRVYSTGSNVFQTRAGCLIGAEHVNNSYECDIPIGAGICASYQTQTNSPRRARSVASQSIIAYTMSLGAENSVAYSNNSIAIPTNFTISVTTEILPVSMTKTSVDCTMYICGDSTECSNLLLQYGSFCTQLNRALTGIAVEQDKNTQEVFAQVKQIYKTPPIKDFGGFNFSQILPDPSKPSKRSFIEDLLFNKVTLADAGFIKQYGDCLGDIAARDLICAQKFNGLTVLPPLLTDEMIAQYTSALLAGTITSGWTFGAGAALQIPFAMQMAYRFNGIGVTQNVLYENQKLIANQFNSAIGKIQDSLSSTASALGKLQDVVNQNAQALNTLVKQLSSNFGCISSVLNDILSRLDKVEAEVQIDCLITGRLQSLQTYVTQQLIRAAEIRASANLAATKMSECVLGQSKRVDFCGKGYHLMSFPQSAPHGVVFLHVTYVPAQEKNFTTAPAICHDGKAHFPREGVFVSNGTHWFVTQRNFYEPQIITTDNTFVSGNCDVVIGIVNNTVYDPLQPELDS

SEQ ID NO: 3485 - protein, 1146 aa, Artificial Sequence
  SARS-CoV-2/India/1-27/2020__EPI_ISL_413522 spike protein (1-1146)(A971C_R994C)
MFVFLVLLPLVSSQCVNLTTRTQLPPAYTNSFTRGVYYPDKVFRSSVLHSTQDLFLPFFSNVTWFHAIHVSGTNGTKRFDNPVLPFNDGVYFASTEKSNIIRGWIFGTTLDSKTQSLLIVNNATNVVIKVCEFQFCNDPFLGVYHKNNKSWMESEFRVYSSANNCTFEYVSQPFLMDLEGKQGNFKNLREFVFKNIDGYFKIYSKHTPINLVRDLPQGFSALEPLVDLPIGINITRFQTLLALHRSYLTPGDSSSGWTAGAAAYYVGYLQPRTFLLKYNENGTITDAVDCALDPLSETKCTLKSFTVEKGIYQTSNFRVQPTESIVRFPNITNLCPFGEVFNATRFASVYAWNRKRISNCVADYSVLYNSASFSTFKCYGVSPTKLNDLCFTNVYADSFVIRGDEVIQIAPGQTGKIADYNYKLPDDFTGCVIAWNSNNLDSKVGGNYNYLYRLFRKSNLKPFERDISTEIYQAGSTPCNGVEGFNCYFPLQSYGFQPTNGVGYQPYRVVVLSFELLHAPATVCGPKKSTNLVKNKCVNFNFNGLTGTGVLTESNKKFLPFQQFGRDIADTTDAVRDPQTLEILDITPCSFGGVSVITPGTNTSNQVAVLYQDVNCTEVPVAIHADQLTPTWRVYSTGSNVFQTRAGCLIGAEHVNNSYECDIPIGAGICASYQTQTNSPRRARSVASQSIIAYTMSLGAENSVAYSNNSIAIPTNFTISVTTEILPVSMTKTSVDCTMYICGDSTECSNLLLQYGSFCTQLNRALTGIAVEQDKNTQEVFAQVKQIYKTPPIKDFGGFNFSQILPDPSKPSKRSFIEDLLFNKVTLADAGFIKQYGDCLGDIAARDLICAQKFNGLTVLPPLLTDEMIAQYTSALLAGTITSGWTFGAGAALQIPFAMQMAYRFNGIGVTQNVLYENQKLIANQFNSAIGKIQDSLSSTASALGKLQDVVNQNAQALNTLVKQLSSNFGCISSVLNDILSRLDKVEAEVQIDCLITGRLQSLQTYVTQQLIRAAEIRASANLAATKMSECVLGQSKRVDFCGKGYHLMSFPQSAPHGVVFLHVTYVPAQEKNFTTAPAICHDGKAHFPREGVFVSNGTHWFVTQRNFYEPQIITTDNTFVSGNCDVVIGIVNNTVYDPLQPELDS

SEQ ID NO: 3486 - protein, 1141 aa, Artificial Sequence
  SARS-CoV-2/pangolin/Guangxi/P4L/2017__EPI_ISL_410538 spike protein (1-1141)(A966C_R989C)
MFVFLFVLPLVSSQCVNLTTRTGIPPGYTNSSTRGVYYPDKVFRSSILHLTQDLFLPFFSNVTWFNTINYQGGFKKFDNPVLPFNDGVYFASTEKSNIIRGWIFGTTLDARTQSLLIVNNATNVVIKVCEFQFCTDPFLGVYYHNNNKTWVENEFRVYSSANNCTFEYISQPFLMDLEGKQGNFKNLREFVFKNVDGYFKIYSKHTPIDLVRDLPRGFAALEPLVDLPIGINITRFQTLLALHRSYLTPGNLESGWTTGAAAYYVGYLQQRTFLLSYNQNGTITDAVDCSLDPLSETKCTLKSLTVEKGIYQTSNFRVQPTISIVRFPNITNLCPFGEVFNASKFASVYAWNRKRISNCVADYSVLYNSTSFSTFKCYGVSPTKLNDLCFTNVYADSFVVKGDEVRQIAPGQTGVIADYNYKLPDDFTGCVIAWNSVKQDALTGGNYGYLYRLFRKSKLKPFERDISTEIYQAGSTPCNGQVGLNCYYPLERYGFHPTTGVNYQPFRVVVLSFELLNGPATVCGPKLSTTLVKDKCVNFNFNGLTGTGVLTTSKKQFLPFQQFGRDISDTTDAVRDPQTLEILDITPCSFGGVSVITPGTNTSNQVAVLYQDVNCTEVPMAIHAEQLTPAWRVYSAGANVFQTRAGCLVGAEHVNNSYECDIPVGAGICASYHSMSSLRSVNQRSIIAYTMSLGAENSVAYSNNSIAIPTNFTISVTTEILPVSMTKTSVDCTMYICGDSIECSNLLLQYGSFCTQLNRALTGIAVEQDKNTQEVFAQVKQIYKTPPIKDFGGFNFSQILPDPSKPSKRSFIEDLLFNKVTLADAGFIKQYGDCLGDIAARDLICAQKFNGLTVLPPLLTDEMIAQYTSALLAGTITSGWTFGAGAALQIPFAMQMAYRFNGIGVTQNVLYENQKLIANQFNSAIGKIQDSLSSTASALGKLQDVVNQNAQALNTLVKQLSSNFGCISSVLNDILSRLDKVEAEVQIDCLITGRLQSLQTYVTQQLIRAAEIRASANLAATKMSECVLGQSKRVDFCGKGYHLMSFPQSAPHGVVFLHVTYVPAQEKNFTTAPAICHEGKAHFPREGVFVSNGTHWFITQRNFYEPQIITTDNTFVSGSCDVVIGIVNNTVYDPLQPELDS

SEQ ID NO: 3487 - protein, 1141 aa, Artificial Sequence
  SARS-CoV-2/pangolin/Guangxi/P5L/2017__EPI_ISL_410540 spike protein (1-1141)(A966C_R989C)
MFVFLFVLPLVSSQCVNLTTRTGIPPGYTNSSTRGVYYPDKVFRSSILHLTQDLFLPFFSNVTWFNTINYQGGFKKFDNPVLPFNDGVYFASTEKSNIIRGWIFGTTLDARTQSLLIVNNATNVVIKVCEFQFCTDPFLGVYYHNNNKTWVENEFRVYSSANNCTFEYISQPFLMDLEGKQGNFKNLREFVFKNVDGYFKIYSKHTPIDLVRDLPRGFAALEPLVDLPIGINITRFQTLLALHRSYLTPGKLESGWTTGAAAYYVGYLQQRTFLLSYNQNGTITDAVDCSLDPLSETKCTLKSLTVEKGIYQTSNFRVQPTISIVRFPNITNLCPFGEVFNASKFASVYAWNRKRISNCVADYSVLYNSTSFSTFKCYGVSPTKLNDLCFTNVYADSFVVKGDEVRQIAPGQTGVIADYNYKLPDDFTGCVIAWNSVKQDALTGGNYGYLYRLFRKSKLKPFERDISTEIYQAGSTPCNGQVGLNCYYPLERYGFHPTTGVNYQPFRVVVLSFELLNGPATVCGPKLSTTLVKDKCVNFNFNGLTGTGVLTTSKKQFLPFQQFGRDISDTTDAVRDPQTLEILDITPCSFGGVSVITPGTNTSNQVAVLYQDVNCTEVPMAIHAEQLTPAWRVYSAGANVFQTRAGCLVGAEHVNNSYECDIPVGAGICASYHSMSSFRSVNQRSIIAYTMSLGAENSVAYSNNSIAIPTNFTISVTTEILPVSMTKTSVDCTMYICGDSIECSNLLLQYGSFCTQLNRALTGIAVEQDKNTQEVFAQVKQIYKTPPIKDFGGFNFSQILPDPSKPSKRSFIEDLLFNKVTLADAGFIKQYGDCLGDIAARDLICAQKFNGLTVLPPLLTDEMIAQYTSALLAGTITSGWTFGAGAALQIPFAMQMAYRFNGIGVTQNVLYENQKLIANQFNSAIGKIQDSLSSTASALGKLQDVVNQNAQALNTLVKQLSSNFGCISSVLNDILSRLDKVEAEVQIDCLITGRLQSLQTYVTQQLIRAAEIRASANLAATKMSECVLGQSKRVDFCGKGYHLMSFPQSAPHGVVFLHVTYVPAQEKNFTTAPAICHEGKAHFPREGVFVSNGTHWFITQRNFYEPQIITTDNTFVSGSCDVVIGIVNNTVYDPLQPELDS

SEQ ID NO: 3488 - protein, 1141 aa, Artificial Sequence
  SARS-CoV-2/pangolin/Guangxi/P5E/2017__EPI_ISL_410541 spike protein (1-1141)(A966C_R989C)
MFVFLFVLPLVSSQCVNLTTRTGIPPGYTNSSTRGVYYPDKVFRSSILHLTQDLFLPFFSNVTWFNTITYQGGSKKFDNPVLPFNDGVYFASTEKSNIIRGWIFGTTLDARTQSLLIVNNATNVVIKVCEFQFCTDPFLGVYYHNNNKTWVENEFRVYSSANNCTFEYISQPFLMDLEGKQGNFKNLREFVFKNVDGYFKIYSKHTPIDLVRDLPRGFAALEPLVDLPIGINITRFQTLLALHRSYLTPGKLESGWTTGAAAYYVGYLQQRTFLLSYNQNGTITDAVDCSLDPLSETKCTLKSLTVEKGIYQTSNFRVQPTISIVRFPNITNLCPFGEVFNASKFASVYAWNRKRISNCVADYSVLYNSTSFSTFKCYGVSPTKLNDLCFTNVYADSFVVKGDEVRQIAPGQTGVIADYNYKLPDDFTGCVIAWNSVKQDALTGDNYGYLYRLFRKSKLKPFERDISTEIYQAGSTPCNGQVGLNCYYPLERYGFHPTTGVNYQPFRVVVLSFELLNGPATVCGPKLSTTLVKDKCVNFNFNGLTGTGVLTTSKKQFLPFQQFGRDISDTTDAVRDPQTLEILDITPCSFGGVSVITPGTNTSNQVAVLYQDVNCTEVPMAIHAEQLTPAWRVYSAGANVFQTRAGCLVGAEHVNNSYECDIPVGAGICASYHSMSSFRSVNQRSIIAYTMSLGAENSVAYSNNSIAIPTNFTISVTTEILPVSMTKTSVDCTMYICGDSIECSNLLLQYGSFCTQLNRALTGIAVEQDKNTQEVFAQVKQIYKTPPIKDFGGFNFSQILPDPSKPSKRSFIEDLLFNKVTLADAGFIKQYGDCLGDIAARDLICAQKFNGLTVLPPLLTDEMIAQYTSALLAGTITSGWTFGAGAALQIPFAMQMAYRFNGIGVTQNVLYENQKLIANQFNSAIGKIQDSLSSTASALGKLQDVVNQNAQALNTLVKQLSSNFGCISSVLNDILSRLDKVEAEVQIDCLITGRLQSLQTYVTQQLIRAAEIRASANLAATKMSECVLGQSKRVDFCGKGYHLMSFPQSAPHGVVFLHVTYVPAQEKNFTTAPAICHEGKAHFPREGVFVSNGTHWFITQRNFYEPQIITTDNTFVSGSCDVVIGIVNNTVYDPLQPELDS

SEQ ID NO: 3489 - protein, 1139 aa, Artificial Sequence
  SARS-CoV-2/pangolin/Guangxi/P1E/2017__EPI_ISL_410539 spike protein (1-1139)(A964C_R987C)
MFVFLFVLPLVSSQCVNLTTRTGIQPGYTNSSTRGVYYPDKVFRSSILHLTQDLFLPFFSNVTWFNTINYQGGFKKFDNPVLPFNDGVYFASTEKSNIIRGWIFGTTLDARTQSLLIVNNATNVVIKVCEFQFCTDPFLGVYYHNNNKTWVENEFRVYSSANNCTFEYISQPFLMDLEGKQGNFKNLREFVFKNVDGYFKIYSKHTPIDLVRDLPRGFAALEPLVDLPIGINITRFQTLLALHRSYLTPGKLESGWTTGAAAYYVGYLQQRTFLLSYNQNGTITDAVDCSLDPLSETKCTLKSLTVEKGIYQTSNFRVQPTISIVRFPNITNLCPFGEVFNASKFASVYAWNRKRISNCVADYSVLYNSTSFSTFKCYGVSPTKLNDLCFTNVYADSFVVKGDEVRQIAPGQTGVIADYNYKLPDDFTGCVIAWNSVKQDALTGGNYLYRLFRKSKLKPFERDISTEIYQAGSTPCNGQVGLNCYYPLERYGFHPTTGVNYQPFRVVVLSFELLNGPATVCGPKLSTTLVKDKCVNFNFNGLTGTGVLTTSKKQFLPFQQFGRDISDTTDAVRDPQTLEILDITPCSFGGVSVITPGTNTSNQVAVLYQDVNCTEVPMAIHAEQLTPAWRVYSAGANVFQTRAGCLVGAEHVNNSYECDIPVGAGICASYHSMSSLRSVNQRSIIAYTMSLGAENSVAYSNNSIAIPTNFTISVTTEILPVSMTKTSVDCTMYICGDSIECSNLLLQYGSFCTQLNRALTGIAVEQDKNTQEVFAQVKQIYKTPPIKDFGGFNFSQILPDPSKPSKRSFIEDLLFNKVTLADAGFIKQYGDCLGDIAARDLICAQKFNGLTVLPPLLTDEMIAQYTSALLAGTITSGWTFGAGAALQIPFAMQMAYRFNGIGVTQNVLYENQKLIANQFNSAIGKIQDSLSSTASALGKLQDVVNQNAQALNTLVKQLSSNFGCISSVLNDILSRLDKVEAEVQIDCLITGRLQSLQTYVTQQLIRAAEIRASANLAATKMSECVLGQSKRVDFCGKGYHLMSFPQSAPHGVVFLHVTYVPAQEKNFTTAPAICHEGKAHFPREGVFVSNGTHWFITQRNFYEPQIITTDNTFVSGSCDVVIGIVNNTVYDPLQPELDS

SEQ ID NO: 3490 - protein, 1147 aa, Artificial Sequence
  SARS-CoV-2/Wuhan/WIV05/2019__EPI_ISL_402128 spike protein (1-1147)(A890C_V1040C)
MFVFLVLLPLVSSQCVNLTTRTQLPPAYTNSFTRGVYYPDKVFRSSVLHSTQDLFLPFFSNVTWFHAIHVSGTNGTKRFDNPVLPFNDGVYFASTEKSNIIRGWIFGTTLDSKTQSLLIVNNATNVVIKVCEFQFCNDPFLGVYYHKNNKSWMESEFRVYSSANNCTFEYVSQPFLMDLEGKQGNFKNLREFVFKNIDGYFKIYSKHTPINLVRDLPQGFSALEPLVDLPIGINITRFQTLLALHRSYLTPGDSSSGWTAGAAAYYVGYLQPRTFLLKYNENGTITDAVDCALDPLSETKCTLKSFTVEKGIYQTSNFRVQPTESIVRFPNITNLCPFGEVFNATRFASVYAWNRKRISNCVADYSVLYNSASFSTFKCYGVSPTKLNDLCFTNVYADSFVIRGDEVRQIAPGQTGKIADYNYKLPDDFTGCVIAWNSNNLDSKVGGNYNYLYRLFRKSNLKPFERDISTEIYQAGSTPCNGVEGFNCYFPLQSYGFQPTNGVGYQPYRVVVLSFELLHAPATVCGPKKSTNLVKNKCVNFNFNGLTGTGVLTESNKKFLPFQQFGRDIADTTDAVRDPQTLEILDITPCSFGGVSVITPGTNTSNQVAVLYQDVNCTEVPVAIHADQLTPTWRVYSTGSNVFQTRAGCLIGAEHVNNSYECDIPIGAGICASYQTQTNSPRRARSVASQSIIAYTMSLGAENSVAYSNNSIAIPTNFTISVTTEILPVSMTKTSVDCTMYICGDSTECSNLLLQYGSFCTQLNRALTGIAVEQDKNTQEVFAQVKQIYKTPPIKDFGGFNFSQILPDPSKPSKRSFIEDLLFNKVTLADAGFIKQYGDCLGDIAARDLICAQKFNGLTVLPPLLTDEMIAQYTSALLAGTITSGWTFGCGAALQIPFAMQMAYRFNGIGVTQNVLYENQKLIANQFNSAIGKIQDSLSSTASALGKLQDVVNQNAQALNTLVKQLSSNFGAISSVLNDILSRLDKVEAEVQIDRLITGRLQSLQTYVTQQLIRAAEIRASANLAATKMSECVLGQSKRCDFCGKGYHLMSFPQSAPHGVVFLHVTYVPAQEKNFTTAPAICHDGKAHFPREGVFVSNGTHWFVTQRNFYEPQIITTDNTFVSGNCDVVIGIVNNTVYDPLQPELDS

SEQ ID NO: 3491 - protein, 1143 aa, Artificial Sequence; identical to SEQ ID NO: 3223
  SARS-CoV-2/bat/Yunnan/RaTG13/2013__EPI_ISL_402131 spike protein (1-1143)(A886C_V1036C)

SEQ ID NO: 3492 - protein, 1147 aa, Artificial Sequence; identical to SEQ ID NO: 3224
  SARS-CoV-2/Wuhan/HBCDC-HB-01/2019__EPI_ISL_402132 spike protein (1-1147)(A890C_V1040C)

SEQ ID NO: 3493 - protein, 1147 aa, Artificial Sequence; identical to SEQ ID NO: 3225
  SARS-CoV-2/Guangdong/20SF028/2020__EPI_ISL_403936 spike protein (1-1147)(A890C_V1040C)

SEQ ID NO: 3494 - protein, 1147 aa, Artificial Sequence; identical to SEQ ID NO: 3226
  SARS-CoV-2/Shenzhen/SZTH-001/2020__EPI_ISL_406592 spike protein (1-1147)(A890C_V1040C)

SEQ ID NO: 3495 - protein, 1147 aa, Artificial Sequence; identical to SEQ ID NO: 3227
  SARS-CoV-2/Shenzhen/SZTH-004/2020__EPI_ISL_406595 spike protein (1-1147)(A890C_V1040C)

SEQ ID NO: 3496 - protein, 1147 aa, Artificial Sequence; identical to SEQ ID NO: 3228
  SARS-CoV-2/France/IDF0372/2020__EPI_ISL_406596 spike protein (1-1147)(A890C_V1040C)

SEQ ID NO: 3497 - protein, 1147 aa, Artificial Sequence; identical to SEQ ID NO: 3229
  SARS-CoV-2/Australia/VIC01/2020__EPI_ISL_406844 spike protein (1-1147)(A890C_V1040C)

SEQ ID NO: 3498 - protein, 1147 aa, Artificial Sequence; identical to SEQ ID NO: 3230
  SARS-CoV-2/Germany/BavPat1/2020__EPI_ISL_406862 spike protein (1-1147)(A890C_V1040C)

SEQ ID NO: 3499 - protein, 1147 aa, Artificial Sequence; identical to SEQ ID NO: 3231
  SARS-CoV-2/Wuhan/HBCDC-HB-02/2020__EPI_ISL_412978 spike protein (1-1147)(A890C_V1040C)

SEQ ID NO: 3500 - protein, 1147 aa, Artificial Sequence; identical to SEQ ID NO: 3232
  SARS-CoV-2/Australia/QLD02/2020__EPI_ISL_407896 spike protein (1-1147)(A890C_V1040C)

SEQ ID NO: 3501 - protein, 1147 aa, Artificial Sequence; identical to SEQ ID NO: 3233
  SARS-CoV-2/India/1-31/2020__EPI_ISL_413523 spike protein (1-1147)(A890C_V1040C)

SEQ ID NO: 3502 - protein, 1147 aa, Artificial Sequence; identical to SEQ ID NO: 3234
  SARS-CoV-2/Guangdong/GD2020087-P0008/2020__EPI_ISL_413863 spike protein (1-1147)(A890C_V1040C)

SEQ ID NO: 3503 - protein, 1147 aa, Artificial Sequence; identical to SEQ ID NO: 3235
  SARS-CoV-2/Sweden/01/2020__EPI_ISL_411951 spike protein (1-1147)(A890C_V1040C)

SEQ ID NO: 3504 - protein, 1147 aa, Artificial Sequence; identical to SEQ ID NO: 3236
  SARS-CoV-2/Tianmen/HBCDC-HB-07/2020__EPI_ISL_412983 spike protein (1-1147)(A890C_V1040C)

SEQ ID NO: 3505 - protein, 1147 aa, Artificial Sequence; identical to SEQ ID NO: 3237
  SARS-CoV-2/Hong Kong/case42_VM20002493/2020__EPI_ISL_414527 spike protein (1-1147)(A890C_V1040C)

SEQ ID NO: 3506 - protein, 1147 aa, Artificial Sequence; identical to SEQ ID NO: 3238
  SARS-CoV-2/USA/CruiseA-23/2020__EPI_ISL_414482 spike protein (1-1147)(A890C_V1040C)

SEQ ID NO: 3507 - protein, 1147 aa, Artificial Sequence; identical to SEQ ID NO: 3239
  SARS-CoV-2/Hong Kong/case85_VM20002868/2020__EPI_ISL_414519 spike protein (1-1147)(A890C_V1040C)

SEQ ID NO: 3508 - protein, 1147 aa, Artificial Sequence; identical to SEQ ID NO: 3230
  SARS-CoV-2/England/200990660/2020__EPI_ISL_414523 spike protein (1-1147)(A890C_V1040C)

SEQ ID NO: 3509 - protein, 1147 aa, Artificial Sequence; identical to SEQ ID NO: 3241
  SARS-CoV-2/Australia/NSW09/2020__EPI_ISL_413595 spike protein (1-1147)(A890C_V1040C)

SEQ ID NO: 3510 - protein, 1147 aa, Artificial Sequence; identical to SEQ ID NO: 3222
  SARS-CoV-2/Australia/NSW10/2020__EPI_ISL_413596 spike protein (1-1147)(A890C_V1040C)

SEQ ID NO: 3511 - protein, 1147 aa, Artificial Sequence; identical to SEQ ID NO: 3243
  SARS-CoV-2/Switzerland/1000477797/2020__EPI_ISL_413023 spike protein (1-1147)(A890C_V1040C)

SEQ ID NO: 3512 - protein, 1147 aa, Artificial Sequence; identical to SEQ ID NO: 3244
  SARS-CoV-2/Belgium/BA-02291/2020__EPI_ISL_415159 spike protein (1-1147)(A890C_V1040C)

SEQ ID NO: 3513 - protein, 1147 aa, Artificial Sequence; identical to SEQ ID NO: 3245
  SARS-CoV-2/USA/WA8-UW5/2020__EPI_ISL_413486 spike protein (1-1147)(A890C_V1040C)

SEQ ID NO: 3514 - protein, 1147 aa, Artificial Sequence; identical to SEQ ID NO: 3246
  SARS-CoV-2/England/20102000506/2020__EPI_ISL_415147 spike protein (1-1147)(A890C_V1040C)

SEQ ID NO: 3515 - protein, 1147 aa, Artificial Sequence; identical to SEQ ID NO: 3247
  SARS-CoV-2/Belgium/VAG-03013/2020__EPI_ISL_415155 spike protein (1-1147)(A890C_V1040C)

SEQ ID NO: 3516 - protein, 1147 aa, Artificial Sequence; identical to SEQ ID NO: 3248
  SARS-CoV-2/Belgium/BC-03016/2020__EPI_ISL_415157 spike protein (1-1147)(A890C_V1040C)

SEQ ID NO: 3517 - protein, 1147 aa, Artificial Sequence; identical to SEQ ID NO: 3249
  SARS-CoV-2/Germany/BavPat3/2020__EPI_ISL_414521 spike protein (1-1147)(A890C_V1040C)

SEQ ID NO: 3518 - protein, 1147 aa, Artificial Sequence; identical to SEQ ID NO: 3250
  SARS-CoV-2/France/HF1805/2020__EPI_ISL_414628 spike protein (1-1147)(A890C_V1040C)

SEQ ID NO: 3519 - protein, 1147 aa, Artificial Sequence; identical to SEQ ID NO: 3251
  SARS-CoV-2/Netherlands/ZuidHolland_9/2020__EPI_ISL_414445 spike protein (1-1147)(A890C_V1040C)

SEQ ID NO: 3520 - protein, 1147 aa, Artificial Sequence; identical to SEQ ID NO: 3252
  SARS-CoV-2/Finland/FIN03032020A/2020__EPI_ISL_413602 spike protein (1-1147)(A890C_V1040C)

SEQ ID NO: 3521 - protein, 1147 aa, Artificial Sequence; identical to SEQ ID NO: 3253
  SARS-CoV-2/France/GE1977/2020__EPI_ISL_414632 spike protein (1-1147)(A890C_V1040C)

SEQ ID NO: 3522 - protein, 1147 aa, Artificial Sequence; identical to SEQ ID NO: 3254
  SARS-CoV-2/Finland/FIN-313/2020__EPI_ISL_414641 spike protein (1-1147)(A890C_V1040C)

SEQ ID NO: 3523 - protein, 1147 aa, Artificial Sequence; identical to SEQ ID NO: 3255
  SARS-CoV-2/Netherlands/ZuidHolland_2/2020__EPI_ISL_414556 spike protein (1-1147)(A890C_V1040C)

SEQ ID NO: 3524 - protein, 1147 aa, Artificial Sequence; identical to SEQ ID NO: 3256
  SARS-CoV-2/USA/WA-UW31/2020__EPI_ISL_414618 spike protein (1-1147)(A890C_V1040C)

SEQ ID NO: 3525 - protein, 1147 aa, Artificial Sequence; identical to SEQ ID NO: 3257
  SARS-CoV-2/South Korea/SNU01/2020__EPI_ISL_411929 spike protein (1-1147)(A890C_V1040C)

SEQ ID NO: 3526 - protein, 1147 aa, Artificial Sequence; identical to SEQ ID NO: 3258
  SARS-CoV-2/China/WF0004/2020__EPI_ISL_413694 spike protein (1-1147)(A890C_V1040C)

SEQ ID NO: 3527 - protein, 1147 aa, Artificial Sequence; identical to SEQ ID NO: 3259
  SARS-CoV-2/China/WF0028/2020__EPI_ISL_413791 spike protein (1-1147)(A890C_V1040C)

SEQ ID NO: 3528 - protein, 1147 aa, Artificial Sequence; identical to SEQ ID NO: 3260
  SARS-CoV-2/2019-nCoV/USA-CruiseA-18/2020__MT159716.1 spike protein (1-1147)(A890C_V1040C)

SEQ ID NO: 3529 - protein, 1147 aa, Artificial Sequence; identical to SEQ ID NO: 3261
  SARS-CoV-2/SARS-CoV-2/Yunnan-01/human/2020/CHN__MT049951.1 spike protein (1-1147)(A890C_V1040C)

SEQ ID NO: 3530 - protein, 1147 aa, Artificial Sequence; identical to SEQ ID NO: 3262
  SARS-CoV-2/USA/WA-UW292/2020__EPI_ISL_418077 spike protein (1-1147)(A890C_V1040C)

SEQ ID NO: 3531 - protein, 1147 aa, Artificial Sequence; identical to SEQ ID NO: 3263
  SARS-CoV-2/Iceland/192/2020__EPI_ISL_417819 spike protein (1-1147)(A890C_V1040C)

SEQ ID NO: 3532 - protein, 1147 aa, Artificial Sequence; identical to SEQ ID NO: 3264
  SARS-CoV-2/Belgium/ULG-6939/2020__EPI_ISL_417020 spike protein (1-1147)(A890C_V1040C)

SEQ ID NO: 3533 - protein, 1147 aa, Artificial Sequence; identical to SEQ ID NO: 3265
  SARS-CoV-2/France/HF2496/2020__EPI_ISL_418231 spike protein (1-1147)(A890C_V1040C)

SEQ ID NO: 3534 - protein, 1147 aa, Artificial Sequence; identical to SEQ ID NO: 3266
  SARS-CoV-2/USA/WA-UW291/2020__EPI_ISL_418076 spike protein (1-1147)(A890C_V1040C)

SEQ ID NO: 3535 - protein, 1147 aa, Artificial Sequence; identical to SEQ ID NO: 3230
  SARS-CoV-2/Portugal/PT0034/2020__EPI_ISL_418019 spike protein (1-1147)(A890C_V1040C)

SEQ ID NO: 3536 - protein, 1147 aa, Artificial Sequence; identical to SEQ ID NO: 3222
  SARS-CoV-2/Iceland/202/2020__EPI_ISL_417750 spike protein (1-1147)(A890C_V1040C)

SEQ ID NO: 3537 - protein, 1147 aa, Artificial Sequence; identical to SEQ ID NO: 3269
  SARS-CoV-2/USA/WA-UW261/2020__EPI_ISL_418046 spike protein (1-1147)(A890C_V1040C)

SEQ ID NO: 3538 - protein, 1147 aa, Artificial Sequence; identical to SEQ ID NO: 3270
  SARS-CoV-2/Portugal/PT0035/2020__EPI_ISL_418020 spike protein (1-1147)(A890C_V1040C)

SEQ ID NO: 3539 - protein, 1147 aa, Artificial Sequence; identical to SEQ ID NO: 3271
  SARS-CoV-2/USA/NY-NYUMC7/2020__EPI_ISL_418192 spike protein (1-1147)(A890C_V1040C)

SEQ ID NO: 3540 - protein, 1147 aa, Artificial Sequence; identical to SEQ ID NO: 3272
  SARS-CoV-2/Iceland/189/2020__EPI_ISL_417709 spike protein (1-1147)(A890C_V1040C)

SEQ ID NO: 3541 - protein, 1147 aa, Artificial Sequence; identical to SEQ ID NO: 3273
  SARS-CoV-2/Australia/NSW56/2020__EPI_ISL_417408 spike protein (1-1147)(A890C_V1040C)

SEQ ID NO: 3542 - protein, 1147 aa, Artificial Sequence; identical to SEQ ID NO: 3274
  SARS-CoV-2/Iceland/280/2020__EPI_ISL_417608 spike protein (1-1147)(A890C_V1040C)

SEQ ID NO: 3543 - protein, 1147 aa, Artificial Sequence; identical to SEQ ID NO: 3230
  SARS-CoV-2/Iceland/247/2020__EPI_ISL_417575 spike protein (1-1147)(A890C_V1040C)

SEQ ID NO: 3544 - protein, 1147 aa, Artificial Sequence; identical to SEQ ID NO: 3276
  SARS-CoV-2/Iceland/238/2020__EPI_ISL_417566 spike protein (1-1147)(A890C_V1040C)

SEQ ID NO: 3545 - protein, 1147 aa, Artificial Sequence; identical to SEQ ID NO: 3277
  SARS-CoV-2/Greece/16/2020__EPI_ISL_418265 spike protein (1-1147)(A890C_V1040C)

SEQ ID NO: 3546 - protein, 1147 aa, Artificial Sequence; identical to SEQ ID NO: 3278
  SARS-CoV-2/Iceland/319/2020__EPI_ISL_417648 spike protein (1-1147)(A890C_V1040C)

SEQ ID NO: 3547 - protein, 1147 aa, Artificial Sequence; identical to SEQ ID NO: 3279
  SARS-CoV-2/Congo/94/2020__EPI_ISL_417947 spike protein (1-1147)(A890C_V1040C)

SEQ ID NO: 3548 - protein, 1147 aa, Artificial Sequence; identical to SEQ ID NO: 3280
  SARS-CoV-2/Congo/158/2020__EPI_ISL_417950 spike protein (1-1147)(A890C_V1040C)

SEQ ID NO: 3549 - protein, 1147 aa, Artificial Sequence; identical to SEQ ID NO: 3281
  SARS-CoV-2/USA/UT-00034/2020__EPI_ISL_417977 spike protein (1-1147)(A890C_V1040C)

SEQ ID NO: 3550 - protein, 1147 aa, Artificial Sequence; identical to SEQ ID NO: 3282
  SARS-CoV-2/USA/UT-00033/2020__EPI_ISL_417976 spike protein (1-1147)(A890C_V1040C)

SEQ ID NO: 3551 - protein, 1147 aa, Artificial Sequence; identical to SEQ ID NO: 3283
  SARS-CoV-2/USA/WI-13/2020__EPI_ISL_417516 spike protein (1-1147)(A890C_V1040C)

SEQ ID NO: 3552 - protein, 1146 aa, Artificial Sequence; identical to SEQ ID NO: 3284
  SARS-CoV-2/India/1-27/2020__EPI_ISL_413522 spike protein (1-1146)(A889C_V1039C)

SEQ ID NO: 3553 - protein, 1141 aa, Artificial Sequence; identical to SEQ ID NO: 3285
  SARS-CoV-2/pangolin/Guangxi/P4L/2017__EPI_ISL_410538 spike protein (1-1141)(A884C_V1034C)

SEQ ID NO: 3554 - protein, 1141 aa, Artificial Sequence; identical to SEQ ID NO: 3286
  SARS-CoV-2/pangolin/Guangxi/P5L/2017__EPI_ISL_410540 spike protein (1-1141)(A884C_V1034C)

SEQ ID NO: 3555 - protein, 1141 aa, Artificial Sequence; identical to SEQ ID NO: 3287
  SARS-CoV-2/pangolin/Guangxi/P5E/2017__EPI_ISL_410541 spike protein (1-1141)(A884C_V1034C)

SEQ ID NO: 3556 - protein, 1139 aa, Artificial Sequence; identical to SEQ ID NO: 3288
  SARS-CoV-2/pangolin/Guangxi/P1E/2017__EPI_ISL_410539 spike protein (1-1139)(A882C_V1032C)

SEQ ID NO: 3557 - protein, 1147 aa, Artificial Sequence
  SARS-CoV-2/Wuhan/WIV05/2019__EPI_ISL_402128 spike protein (1-1147)(T874C_S1055C)
MFVFLVLLPLVSSQCVNLTTRTQLPPAYTNSFTRGVYYPDKVFRSSVLHSTQDLFLPFFSNVTWFHAIHVSGTNGTKRFDNPVLPFNDGVYFASTEKSNIIRGWIFGTTLDSKTQSLLIVNNATNVVIKVCEFQFCNDPFLGVYYHKNNKSWMESEFRVYSSANNCTFEYVSQPFLMDLEGKQGNFKNLREFVFKNIDGYFKIYSKHTPINLVRDLPQGFSALEPLVDLPIGINITRFQTLLALHRSYLTPGDSSSGWTAGAAAYYVGYLQPRTFLLKYNENGTITDAVDCALDPLSETKCTLKSFTVEKGIYQTSNFRVQPTESIVRFPNITNLCPFGEVFNATRFASVYAWNRKRISNCVADYSVLYNSASFSTFKCYGVSPTKLNDLCFTNVYADSFVIRGDEVRQIAPGQTGKIADYNYKLPDDFTGCVIAWNSNNLDSKVGGNYNYLYRLFRKSNLKPFERDISTEIYQAGSTPCNGVEGFNCYFPLQSYGFQPTNGVGYQPYRVVVLSFELLHAPATVCGPKKSTNLVKNKCVNFNFNGLTGTGVLTESNKKFLPFQQFGRDIADTTDAVRDPQTLEILDITPCSFGGVSVITPGTNTSNQVAVLYQDVNCTEVPVAIHADQLTPTWRVYSTGSNVFQTRAGCLIGAEHVNNSYECDIPIGAGICASYQTQTNSPRRARSVASQSIIAYTMSLGAENSVAYSNNSIAIPTNFTISVTTEILPVSMTKTSVDCTMYICGDSTECSNLLLQYGSFCTQLNRALTGIAVEQDKNTQEVFAQVKQIYKTPPIKDFGGFNFSQILPDPSKPSKRSFIEDLLFNKVTLADAGFIKQYGDCLGDIAARDLICAQKFNGLTVLPPLLTDEMIAQYCSALLAGTITSGWTFGAGAALQIPFAMQMAYRFNGIGVTQNVLYENQKLIANQFNSAIGKIQDSLSSTASALGKLQDVVNQNAQALNTLVKQLSSNFGAISSVLNDILSRLDKVEAEVQIDRLITGRLQSLQTYVTQQLIRAAEIRASANLAATKMSECVLGQSKRVDFCGKGYHLMSFPQCAPHGVVFLHVTYVPAQEKNFTTAPAICHDGKAHFPREGVFVSNGTHWFVTQRNFYEPQIITTDNTFVSGNCDVVIGIVNNTVYDPLQPELDS

SEQ ID NO: 3558 - protein, 1143 aa, Artificial Sequence
  SARS-CoV-2/bat/Yunnan/RaTG13/2013__EPI_ISL_402131 spike protein (1-1143)(T870C_S1051C)
MFVFLVLLPLVSSQCVNLTTRTQLPPAYTNSSTRGVYYPDKVFRSSVLHLTQDLFLPFFSNVTWFHAIHVSGTNGIKRFDNPVLPFNDGVYFASTEKSNIIRGWIFGTTLDSKTQSLLIVNNATNVVIKVCEFQFCNDPFLGVYYHKNNKSWMESEFRVYSSANNCTFEYVSQPFLMDLEGKQGNFKNLREFVFKNIDGYFKIYSKHTPINLVRDLPPGFSALEPLVDLPIGINITRFQTLLALHRSYLTPGDSSSGWTAGAAAYYVGYLQPRTFLLKYNENGTITDAVDCALDPLSETKCTLKSFTVEKGIYQTSNFRVQPTDSIVRFPNITNLCPFGEVFNATTFASVYAWNRKRISNCVADYSVLYNSTSFSTFKCYGVSPTKLNDLCFTNVYADSFVITGDEVRQIAPGQTGKIADYNYKLPDDFTGCVIAWNSKHIDAKEGGNFNYLYRLFRKANLKPFERDISTEIYQAGSKPCNGQTGLNCYYPLYRYGFYPTDGVGHQPYRVVVLSFELLNAPATVCGPKKSTNLVKNKCVNFNFNGLTGTGVLTESNKKFLPFQQFGRDIADTTDAVRDPQTLEILDITPCSFGGVSVITPGTNASNQVAVLYQDVNCTEVPVAIHADQLTPTWRVYSTGSNVFQTRAGCLIGAEHVNNSYECDIPIGAGICASYQTQTNSRSVASQSIIAYTMSLGAENSVAYSNNSIAIPTNFTISVTTEILPVSMTKTSVDCTMYICGDSTECSNLLLQYGSFCTQLNRALTGIAVEQDKNTQEVFAQVKQIYKTPPIKDFGGFNFSQILPDPSKPSKRSFIEDLLFNKVTLADAGFIKQYGDCLGDIAARDLICAQKFNGLTVLPPLLTDEMIAQYCSALLAGTITSGWTFGAGAALQIPFAMQMAYRFNGIGVTQNVLYENQKLIANQFNSAIGKIQDSLSSTASALGKLQDVVNQNAQALNTLVKQLSSNFGAISSVLNDILSRLDKVEAEVQIDRLITGRLQSLQTYVTQQLIRAAEIRASANLAATKMSECVLGQSKRVDFCGKGYHLMSFPQCAPHGVVFLHVTYVPAQEKNFTTAPAICHDGKAHFPREGVFVSNGTHWFVTQRNFYEPQIITTDNTFVSGSCDVVIGIVNNTVYDPLQPELDS

SEQ ID NO: 3559 - protein, 1147 aa, Artificial Sequence
  SARS-CoV-2/Wuhan/HBCDC-HB-01/2019__EPI_ISL_402132 spike protein (1-1147)(T874C_S1055C)
MFVFLVLLPLVSSQCVNLTTRTQLPPAYTNSITRGVYYPDKVFRSSVLHSTQDLFLPFFSNVTWFHAIHVSGTNGTKRFDNPVLPFNDGVYFASTEKSNIIRGWIFGTTLDSKTQSLLIVNNATNVVIKVCEFQFCNDPFLGVYYHKNNKSWMESEFRVYSSANNCTFEYVSQPFLMDLEGKQGNFKNLREFVFKNIDGYFKIYSKHTPINLVRDLPQGFSALEPLVDLPIGINITRFQTLLALHRSYLTPGDSSSGWTAGAAAYYVGYLQPRTFLLKYNENGTITDAVDCALDPLSETKCTLKSFTVEKGIYQTSNFRVQPTESIVRFPNITNLCPFGEVFNATRFASVYAWNRKRISNCVADYSVLYNSASFSTFKCYGVSPTKLNDLCFTNVYADSFVIRGDEVRQIAPGQTGKIADYNYKLPDDFTGCVIAWNSNNLDSKVGGNYNYLYRLFRKSNLKPFERDISTEIYQAGSTPCNGVEGFNCYFPLQSYGFQPTNGVGYQPYRVVVLSFELLHAPATVCGPKKSTNLVKNKCVNFNFNGLTGTGVLTESNKKFLPFQQFGRDIADTTDAVRDPQTLEILDITPCSFGGVSVITPGTNTSNQVAVLYQDVNCTEVPVAIHADQLTPTWRVYSTGSNVFQTRAGCLIGAEHVNNSYECDIPIGAGICASYQTQTNSPRRARSVASQSIIAYTMSLGAENSVAYSNNSIAIPTNFTISVTTEILPVSMTKTSVDCTMYICGDSTECSNLLLQYGSFCTQLNRALTGIAVEQDKNTQEVFAQVKQIYKTPPIKDFGGFNFSQILPDPSKPSKRSFIEDLLFNKVTLADAGFIKQYGDCLGDIAARDLICAQKFNGLTVLPPLLTDEMIAQYCSALLAGTITSGWTFGAGAALQIPFAMQMAYRFNGIGVTQNVLYENQKLIANQFNSAIGKIQDSLSSTASALGKLQDVVNQNAQALNTLVKQLSSNFGAISSVLNDILSRLDKVEAEVQIDRLITGRLQSLQTYVTQQLIRAAEIRASANLAATKMSECVLGQSKRVDFCGKGYHLMSFPQCAPHGVVFLHVTYVPAQEKNFTTAPAICHDGKAHFPREGVFVSNGTHWFVTQRNFYEPQIITTDNTFVSGNCDVVIGIVNNTVYDPLQPELDS

SEQ ID NO: 3560 - protein, 1147 aa, Artificial Sequence
  SARS-CoV-2/Guangdong/20SF028/2020__EPI_ISL_403936 spike protein (1-1147)(T874C_S1055C)
MFVFLVLLPLVSSQCVNLTTRTQLPPAYTNSFTRGVYYPDKVFRSSVLYSTQDLFLPFFSNVTWFHAIHVSGTNGTKRFDNPVLPFNDGVYFASTEKSNIIRGWIFGTTLDSKTQSLLIVNNATNVVIKVCEFQFCNDPFLGVYYHKNNKSWMESEFRVYSSANNCTFEYVSQPFLMDLEGKQGNFKNLREFVFKNIDGYFKIYSKHTPINLVRDLPQGFSALEPLVDLPIGINITRFQTLLALHRSYLTPGDSSSGWTAGAAAYYVGYLQPRTFLLKYNENGTITDAVDCALDPLSETKCTLKSFTVEKGIYQTSNFRVQPTESIVRFPNITNLCPFGEVFNATRFASVYAWNRKRISNCVADYSVLYNSASFSTFKCYGVSPTKLNDLCFTNVYADSFVIRGDEVRQIAPGQTGKIADYNYKLPDDFTGCVIAWNSNNLDSKVGGNYNYLYRLFRKSNLKPFERDISTEIYQAGSTPCNGVEGFNCYFPLQSYGFQPTNGVGYQPYRVVVLSFELLHAPATVCGPKKSTNLVKNKCVNFNFNGLTGTGVLTESNKKFLPFQQFGRDIADTTDAVRDPQTLEILDITPCSFGGVSVITPGTNTSNQVAVLYQDVNCTEVPVAIHADQLTPTWRVYSTGSNVFQTRAGCLIGAEHVNNSYECDIPIGAGICASYQTQTNSPRRARSVASQSIIAYTMSLGAENSVAYSNNSIAIPTNFTISVTTEILPVSMTKTSVDCTMYICGDSTECSNLLLQYGSFCTQLNRALTGIAVEQDKNTQEVFAQVKQIYKTPPIKDFGGFNFSQILPDPSKPSKRSFIEDLLFNKVTLADAGFIKQYGDCLGDIAARDLICAQKFNGLTVLPPLLTDEMIAQYCSALLAGTITSGWTFGAGAALQIPFAMQMAYRFNGIGVTQNVLYENQKLIANQFNSAIGKIQDSLSSTASALGKLQDVVNQNAQALNTLVKQLSSNFGAISSVLNDILSRLDKVEAEVQIDRLITGRLQSLQTYVTQQLIRAAEIRASANLAATKMSECVLGQSKRVDFCGKGYHLMSFPQCAPHGVVFLHVTYVPAQEKNFTTAPAICHDGKAHFPREGVFVSNGTHWFVTQRNFYEPQIITTDNTFVSGNCDVVIGIVNNTVYDPLQPELDS

SEQ ID NO: 3561 - protein, 1147 aa, Artificial Sequence
  SARS-CoV-2/Shenzhen/SZTH-001/2020__EPI_ISL_406592 spike protein (1-1147)(T874C_S1055C)
MFVFLVLLPLVSSQCVNLTTRTQLPPAYTNSFTRGVYYPDKVFRSSVLHSTQDLFLPFFSNVTWFHAIHVSGTNGTKRFDNPVLPFNDGVYFASTEKSNIIRGWIFGTTLDSKTQSLLIVNNATNVVIKVCEFQFCNDPFLGVYYHKNNKSWMESEFRVYSSANNCTFEYVSQPFLMDLEGKQGNFKNLREFVFKNIDGYFKIYSKHTPINLVRDLPQGFSALEPLVDLPIGINITRFQTLLALHRSYLTPGDSSSGWTAGAAAYYVGYLQPRTFLLKYNENGTITDAVDCALDPLSETKCTLKSFTVEKGIYQTSNFRVQPTESIVRFPNITNLCPFGEVFNATRFASVYAWNRKRISNCVADYSVLYNSASFSTFKCYGVSPTKLNDLCFTNVYADSFVIRGDEVRQIAPGQTGKIADYNYKLPDDFTGCVIAWNSNNLDSKVGGNYNYLYRLFRKSNLKPFERDISTEIYQAGSTPCNGVEGFNCYFPLQSYGFQPTNGVGYQPYRVVVLSFELLHAPATVCGPKKSTNLVKNKCVNFNFNGLTGTGVLTESNKKFLPFQQFGRDIADTTDAVRDPQTLEILDITPCSFGGVSVITPGTNTSNQVAVLYQDVNCTEVPVAIHADQLTPTWRVYSTGSNVFQTRAGCLIGAEHVNNSYECDIPIGAGICASYQTQTNSPRRARSVASQSIIAYTMSLGAENSVAYSNNSIAIPTNFTISVTTEILPVSMTKTSVDCTMYICGDSTECSNLLLQYGSFCTQLNRALTGIAVEQDKNTQEVFAQVKQIYKTPPIKDFGGFNFSQILPDPSKPSKRSFIEDLLFNKVTLADAGFIKQYGDCLGDIAARDLICAQKFNGLTVLPPLLTDEMIAQYCSALLAGTITSGWTFGAGAALQIPFAMQMAYRFNGIGVTQNVLYENQKLIANQFNSAIGKIQDSLSSTASALGKLQDVVNQNAQALNTLVKQLSSNFGAISSVLNDILSRLDKVEAEVQIDRLITGRLQSLQTYVTQQLIRAAEIRASANLAATKMSECVLGQSKRVDFCGKGYHLMSFPQCAPHGVVFLHVTYVPAQEKNFTTAPAICHDGKAHFPREGVFVSNGTHWFVTQRNFYEPQIITTDNTFVSGNCDVLIGIVNNTVYDPLQPELDS

SEQ ID NO: 3562 - protein, 1147 aa, Artificial Sequence
  SARS-CoV-2/Shenzhen/SZTH-004/2020__EPI_ISL_406595 spike protein (1-1147)(T874C_S1055C)
MFVFLVLLPLVSSQCVNLTTRTQLPPAYTNSFTRGVYYPDKVFRSSVLHSTQDLFLPFFSNVTWFHAIHVSGTNGTKRFDNPVLPFNDGVYFASTEKSNIIRGWIFGTTLDSKTQSLLIVNNATNVVIKVCEFQFCNDPFLGVYYHKNNKSWMESEFRVYSSANNCTFEYVSQPFLMDLEGKQGNFKNLREFVFKNIDGYFKIYSKHTPINLVRDLPQGFSALEPLVDLPIGINITRFQTLLALHRSYLTPGDSSSGWTAGAAAYYVGYLQPRTFLLKYNENGTITDAVDCALDPLSETKCTLKSFTVEKGIYQTSNFRVQPTESIVRFPNITNLCPFGEVFNATRFASVYAWDRKRISNCVAYYSVLYNSASFSTFKCYGVSPTKLNDLCFTNVYADSFVIRGDEVRQIAPGQTGKIADYNYKLPDDFTGCVIAWNSNNLDSKVGGNYNYLYRLFRKSNLKPFERDISTEIYQAGSTPCNGVEGFNCYFPLQSYGFQPTNGVGYQPYRVVVLSFELLHAPATVCGPKKSTNLVKNKCVNFNFNGLTGTGVLTESNKKFLPFQQFGRDIADTTDAVRDPQTLEILDITPCSFGGVSVITPGTNTSNQVAVLYQDVNCTEVPVAIHADQLTPTWRVYSTGSNVFQTRAGCLIGAEHVNNSYECDIPIGAGICASYQTQTNSPRRARSVASQSIIAYTMSLGAENSVAYSNNSIAIPTNFTISVTTEILPVSMTKTSVDCTMYICGDSTECSNLLLQYGSFCTQLNRALTGIAVEQDKNTQEVFAQVKQIYKTPPIKDFGGFNFSQILPDPSKPSKRSFIEDLLFNKVTLADAGFIKQYGDCLGDIAARDLICAQKFNGLTVLPPLLTDEMIAQYCSALLAGTITSGWTFGAGAALQIPFAMQMAYRFNGIGVTQNVLYENQKLIANQFNSAIGKIQDSLSSTASALGKLQDVVNQNAQALNTLVKQLSSNFGAISSVLNDILSRLDKVEAEVQIDRLITGRLQSLQTYVTQQLIRAAEIRASANLAATKMSECVLGQSKRVDFCGKGYHLMSFPQCAPHGVVFLHVTYVPAQEKNFTTAPAICHDGKAHFPREGVFVSNGTHWFVTQRNFYEPQIITTDNTFVSGNCDVVIGIVNNTVYDPLQPELDS

SEQ ID NO: 3563 - protein, 1147 aa, Artificial Sequence
  SARS-CoV-2/France/IDF0372/2020__EPI_ISL_406596 spike protein (1-1147)(T874C_S1055C)
MFVFLVLLPLVSSQCVNLTTRTQLPPAYTNSFTRGVYYPDKVFRSSVLHSTQDLFLPFFSNVTWFHAIHVSGTNGTKRFDNPVLPFNDGVYFASTEKSNIIRGWIFGTTLDSKTQSLLIVNNATNVVIKVCEFQFCNDPFLGVYYHKNNKSWMESEFRVYSSANNCTFEYVSQPFLMDLEGKQGNFKNLREFVFKNIDGYFKIYSKHTPINLVRDLPQGFSALEPLVDLPIGINITRFQTLLALHRSYLTPGDSSSGWTAGAAAYYVGYLQPRTFLLKYNENGTITDAVDCALDPLSETKCTLKSFTVEKGIYQTSNFRVQPTESIVRFPNITNLCPFGEVFNATRFASVYAWNRKRISNCVADYSFLYNSASFSTFKCYGVSPTKLNDLCFTNVYADSFVIRGDEVRQIAPGQTGKIADYNYKLPDDFTGCVIAWNSNNLDSKVGGNYNYLYRLFRKSNLKPFERDISTEIYQAGSTPCNGVEGFNCYFPLQSYGFQPTNGVGYQPYRVVVLSFELLHAPATVCGPKKSTNLVKNKCVNFNFNGLTGTGVLTESNKKFLPFQQFGRDIADTTDAVRDPQTLEILDITPCSFGGVSVITPGTNTSNQVAVLYQDVNCTEVPVAIHADQLTPTWRVYSTGSNVFQTRAGCLIGAEHVNNSYECDIPIGAGICASYQTQTNSPRRARSVASQSIIAYTMSLGAENSVAYSNNSIAIPTNFTISVTTEILPVSMTKTSVDCTMYICGDSTECSNLLLQYGSFCTQLNRALTGIAVEQDKNTQEVFAQVKQIYKTPPIKDFGGFNFSQILPDPSKPSKRSFIEDLLFNKVTLADAGFIKQYGDCLGDIAARDLICAQKFNGLTVLPPLLTDEMIAQYCSALLAGTITSGWTFGAGAALQIPFAMQMAYRFNGIGVTQNVLYENQKLIANQFNSAIGKIQDSLSSTASALGKLQDVVNQNAQALNTLVKQLSSNFGAISSVLNDILSRLDKVEAEVQIDRLITGRLQSLQTYVTQQLIRAAEIRASANLAATKMSECVLGQSKRVDFCGKGYHLMSFPQCAPHGVVFLHVTYVPAQEKNFTTAPAICHDGKAHFPREGVFVSNGTHWFVTQRNFYEPQIITTDNTFVSGNCDVVIGIVNNTVYDPLQPELDS

SEQ ID NO: 3564 - protein, 1147 aa, Artificial Sequence
  SARS-CoV-2/Australia/VIC01/2020__EPI_ISL_406844 spike protein (1-1147)(T874C_S1055C)
MFVFLVLLPLVSSQCVNLTTRTQLPPAYTNSFTRGVYYPDKVFRSSVLHSTQDLFLPFFSNVTWFHAIHVSGTNGTKRFDNPVLPFNDGVYFASTEKSNIIRGWIFGTTLDSKTQSLLIVNNATNVVIKVCEFQFCNDPFLGVYYHKNNKSWMESEFRVYSSANNCTFEYVSQPFLMDLEGKQGNFKNLREFVFKNIDGYFKIYSKHTPINLVRDLPQGFSALEPLVDLPIGINITRFQTLLALHRRYLTPGDSSSGWTAGAAAYYVGYLQPRTFLLKYNENGTITDAVDCALDPLSETKCTLKSFTVEKGIYQTSNFRVQPTESIVRFPNITNLCPFGEVFNATRFASVYAWNRKRISNCVADYSVLYNSASFSTFKCYGVSPTKLNDLCFTNVYADSFVIRGDEVRQIAPGQTGKIADYNYKLPDDFTGCVIAWNSNNLDSKVGGNYNYLYRLFRKSNLKPFERDISTEIYQAGSTPCNGVEGFNCYFPLQSYGFQPTNGVGYQPYRVVVLSFELLHAPATVCGPKKSTNLVKNKCVNFNFNGLTGTGVLTESNKKFLPFQQFGRDIADTTDAVRDPQTLEILDITPCSFGGVSVITPGTNTSNQVAVLYQDVNCTEVPVAIHADQLTPTWRVYSTGSNVFQTRAGCLIGAEHVNNSYECDIPIGAGICASYQTQTNSPRRARSVASQSIIAYTMSLGAENSVAYSNNSIAIPTNFTISVTTEILPVSMTKTSVDCTMYICGDSTECSNLLLQYGSFCTQLNRALTGIAVEQDKNTQEVFAQVKQIYKTPPIKDFGGFNFSQILPDPSKPSKRSFIEDLLFNKVTLADAGFIKQYGDCLGDIAARDLICAQKFNGLTVLPPLLTDEMIAQYCSALLAGTITSGWTFGAGAALQIPFAMQMAYRFNGIGVTQNVLYENQKLIANQFNSAIGKIQDSLSSTASALGKLQDVVNQNAQALNTLVKQLSSNFGAISSVLNDILSRLDKVEAEVQIDRLITGRLQSLQTYVTQQLIRAAEIRASANLAATKMSECVLGQSKRVDFCGKGYHLMSFPQCAPHGVVFLHVTYVPAQEKNFTTAPAICHDGKAHFPREGVFVSNGTHWFVTQRNFYEPQIITTDNTFVSGNCDVVIGIVNNTVYDPLQPELDS

SEQ ID NO: 3565 - protein, 1147 aa, Artificial Sequence
  SARS-CoV-2/Germany/BavPat1/2020__EPI_ISL_406862 spike protein (1-1147)(T874C_S1055C)
MFVFLVLLPLVSSQCVNLTTRTQLPPAYTNSFTRGVYYPDKVFRSSVLHSTQDLFLPFFSNVTWFHAIHVSGTNGTKRFDNPVLPFNDGVYFASTEKSNIIRGWIFGTTLDSKTQSLLIVNNATNVVIKVCEFQFCNDPFLGVYYHKNNKSWMESEFRVYSSANNCTFEYVSQPFLMDLEGKQGNFKNLREFVFKNIDGYFKIYSKHTPINLVRDLPQGFSALEPLVDLPIGINITRFQTLLALHRSYLTPGDSSSGWTAGAAAYYVGYLQPRTFLLKYNENGTITDAVDCALDPLSETKCTLKSFTVEKGIYQTSNFRVQPTESIVRFPNITNLCPFGEVFNATRFASVYAWNRKRISNCVADYSVLYNSASFSTFKCYGVSPTKLNDLCFTNVYADSFVIRGDEVRQIAPGQTGKIADYNYKLPDDFTGCVIAWNSNNLDSKVGGNYNYLYRLFRKSNLKPFERDISTEIYQAGSTPCNGVEGFNCYFPLQSYGFQPTNGVGYQPYRVVVLSFELLHAPATVCGPKKSTNLVKNKCVNFNFNGLTGTGVLTESNKKFLPFQQFGRDIADTTDAVRDPQTLEILDITPCSFGGVSVITPGTNTSNQVAVLYQGVNCTEVPVAIHADQLTPTWRVYSTGSNVFQTRAGCLIGAEHVNNSYECDIPIGAGICASYQTQTNSPRRARSVASQSIIAYTMSLGAENSVAYSNNSIAIPTNFTISVTTEILPVSMTKTSVDCTMYICGDSTECSNLLLQYGSFCTQLNRALTGIAVEQDKNTQEVFAQVKQIYKTPPIKDFGGFNFSQILPDPSKPSKRSFIEDLLFNKVTLADAGFIKQYGDCLGDIAARDLICAQKFNGLTVLPPLLTDEMIAQYCSALLAGTITSGWTFGAGAALQIPFAMQMAYRFNGIGVTQNVLYENQKLIANQFNSAIGKIQDSLSSTASALGKLQDVVNQNAQALNTLVKQLSSNFGAISSVLNDILSRLDKVEAEVQIDRLITGRLQSLQTYVTQQLIRAAEIRASANLAATKMSECVLGQSKRVDFCGKGYHLMSFPQCAPHGVVFLHVTYVPAQEKNFTTAPAICHDGKAHFPREGVFVSNGTHWFVTQRNFYEPQIITTDNTFVSGNCDVVIGIVNNTVYDPLQPELDS

SEQ ID NO: 3566 - protein, 1147 aa, Artificial Sequence
  SARS-CoV-2/Wuhan/HBCDC-HB-02/2020__EPI_ISL_412978 spike protein (1-1147)(T874C_S1055C)
MFVFLVLLPLVSSQCVNLTTRTQLPPAYTNSFTRGVYYPDKVFRSSVLHSTQDLFLPFFSNVTWFHAIHVSGTNGTKRFDNPVLPFNDGVYFASTEKSNIIRGWIFGTTLDSKTQSLLIVNNATNVVIKVCEFQFCNDPFLGVYYHKNNKSWMESEFRVYSSANNCTFEYVSQPFLMDLEGKQGNFKNLREFVFKNIDGYFKIYSKHTPINLVRDLPQGFSALEPLVDLPIGINITRFQTLLALHRSYLTPGDSSSGWTAGAAAYYVGYLQPRTFLLKYNENGTITDAVDCALDPLSETKCTLKSFTVEKGIYQTSNFRVQPTESIVRFPNITNLCPFGEVFNATRFASVYAWNRKRISNCVADYSVLYNSASFSTFKCYGVSPTKLNDLCFTNVYADSFVIRGDEVRQIAPGQTGKIADYNYKLPDDFTGCVIAWNSNNLDSKVGGNYNYLYRLFRKSNLKPFERDISTEIYQAGSTPCNGVEGFNCYFPLQSYGFQPTNGVGYQPYRVVVLSFELLHAPATVCGPKKSTNLVKNKCVNFNFNGLTGTGVLTESNKKFLPFQQFGRDIADTTDAVRDPQTLEILDITPCSFGGVSVITPGTNTSNQVAVLYQDVNCTEVPVAIHADQLTPTWRVYSTGSNVFQTRAGCLIGAEHVNNSYECDIPIGAGICASYQTQTNSPRRARSVASQSIIAYTMSLGAENSVAYSNNSIAIPTNFTISVTTEILPVSMTKTSVDCTMYICGDSTECSNFLLQYGSFCTQLNRALTGIAVEQDKNTQEVFAQVKQIYKTPPIKDFGGFNFSQILPDPSKPSKRSFIEDLLFNKVTLADAGFIKQYGDCLGDIAARDLICAQKFNGLTVLPPLLTDEMIAQYCSALLAGTITSGWTFGAGAALQIPFAMQMAYRFNGIGVTQNVLYENQKLIANQFNSAIGKIQDSLSSTASALGKLQDVVNQNAQALNTLVKQLSSNFGAISSVLNDILSRLDKVEAEVQIDRLITGRLQSLQTYVTQQLIRAAEIRASANLAATKMSECVLGQSKRVDFCGKGYHLMSFPQCAPHGVVFLHVTYVPAQEKNFTTAPAICHDGKAHFPREGVFVSNGTHWFVTQRNFYEPQIITTDNTFVSGNCDVVIGIVNNTVYDPLQPELDS

SEQ ID NO: 3567 - protein, 1147 aa, Artificial Sequence
  SARS-CoV-2/Australia/QLD02/2020__EPI_ISL_407896 spike protein (1-1147)(T874C_S1055C)
MFVFLVLLPLVSSQCVNLTTRTQLPPAYTNSFTRGVYYPDKVFRSSVLHSTQDLFLPFFSNVTWFHAIHVSGTNGTKRFDNPVLPFNDGVYFASTEKSNIIRGWIFGTTLDSKTQSLLIVNNATNVVIKVCEFQFCNDPFLGVYYHKNNKSWMESEFRVYSSANNCTFEYVSQPFLMDLEGKQGNFKNLREFVFKNIDGYFKIYSKHTPINLVRDLPQGFSALEPLVDLPIGINITRFQTLLALHRSYLTPGDSSSGWTAGAAAYYVGYLQPRTFLLKYNENGTITDAVDCALDPLSETKCTLKSFTVEKGIYQTSNFRVQPTESIVRFPNITNLCPFGEVFNATRFASVYAWNRKRISNCVADYSVLYNSASFSTFKCYGVSPTKLNDLCFTNVYADSFVIRGDEVRQIAPGQTGKIADYNYKLPDDFTGCVIAWNSNNLDSKVGGNYNYLYRLFRKSNLKPFERDISTEIYQAGSTPCNGVEGFNCYFPLQSYGFQPTNGVGYQPYRVVVLSFELLHAPATVCGPKKSTNLVKNKCVNFNFNGLTGTGVLTESNKKFLPFQQFGRDIADTTDAVRDPQTLEILDITPCSFGGVSVITPGTNTSNQVAVLYQDVNCTEVPVAIHADQLTPTWRVYSTGSNVFQTRAGCLIGAEHVNNSYECDIPIGAGICASYQTQTNSPRRARSVASQSIIAYTMSLGAENSVAYSNNSIAIPTNFTISVTTEILPVSMTKTSVDCTMYICGDSTECSNLLLQYGSFCTQLNRALTGIAVEQDKNTQEVFAQVKQIYKTPPIKDFGGFNFSQILPDPSKPSKRSFIEDLLFNKVTLADAGFIKQYGDCLGDIAARDLICAQKFNGLTVLPPLLTDEMIAQYCSALLAGTITSGWTFGAGAALQIPFAMQMAYRFNGIGVTQNVLYENQKLIANQFNSAIGKIQDSLSSTASALGKLQDVVNQNAQALNTLVKQLSSNFGAISSVLNDILSRLDKVEAEVQIDRLITGRLQSLQTYVTQQLIRAAEIRASANLAATKMSECVLGQSKRVDFCGKGYHLMSFPQCAPHGVVFLHVTYVPAQEKNFTTAPAICHDGKAHFPREGVFVSNGTHWFVTQRNFYEPQIITTDNTFVSGNCDVVIGIVNNTVYDPLQLELDS

SEQ ID NO: 3568 - protein, 1147 aa, Artificial Sequence
  SARS-CoV-2/India/1-31/2020__EPI_ISL_413523 spike protein (1-1147)(T874C_S1055C)
MFVFLVLLPLVSSQCVNLTTRTQLPPAYTNSFTRGVYYPDKVFRSSVLHSTQDLFLPFFSNVTWFHAIHVSGTNGTKRFDNPVLPFNDGVYFASTEKSNIIRGWIFGTTLDSKTQSLLIVNNATNVVIKVCEFQFCNDPFLGVYYHKNNKSWMESEFRVYSSANNCTFEYVSQPFLMDLEGKQGNFKNLREFVFKNIDGYFKIYSKHTPINLVRDLPQGFSALEPLVDLPIGINITRFQTLLALHRSYLTPGDSSSGWTAGAAAYYVGYLQPRTFLLKYNENGTITDAVDCALDPLSETKCTLKSFTVEKGIYQTSNFRVQPTESIVRFPNITNLCPFGEVFNATRFASVYAWNRKRISNCVADYSVLYNSASFSTFKCYGVSPTKLNDLCFTNVYADSFVIRGDEVRQIAPGQTGKIADYNYKLPDDFTGCVIAWNSNNLDSKVGGNYNYLYRLFRKSNLKPFERDISTEIYQAGSTPCNGVEGFNCYFPLQSYGFQPTNGVGYQPYRVVVLSFELLHAPATVCGPKKSTNLVKNKCVNFNFNGLTGTGVLTESNKKFLPFQQFGRDIADTTDAVRDPQTLEILDITPCSFGGVSVITPGTNTSNQVAVLYQDVNCTEVPVAIHADQLTPTWRVYSTGSNVFQTRAGCLIGAEHVNNSYECDIPIGAGICASYQTQTNSPRRARSVASQSIIAYTMSLGAENSVAYSNNSIAIPTNFTISVTTEILPVSMTKTSVDCTMYICGDSTECSNLLLQYGSFCTQLNRALTGIAVEQDKNTQEVFAQVKQIYKTPPIKDFGGFNFSQILPDPSKPSKRSFIEDLLFNKVTLADAGFIKQYGDCLGDIAARDLICAQKFNGLTVLPPLLTDEMIAQYCSALLAGTITSGWTFGAGAALQIPFAMQMAYRFNGIGVTQNVLYENQKLIANQFNSVIGKIQDSLSSTASALGKLQDVVNQNAQALNTLVKQLSSNFGAISSVLNDILSRLDKVEAEVQIDRLITGRLQSLQTYVTQQLIRAAEIRASANLAATKMSECVLGQSKRVDFCGKGYHLMSFPQCAPHGVVFLHVTYVPAQEKNFTTAPAICHDGKAHFPREGVFVSNGTHWFVTQRNFYEPQIITTDNTFVSGNCDVVIGIVNNTVYDPLQPELDS

SEQ ID NO: 3569 - protein, 1147 aa, Artificial Sequence
  SARS-CoV-2/Guangdong/GD2020087-P0008/2020__EPI_ISL_413863 spike protein (1-1147)(T874C_S1055C)
MFVFLVLLPLVSSQCVNLTTRTQLPPAYTNSFTRGVYYPDKVFRSSVLHSTQDLFLPFFSNVTWFHAIHVSGTNGTKRFDNPVLPFNDGVYFASTEKSNIIRGWIFGTTLDSKTQSLLIVNNATNVVIKVCEFQFCNDPFLGVYYHKNNKSWMESEFRVYSSANNCTFEYVSQPFLMDLEGKQGNFKNLREFVFKNIDGYFKIYSKHTPINLVRDLPQGFSALEPLVDLPIGINITRFQTLLALHRSYLTPGDSSSGWTAGAAAYYVGYLQPRTFLLKYNENGTITDAVDCALDPLSETKCTLKSFTVEKGIYQTSNFRVQPTESIVRFPNITNLCPFGEVFNATRFASVYAWNRKRISNCVADYSVLYNSASFSTFKCYGVSPTKLNDLCFTNVYADSFVIRGDEVREIAPGQTGKIADYNYKLPDDFTGCVIAWNSNNLDSKVGGNYNYLYRLFRKSNLKPFERDISTEIYQAGSTPCNGVEGFNCYFPLQSYGFQPTNGVGYQPYRVVVLSFELLHAPATVCGPKKSTNLVKNKCVNFNFNGLTGTGVLTESNKKFLPFQQFGRDIADTTDAVRDPQTLEILDITPCSFGGVSVITPGTNTSNQVAVLYQDVNCTEVPVAIHADQLTPTWRVYSTGSNVFQTRAGCLIGAEHVNNSYECDIPIGAGICASYQTQTNSPRRARSVASQSIIAYTMSLGAENSVAYSNNSIAIPTNFTISVTTEILPVSMTKTSVDCTMYICGDSTECSNLLLQYGSFCTQLNRALTGIAVEQDKNTQEVFAQVKQIYKTPPIKDFGGFNFSQILPDPSKPSKRSFIEDLLFNKVTLADAGFIKQYGDCLGDIAARDLICAQKFNGLTVLPPLLTDEMIAQYCSALLAGTITSGWTFGAGAALQIPFAMQMAYRFNGIGVTQNVLYENQKLIANQFNSAIGKIQDSLSSTASALGKLQDVVNQNAQALNTLVKQLSSNFGAISSVLNDILSRLDKVEAEVQIDRLITGRLQSLQTYVTQQLIRAAEIRASANLAATKMSECVLGQSKRVDFCGKGYHLMSFPQCAPHGVVFLHVTYVPAQEKNFTTAPAICHDGKAHFPREGVFVSNGTHWFVTQRNFYEPQIITTDNTFVSGNCDVVIGIVNNTVYDPLQPELDS

SEQ ID NO: 3570 - protein, 1147 aa, Artificial Sequence
  SARS-CoV-2/Sweden/01/2020__EPI_ISL_411951 spike protein (1-1147)(T874C_S1055C)
MFVFLVLLPLVSSQCVNLTTRTQLPPAYTNSFTRGVYYPDKVFRSSVLHSTQDLFLPFFSNVTWFHAIHVSGTNGTKRFDNPVLPFNDGVYFASTEKSNIIRGWIFGTTLDSKTQSLLIVNNATNVVIKVCEFQFCNDPFLGVYYHKNNKSWMESEFRVYSSANNCTFEYVSQPFLMDLEGKQGNFKNLREFVFKNIDGYFKIYSKHTPINLVRDLPQGFSALEPLVDLPIGINITRFQTLLALHRSYLTPGDSSSGWTAGAAAYYVGYLQPRTFLLKYNENGTITDAVDCALDPLSETKCTLKSFTVEKGIYQTSNFRVQPTESIVRFPNITNLCPFGEVFNATRFASVYAWNRKRISNCVADYSVLYNSASFSTFKCYGVSPTKLNDLCFTNVYADSFVIRGDEVRQIAPGQTGKIADYNYKLPDDFTGCVIAWNSNNLDSKVGGNYNYLYRLFRKSNLKPFERDISTEIYQAGSTPCNGVEGFNCYFPLQSYGFQPTNGVGYQPYRVVVLSFELLHAPATVCGPKKSTNLVKNKCVNFNFNGLTGTGVLTESNKKFLPFQQFGRDIADTTDAVRDPQTLEILDITPCSFGGVSVITPGTNTSNQVAVLYQDVNCTEVPVAIHADQLTPTWRVYSTGSNVFQTRAGCLIGAEHVNNSYECDIPIGAGICASYQTQTNSPRRARSVASQSIIAYTMSLGAENSVAYSNNSIAIPTNFTISVTTEILPVSMTKTSVDCTMYICGDSTECSNLLLQYGSFCTQLNRALTGIAVEQDKNTQEVFAQVKQIYKTPPIKDCGGFNFSQILPDPSKPSKRSFIEDLLFNKVTLADAGFIKQYGDCLGDIAARDLICAQKFNGLTVLPPLLTDEMIAQYCSALLAGTITSGWTFGAGAALQIPFAMQMAYRFNGIGVTQNVLYENQKLIANQFNSAIGKIQDSLSSTASALGKLQDVVNQNAQALNTLVKQLSSNFGAISSVLNDILSRLDKVEAEVQIDRLITGRLQSLQTYVTQQLIRAAEIRASANLAATKMSECVLGQSKRVDFCGKGYHLMSFPQCAPHGVVFLHVTYVPAQEKNFTTAPAICHDGKAHFPREGVFVSNGTHWFVTQRNFYEPQIITTDNTFVSGNCDVVIGIVNNTVYDPLQPELDS

SEQ ID NO: 3571 - protein, 1147 aa, Artificial Sequence
  SARS-CoV-2/Tianmen/HBCDC-HB-07/2020__EPI_ISL_412983 spike protein (1-1147)(T874C_S1055C)
MFVFLVLLPLVSSQCVNLTTRTQLPPAYTNSFTRGVYYPDKVFRSSVLHSTQDLFLPFFSNVTWFHAIHVSGTNGTKRFDNPVLPFNDGVYFASTEKSNIIRGWIFGTTLDSKTQSLLIVNNATNVVIKVCEFQFCNDPFLGVYYHKNNKSWMESEFRVYSSANNCTFEYVSQPFLMDLEGKQGNFKNLREFVFKNIDGYFKIYSKHTPINLVRDLPQGFSALEPLVDLPIGINITRFQTLLALHRSYLTPGDSSSGWTAGAAAYYVGYLQPRTFLLKYNENGTITDAVDCALDPLSETKCTLKSFTVEKGIYQTSNFRVQPTESIVRFPNITNLCPFGEVFNATRFASVYAWNRKRISNCVADYSVLYNSASFSTFKCYGVSPTKLNDLCFTNVYADSFVIRGDEVRQIAPGQTGKIADYNYKLPDDFTGCVIAWNSNNLDSKVGGNYNYLYRLFRKSNLKPFERDISTEIYQAGSTPCNGVEGFNCYFPLQSYGFQPTNGVGYQPYRVVVLSFELLHAPATVCGPKKSTNLVKNKCVNFNFNGLTGTGVLTESNKKFLPFQQFGRDIADTTDAVRDPQTLEILDITPCSFGGVSVITPGTNTSNQVAVLYQDLNCTEVPVAIHADQLTPTWRVYSTGSNVFQTRAGCLIGAEHVNNSYECDIPIGAGICASYQTQTNSPRRARSVASQSIIAYTMSLGAENSVAYSNNSIAIPTNFTISVTTEILPVSMTKTSVDCTMYICGDSTECSNLLLQYGSFCTQLNRALTGIAVEQDKNTQEVFAQVKQIYKTPPIKDFGGFNFSQILPDPSKPSKRSFIEDLLFNKVTLADAGFIKQYGDCLGDIAARDLICAQKFNGLTVLPPLLTDEMIAQYCSALLAGTITSGWTFGAGAALQIPFAMQMAYRFNGIGVTQNVLYENQKLIANQFNSAIGKIQDSLSSTASALGKLQDVVNQNAQALNTLVKQLSSNFGAISSVLNDILSRLDKVEAEVQIDRLITGRLQSLQTYVTQQLIRAAEIRASANLAATKMSECVLGQSKRVDFCGKGYHLMSFPQCAPHGVVFLHVTYVPAQEKNFTTAPAICHDGKAHFPREGVFVSNGTHWFVTQRNFYEPQIITTDNTFVSGNCDVVIGIVNNTVYDPLQPELDS

SEQ ID NO: 3572 - protein, 1147 aa, Artificial Sequence
  SARS-CoV-2/Hong Kong/case42_VM20002493/2020__EPI_ISL_414527 spike protein (1-1147)(T874C_S1055C)
MFVFLVLLPLVSSQCVNLTTRTQLPPAYTNSFTRGVYYPDKVFRSSVLHSTQDLFLPFFSNVTWFHAIHVSGTNGTKRFDNPVLPFNDGVYFASTEKSNIIRGWIFGTTLDSKTQSLLIVNNATNVVIKVCEFQFCNDPFLGVYYHKNNKSWMESEFRVYSSANNCTFEYVSQPFLMDLEGKQGNFKNLREFVFKNIDGYFKIYSKHTPINLVRDLPQGFSALEPLVDLPIGINITRFQTLLALHRSYLTPGDSSSGWTAGAAAYYVGYLQPRTFLLKYNENGTITDAVDCALDPLSETKCTLKSFTVEKGIYQTSNFRVQPTESIVRFPNITNLCPFGEVFNATRFASVYAWNRKRISNCVADYSVLYNSASFSTFKCYGVSPTKLNDLCFTNVYADSFVIRGDEVRQIAPGQTGKIADYNYKLPDDFTGCVIAWNSNNLDSKVGGNYNYLYRLFRKSNLKPFERDISTEIYQAGSTPCNGVEGFNCYFPLQSYGFQPTNGVGYQPYRVVVLSFELLHAPATVCGPKKSTNLVKNKCVNFNFNGLTGTGVLTESNKKFLPFQQFGRDIADTTDAVRDPQTLEILDITPCSFGGVSVITPGTNTSNQVAVLYQDVNCTEVPVAIHADQLTPTWRVYSTGSNVFQTRAGCLIGAEHVNNSYECDIPIGAGICASYQTQTNSPRRARSVASQSIIAYTMSLGAENSVAYSNNSIAIPTNFAISVTTEILPVSMTKTSVDCTMYICGDSTECSNLLLQYGSFCTQLNRALTGIAVEQDKNTQEVFAQVKQIYKTPPIKDFGGFNFSQILPDPSKPSKRSFIEDLLFNKVTLADAGFIKQYGDCLGDIAARDLICAQKFNGLTVLPPLLTDEMIAQYCSALLAGTITSGWTFGAGAALQIPFAMQMAYRFNGIGVTQNVLYENQKLIANQFNSAIGKIQDSLSSTASALGKLQDVVNQNAQALNTLVKQLSSNFGAISSVLNDILSRLDKVEAEVQIDRLITGRLQSLQTYVTQQLIRAAEIRASANLAATKMSECVLGQSKRVDFCGKGYHLMSFPQCAPHGVVFLHVTYVPAQEKNFTTAPAICHDGKAHFPREGVFVSNGTHWFVTQRNFYEPQIITTDNTFVSGNCDVVIGIVNNTVYDPLQPELDS

SEQ ID NO: 3573 - protein, 1147 aa, Artificial Sequence
  SARS-CoV-2/USA/CruiseA-23/2020__EPI_ISL_414482 spike protein (1-1147)(T874C_S1055C)
MFVFLVLLPLVSSQCVNLTTRTQLPPAYTNSFTRGVYYPDKVFRSSVLHSTQDLFLPFFSNVTWFHAIHVSGTNGTKRFDNPVLPFNDGVYFASTEKSNIIRGWIFGTTLDSKTQSLLIVNNATNVVIKVCEFQFCNDPFLGVYYHKNNKSWMESEFRVYSSANNCTFEYVSQPFLMDLEVKQGNFKNLREFVFKNIDGYFKIYSKHTPINLVRDLPQGFSALEPLVDLPIGINITRFQTLLALHRSYLTPGDSSSGWTAGAAAYYVGYLQPRTFLLKYNENGTITDAVDCALDPLSETKCTLKSFTVEKGIYQTSNFRVQPTESIVRFPNITNLCPFGEVFNATRFASVYAWNRKRISNCVADYSVLYNSASFSTFKCYGVSPTKLNDLCFTNVYADSFVIRGDEVRQIAPGQTGKIADYNYKLPDDFTGCVIAWNSNNLDSKVGGNYNYLYRLFRKSNLKPFERDISTEIYQAGSTPCNGVEGFNCYFPLQSYGFQPTNGVGYQPYRVVVLSFELLHAPATVCGPKKSTNLVKNKCVNFNFNGLTGTGVLTESNKKFLPFQQFGRDIADTTDAVRDPQTLEILDITPCSFGGVSVITPGTNTSNQVAVLYQDVNCTEVPVAIHADQLTPTWRVYSTGSNVFQTRAGCLIGAEHVNNSYECDIPIGAGICASYQTQTNSPRRARSVASQSIIAYTMSLGAENSVAYSNNSIAIPTNFTISVTTEILPVSMTKTSVDCTMYICGDSTECSNLLLQYGSFCTQLNRALTGIAVEQDKNTQEVFAQVKQIYKTPPIKDFGGFNFSQILPDPSKPSKRSFIEDLLFNKVTLADAGFIKQYGDCLGDIAARDLICAQKFNGLTVLPPLLTDEMIAQYCSALLAGTITSGWTFGAGAALQIPFAMQMAYRFNGIGVTQNVLYENQKLIANQFNSAIGKIQDSLSSTASALGKLQDVVNQNAQALNTLVKQLSSNFGAISSVLNDILSRLDKVEAEVQIDRLITGRLQSLQTYVTQQLIRAAEIRASANLAATKMSECVLGQSKRVDFCGKGYHLMSFPQCAPHGVVFLHVTYVPAQEKNFTTAPAICHDGKAHFPREGVFVSNGTHWFVTQRNFYEPQIITTDNTFVSGNCDVVIGIVNNTVYDPLQPELDS

SEQ ID NO: 3574 - protein, 1147 aa, Artificial Sequence
  SARS-CoV-2/Hong Kong/case85_VM20002868/2020__EPI_ISL_414519 spike protein (1-1147)(T874C_S1055C)
MFVFLVLVPLVSSQCVNLTTRTQLPPAYTNSFTRGVYYPDKVFRSSVLHSTQDLFLPFFSNVTWFHAIHVSGTNGTKRFDNPVLPFNDGVYFASTEKSNIIRGWIFGTTLDSKTQSLLIVNNATNVVIKVCEFQFCNDPFLGVYYHKNNKSWMESEFRVYSSANNCTFEYVSQPFLMDLEGKQGNFKNLREFVFKNIDGYFKIYSKHTPINLVRDLPQGFSALEPLVDLPIGINITRFQTLLALHRSYLTPGDSSSGWTAGAAAYYVGYLQPRTFLLKYNENGTITDAVDCALDPLSETKCTLKSFTVEKGIYQTSNFRVQPTESIVRFPNITNLCPFGEVFNATRFASVYAWNRKRISNCVADYSVLYNSASFSTFKCYGVSPTKLNDLCFTNVYADSFVIRGDEVRQIAPGQTGKIADYNYKLPDDFTGCVIAWNSNNLDSKVGGNYNYLYRLFRKSNLKPFERDISTEIYQAGSTPCNGVEGFNCYFPLQSYGFQPTNGVGYQPYRVVVLSFELLHAPATVCGPKKSTNLVKNKCVNFNFNGLTGTGVLTESNKKFLPFQQFGRDIADTTDAVRDPQTLEILDITPCSFGGVSVITPGTNTSNQVAVLYQDVNCTEVPVAIHADQLTPTWRVYSTGSNVFQTRAGCLIGAEHVNNSYECDIPIGAGICASYQTQTNSPRRARSVASQSIIAYTMSLGAENSVAYSNNSIAIPTNFTISVTTEILPVSMTKTSVDCTMYICGDSTECSNLLLQYGSFCTQLNRALTGIAVEQDKNTQEVFAQVKQIYKTPPIKDFGGFNFSQILPDPSKPSKRSFIEDLLFNKVTLADAGFIKQYGDCLGDIAARDLICAQKFNGLTVLPPLLTDEMIAQYCSALLAGTITSGWTFGAGAALQIPFAMQMAYRFNGIGVTQNVLYENQKLIANQFNSAIGKIQDSLSSTASALGKLQDVVNQNAQALNTLVKQLSSNFGAISSVLNDILSRLDKVEAEVQIDRLITGRLQSLQTYVTQQLIRAAEIRASANLAATKMSECVLGQSKRVDFCGKGYHLMSFPQCAPHGVVFLHVTYVPAQEKNFTTAPAICHDGKAHFPREGVFVSNGTHWFVTQRNFYEPQIITTDNTFVSGNCDVVIGIVNNTVYDPLQPELDS

SEQ ID NO: 3575 - protein, 1147 aa, Artificial Sequence; identical to SEQ ID NO: 3565
  SARS-CoV-2/England/200990660/2020__EPI_ISL_414523 spike protein (1-1147)(T874C_S1055C)

SEQ ID NO: 3576 - protein, 1147 aa, Artificial Sequence
  SARS-CoV-2/Australia/NSW09/2020__EPI_ISL_413595 spike protein (1-1147)(T874C_S1055C)
MFVFLVLLPLVSSQCVNLTTRTQLPPAYTNSFTRGVYYPDKVFRSSVLHSTQDLFLPFFSNVTWFHAIHVSGTNGTKRFDNPVLPFNDGVYFASTEKSNIIRGWIFGTTLDSKTQSLLIVNNATNVVIKVCEFQFCNDPFLGVYYHKNNKSWMESEFRVYSSANNCTFEYVSQPFLMDLEGKQGNFKNLREFVFKNIDGYFKIYSKHTPINLVRDLPQGFSALEPLVDLPIGINITRFQTLLALHRSYLTPGDSSSGWTAGAAAYYVGYLQPRTFLLKYNENGTITDAVDCALDPLSETKCTLKSFTVEKGIYQTSNFRVQPTESIVRFPNITNLCPFGEVFNATRFASVYAWNRKRISNCVADYSVLYNSASFSTFKCYGVSPTKLNDLCFTNVYADSFVIRGDEVRQIAPGQTGKIADYNYKLPDDFTGCVIAWNSNNLDSKVGGNYNYLYRLFRKSNLKPFERDISTEIYQAGSTPCNGVEGFNCYFPLQSYGFQPTNGVGYQPYRVVVLSFELLHAPATVCGPKKSTNLVKNKCVNFNFNGLTGTGVLTESNKKFLPFQQFGRDIADTTDAVRDPQTLEILDITPCSFGGVSVITPGTNTSNQVAVLYQDVNCTEVPVAIHADQLTPTWRVYSTGSNVFQTRAGCLIGAEHVNNSYECDIPIGAGICASYQTQTNSPRRARSVASQSIIAYTMSLGAENSVAYSNNSIAIPTNFTISVTTEILPVSMTKTSVDCTMYICGDSTECSNLLLQYGSFCTQLNRALTGIAVEQDKNTQEVFAQVKQIYKTPPIKDFGGFNFSQILPDPSKPSKRSFIEDLLFNKVTLADAGFIKQYGDCLGDIAARDLICAQKFNGLTVLPPLLTDEMIAQYCSALLAGTITSGWTFGAGAALQIPFAMQMAYRFNGIGVTQNVLYENQKLIANQFNSAIGKIQDSLSFTASALGKLQDVVNQNAQALNTLVKQLSSNFGAISSVLNDILSRLDKVEAEVQIDRLITGRLQSLQTYVTQQLIRAAEIRASANLAATKMSECVLGQSKRVDFCGKGYHLMSFPQCAPHGVVFLHVTYVPAQEKNFTTAPAICHDGKAHFPREGVFVSNGTHWFVTQRNFYEPQIITTDNTFVSGNCDVVIGIVNNTVYDPLQPELDS

SEQ ID NO: 3577 - protein, 1147 aa, Artificial Sequence; identical to SEQ ID NO: 3557
  SARS-CoV-2/Australia/NSW10/2020__EPI_ISL_413596 spike protein (1-1147)(T874C_S1055C)

SEQ ID NO: 3578 - protein, 1147 aa, Artificial Sequence
  SARS-CoV-2/Switzerland/1000477797/2020__EPI_ISL_413023 spike protein (1-1147)(T874C_S1055C)
MFVFLVLLPLVSSQCVNLTTRTQLPPAYTNSFTRGVYYPDKVFRSSVLHSTQDLFLPFFSNVTWFHAIHVSGTNGTKRFDNPVLPFNDGVYFASTEKSNIIRGWIFGTTLDSKTQSLLIVNNATNVVIKVCEFQFCNDPFLGVYYHKNNKSWMESEFRVYSSANNCTFEYVSQPFLMDLEGKQGNFKNLREFVFKNIDGYFNIYSKHTPINLVRDLPQGFSALEPLVDLPIGINITRFQTLLALHRSYLTPGDSSSGWTAGAAAYYVGYLQPRTFLLKYNENGTITDAVDCALDPLSETKCTLKSFTVEKGIYQTSNFRVQPTESIVRFPNITNLCPFGEVFNATRFASVYAWNRKRISNCVADYSVLYNSASFSTFKCYGVSPTKLNDLCFTNVYADSFVIRGDEVRQIAPGQTGKIADYNYKLPDDFTGCVIAWNSNNLDSKVGGNYNYLYRLFRKSNLKPFERDISTEIYQAGSTPCNGVEGFNCYFPLQSYGFQPTNGVGYQPYRVVVLSFELLHAPATVCGPKKSTNLVKNKCVNFNFNGLTGTGVLTESNKKFLPFQQFGRDIADTTDAVRDPQTLEILDITPCSFGGVSVITPGTNTSNQVAVLYQGVNCTEVPVAIHADQLTPTWRVYSTGSNVFQTRAGCLIGAEHVNNSYECDIPIGAGICASYQTQTNSPRRARSVASQSIIAYTMSLGAENSVAYSNNSIAIPTNFTISVTTEILPVSMTKTSVDCTMYICGDSTECSNLLLQYGSFCTQLNRALTGIAVEQDKNTQEVFAQVKQIYKTPPIKDFGGFNFSQILPDPSKPSKRSFIEDLLFNKVTLADAGFIKQYGDCLGDIAARDLICAQKFNGLTVLPPLLTDEMIAQYCSALLAGTITSGWTFGAGAALQIPFAMQMAYRFNGIGVTQNVLYENQKLIANQFNSAIGKIQDSLSSTASALGKLQDVVNQNAQALNTLVKQLSSNFGAISSVLNDILSRLDKVEAEVQIDRLITGRLQSLQTYVTQQLIRAAEIRASANLAATKMSECVLGQSKRVDFCGKGYHLMSFPQCAPHGVVFLHVTYVPAQEKNFTTAPAICHDGKAHFPREGVFVSNGTHWFVTQRNFYEPQIITTDNTFVSGNCDVVIGIVNNTVYDPLQPELDS

SEQ ID NO: 3579 - protein, 1147 aa, Artificial Sequence
  SARS-CoV-2/Belgium/BA-02291/2020__EPI_ISL_415159 spike protein (1-1147)(T874C_S1055C)
MFVFLVLLPLVSSQCVNLTTRTQLPPAYTNSFTRGVYYPDKVFRSSVLHSTQDLFLPFFSNVTWFHAIHVSGTNGTKRFDNPVLPFNDGVYFASTEKSNIIRGWIFGTTLDSKTQSLLIVNNATNVVIKVCEFQFCNDPFLGVYYHKNNKSWMESEFRVYSSANNCTFEYVSQPFLMDLEGKQGNFKNLREFVFKNIDGYFKIYSKHTPINLVRDLPQGFSALEPLVDLPIGINITRFQTLLALHRSYLTPGDSSSGWTAGAAAYYVGYLQPRTFLLKYNENGTITDAVDCALDPLSETKCTLKSFTVEKGIYQTSNFRVQPTESIVRFPNITNLCPFGEVFNATRFASVYAWNRKRISNCVADYSVLYNSASFSTFKCYGVSPTKLNDLCFTNVYADSFVIRGDEVRQIAPGQTGKIADYNYKLPDDFTGCVIAWNSNNLDSKVGGNYNYLYRLFRRSNLKPFERDISTEIYQAGSTPCNGVEGFNCYFPLQSYGFQPTNGVGYQPYRVVVLSFELLPAPATVCGPKKSTNLVKNKCVNFNFNGLTGTGVLTESNKKFLPFQQFGRDIADTTDAVRDPQTLEILDITPCSFGGVSVITPGTNTSNQVAVLYQGVNCTEVPVAIHADQLTPTWRVYSTGSNVFQTRAGCLIGAEHVNNSYECDIPIGAGICASYQTQTNSPRRARSVASQSIIAYTMSLGAENSVAYSNNSIAIPTNFTISVTTEILPVSMTKTSVDCTMYICGDSTECSNLLLQYGSFCTQLNRALTGIAVEQDKNTQEVFAQVKQIYKTPPIKDFGGFNFSQILPDPSKPSKRSFIEDLLFNKVTLADAGFIKQYGDCLGDIAARDLICAQKFNGLTVLPPLLTDEMIAQYCSALLAGTITSGWTFGAGAALQIPFAMQMAYRFNGIGVTQNVLYENQKLIANQFNSAIGKIQDSLSSAAPALGKLQDVVNQNAQALNTLVKQLSSNFGAISSVLNDILSRLDKVEAEVQIDRLITGRLQSLQTYVTQQLIRAAEIRASANLAATKMSECVLGQSKRVDFCGKGYHLMSFPQCAPHGVVFLHVTYVPAQEKNFTTAPAICHDGKAHFPREGVFVSNGTHWFVTQRNFYEPQIITTDNTFVSGNCDVVIGIVNNTVYDPLQPELDS

SEQ ID NO: 3580 - protein, 1147 aa, Artificial Sequence
  SARS-CoV-2/USA/WA8-UW5/2020__EPI_ISL_413486 spike protein (1-1147)(T874C_S1055C)
MFVFLVLLPLVSSQCVNLTTRTQLPPAYTNSFTRGVYYPDKVFRSSVLHSTQDLFLPFFSNVTWFHAIHVSGTNGTKRFDNPVLPFNDGVYFASTEKSNIIRGWIFGTTLDSKTQSLLIVNNATNVVIKVCEFQFCNDPFLGVYYHKNNKSWMESEFRVYSSANNCTFEYVSQPFLMDLEGKQGNFKNLREFVFKNIDGYFKIYSKHTPINLVRDLPQGFSALEPLVDLPIGINITRFQTLLALHRSYLTPGDSSSGWTAGAAAYYVGYLQPRTFLLKYNENGTITDAVDCALDPLSETKCTLKSFTVEKGIYQTSNFRVQPTESIVRFPNITNLCPFGEVFNATRFASVYAWNRKRISNCVADYSVLYNSASFSTFKCYGVSPTKLNDLCFTNVYADSFVIRGDEVRQIAPGQTGKIADYNYKLPDDFTGCVIAWNSNNLDSKVGGNYNYLYRLFRKSNLKPFERDISTEIYQAGSTPCNGVEGFNCYFPLQSYGFQPTNGVGYQPYRVVVLSFELLHAPATVCGPKKSTNLVKNKCVNFNFNGLTGTGVLTESNKKFLPFQQFGRDIADTTDAVRDPQTLEILDITPCSFGGVSVITPGTNTSNQVAVLYQDVNCTEVPVAIHADQLTPTWRVYSTGSNVFQTRAGCLIGAEYVNNSYECDIPIGAGICASYQTQTNSPRRARSVASQSIIAYTMSLGAENSVAYSNNSIAIPTNFTISVTTEILPVSMTKTSVDCTMYICGDSTECSNLLLQYGSFCTQLNRALTGIAVEQDKNTQEVFAQVKQIYKTPPIKDFGGFNFSQILPDPSKPSKRSFIEDLLFNKVTLADAGFIKQYGDCLGDIAARDLICAQKFNGLTVLPPLLTDEMIAQYCSALLAGTITSGWTFGAGAALQIPFAMQMAYRFNGIGVTQNVLYENQKLIANQFNSAIGKIQDSLSSTASALGKLQDVVNQNAQALNTLVKQLSSNFGAISSVLNDILSRLDKVEAEVQIDRLITGRLQSLQTYVTQQLIRAAEIRASANLAATKMSECVLGQSKRVDFCGKGYHLMSFPQCAPHGVVFLHVTYVPAQEKNFTTAPAICHDGKAHFPREGVFVSNGTHWFVTQRNFYEPQIITTDNTFVSGNCDVVIGIVNNTVYDPLQPELDS

SEQ ID NO: 3581 - protein, 1147 aa, Artificial Sequence
  SARS-CoV-2/England/20102000506/2020__EPI_ISL_415147 spike protein (1-1147)(T874C_S1055C)
MFVFLVLLPLVSSQCVNLTTRTQLPPAYTNSFTRGVYYPDKVFRSSVLHSTQDLFLPFFSNVTWFHAIHVSGTNGTKRFDNPVLPFNDGVYFASTEKSNIIRGWIFGTTLDSKTQSLLIVNNATNVVIKVCEFQFCNDPFLGVYYHKNNKSWMESEFRVYSSANNCTFEYVSQPFLMDLEGKQGNFKNLREFVFKNIDGYFKIYSKHTPINLVRDLPQGFSALEPLVDLPIGINITRFQTLLALHRSYLTPGDSSSGWTAGAAAYYVGYLQPRTFLLKYNENGTITDAVDCALDPLSETKCTLKSFTVEKGIYQTSNFRVQPTESIVRFPNITNLCPFGEVFNATRFASVYAWNRKRISNCVADYSVLYNSASFSTFKCYGVSPTKLNDLCFTNVYADSFVIRGDEVRQIAPGQTGKIADYNYKLPDDFTGCVIAWNSNNLDSKVGGNYNYLYRLFRKSNLKPFERDISTEIYQAGSTPCNGVEGFNCYFPLQSYGFQPTNGVGYQPYRVVVLSFELLHAPATVCGPKKSTNLVKNKCVNFNFNGLTGTGVLTESNKKFLPFQQFGRDIADTTDAVRDPQTLEILDITPCSFGGVSVITPGTNTSNQVAVLYQGVNCTEVPVAIHADQLTPTWRVYSTGSNVFQTRAGCLIGAEHVNNSYECDIPIGAGICASYQTQTNSPRRARSVASQSIIAYTMSLGAENSVAYSNNSIAIPTNFTISVTTEILPVSMTKTSVDCTMYICGDSTECSNLLLQYGSFCTQLNRALTGIAVEQDKNTQEVFAQVKQIYKTPPIKDFGGFNFSQILPDPSKPSKRSFIEDLLFNKVTLADAGFIKQYGYCLGDIAARDLICAQKFNGLTVLPPLLTDEMIAQYCSALLAGTITSGWTFGAGAALQIPFAMQMAYRFNGIGVTQNVLYENQKLIANQFNSAIGKIQDSLSSTASALGKLQDVVNQNAQALNTLVKQLSSNFGAISSVLNDILSRLDKVEAEVQIDRLITGRLQSLQTYVTQQLIRAAEIRASANLAATKMSECVLGQSKRVDFCGKGYHLMSFPQCAPHGVVFLHVTYVPAQEKNFTTAPAICHDGKAHFPREGVFVSNGTHWFVTQRNFYEPQIITTDNTFVSGNCDVVIGIVNNTVYDPLQPELDS

SEQ ID NO: 3582 - protein, 1147 aa, Artificial Sequence
  SARS-CoV-2/Belgium/VAG-03013/2020__EPI_ISL_415155 spike protein (1-1147)(T874C_S1055C)
MFVFLVLLPLVSSQCVNLTTRTQLPPAYTNSFTRGVYYPDKVFRSSVLHSTQDLFLPFFSNVTWFHAIHVSGTNGTKRFDNPVLPFNDGVYFASTEKSNIIRGWIFGTTLDSKTQSLLIVNNATNVVIKVCEFQFCNDPFLGVYYHKNNKSWMESEFRVYSSANNCTFEYVSQPFLMDLEGKQGNFKNLREFVFKNIDGYFKIYSKHTPINLVRDLPQGFSALEPLVDLPIGINITRFQTLLALHRSYLTPGDSSSGWTAGAAAYYVGYLQPRTFLLKYNENGTITDAVDCALDPLSETKCTLKSFTVEKGIYQTSNFRVQPTESIVRFPNITNLCPFGEVFNATRFASVYAWNRKRISNCVADYSVLYNSASFSTFKCYGVSPTKLNDLCFTNVYADSFVIRGDEVRQIAPGQTGKIADYNYKLPDDFTGCVIAWNSNNLDSKVGGNYNYLYRLFRKSNLKPFERDISTEIYQAGSTPCNGVEGFNCYFPLQSYGFQPTNGVGYQPYRVVVLSFELLHAPATVCGPKKSTNLVKNKCVNFNFNGLTGTGVLTESNKKFLPFQQFGRDIADTTDAVRDPQTLEILDITPCSFGGVSVITPGTNTSNQVAVLYQGVNCTEVPVAIHADQLTPTWRVYSTGSNVFQTRAGCLIGAEHVNNSYECDIPIGAGICASYQTQTNSPRRARSVASQSIIAYTMSLGAENSVAYSNNSIAIPTNFTISVTTEILPVSMTKTSVDCTMYICGDSTECSNLLLQYGSFCTQLNRALTGIAVEQDKNTQEVFAQVKQIYKTPPIKDFGGFNFSQILPDPSKPSKRSFIEDLLFNKVTLADAGFIKQYGDCLGDIAARDLICAQKFNGLTVLPPLLTDEMIAQYCSALLAGTITSGWTFGAGAALQIPFAMQMAYRFNGIGVTQNVLYENQKLIANQFNSAIGKIQDSLSSTATALGKLQDVVNQNAQALNTLVKQLSSNFGAISSVLNDILSRLDKVEAEVQIDRLITGRLQSLQTYVTQQLIRAAEIRASANLAATKMSECVLGQSKRVDFCGKGYHLMSFPQCAPHGVVFLHVTYVPAQEKNFTTAPAICHDGKAHFPREGVFVSNGTHWFVTQRNFYEPQIITTDNTFVSGNCDVVIGIVNNTVYDPLQPELDS

SEQ ID NO: 3583 - protein, 1147 aa, Artificial Sequence
  SARS-CoV-2/Belgium/BC-03016/2020__EPI_ISL_415157 spike protein (1-1147)(T874C_S1055C)
MFVFLVLLPLVSSQCVNLTTRTQLPPAYTNSFTRGVYYPDKVFRSSVLHSTQDLFLPFFSNVTWFHAIHVSGTNGTKRFDNPVLPFNDGVYFASTEKSNIIRGWIFGTTLDSKTQSLLIVNNATNVVIKVCEFQFCNDPFLGVYYHKNNKSWMESEFRVYSSANNCTFEYVSQPFLMDLEGKQGNFKNLREFVFKNIDGYFKIYSKHTPINLVRDLPQGFSALEPLVDLPIGINITRFQTLLALHRSYLTPGDSSSGWTAGAAAYYVGYLQPRTFLLKYNENGTITDAVDCALDPLSETKCTLKSFTVEKGIYQTSNFRVQPTESIVRFPNITNLCPFGEVFNATRFASVYAWNRKRISNCVADYSVLYNSASFSTFKCYGVSPTKLNDLCFTNVYADSFVIRGDEVRQIAPGQTGKIADYNYKLPDDFTGCVIAWNSNNLDSKVGGNYNYLYRLFRKSNLKPFERDISTEIYQAGSTPCNGVEGFNCYFPLQSYGFQPTNGVGYQPYRVVVLSFELLHAPATVCGPKKSTNLVKNKCVNFNFNGLTGTGVLTESNKKFLPFQQFGRDIADTTDAVRDPQTLEILDITPCSFGGVSVITPGTNTSNQVAVLYQGVNCTEVPVAIHADQLTPTWRVYSTGSNVFQTRAGCLIGAEHVNNSYECDIPIGAGICASYQTQTNSPRRARSVASQSIIAYTMSLGAENSVAYSNNSIAIPTNFTISVTTEILPVSMTKTSVDCTMYICGDSTECSNLLLQYGSFCTQLNRALTGIAVEQDKNTQEVFAQVKQIYKTPPIKDFGGFNFSQILPDPSKPSKRSFIEDLLFNKVTLADAGFIKQYGDCLGDIAARDLICAQKFNGLTVLPPLLTDEMIAQYCSALLAGTITSGWTFGAGAALQIPFAMQMAYRFNGIGVTQNVLYENQKLIANQFNSAIGKIQDSLSSTAPALGKLQDVVNQNAQALNTLVKQLSSNFGAISSVLNDILSRLDKVEAEVQIDRLITGRLQSLQTYVTQQLIRAAEIRASANLAATKMSECVLGQSKRVDFCGKGYHLMSFPQCAPHGVVFLHVTYVPAQEKNFTTAPAICHDGKAHFPREGVFVSNGTHWFVTQRNFYEPQIITTDNTFVSGNCDVVIGIVNNTVYDPLQPELDS

SEQ ID NO: 3584 - protein, 1147 aa, Artificial Sequence
  SARS-CoV-2/Germany/BavPat3/2020__EPI_ISL_414521 spike protein (1-1147)(T874C_S1055C)
MFVFLVLLPLVSSQCVNLTTRTQLPPAYTNSFTRGVYYPDKVFRSSVLHSTQDLFLPFFSNVTWFHAIHVSGTNGTKRFDNPVLPFNDGVYFASTEKSNIIRGWIFGTTLDSKTQSLLIVNNATNVVIKVCEFQFCNDPFLGVYYHKNNKSWMESEFRVYSSANNCTFEYVSQPFLMDLEGKQGNFKNLREFVFKNIDGYFKIYSKHTPINLVRDLPQGFSALEPLVDLPIGINITRFQTLLALHRSYLTPGDSSSGWTAGAAAYYVGYLQPRTFLLKYNENGTITDAVDCALDPLSETKCTLKSFTVEKGIYQTSNFRVQPTESIVRFPNITNLCPFGEVFNATRFASVYAWNRKRISNCVADYSVLYNSASFSTFKCYGVSPTKLNDLCFTNVYADSFVIRGDEVRQIAPGQTGKIADYNYKLPDDFTGCVIAWNSNNLDSKVGGNYNYLYRLFRKSNLKPFERDISTEIYQAGSTPCNGVEGFNCYFPLQSYGFQPTNGVGYQPYRVVVLSFELLHAPATVCGPKKSTNLVKNKCVNFNFNGLTGTGVLTESNKKFLPFQQFGRDIADTTDAVRDPQTLEILDITPCSFGGVSVITPGTNTSNQVAVLYQDVNCTEVPVAIHADQLTPTWRVYSTGSNVFQTRAGCLIGAEHVNNSYECDIPIGAGICASYQTQTNSPRRARSVASQSIIAYTMSLGAENSVAYSNNSIAIPTNFTISVTTEILPVSMTKTSVDCTMYICGDSTECSNLLLQYGSFCTQLNRALTGIAVEQDKNTQQVFAQVKQIYKTPPIKDFGGFNFSQILPDPSKPSKRSFIEDLLFNKVTLADAGFIKQYGDCLGDIAARDLICAQKFNGLTVLPPLLTDEMIAQYCSALLAGTITSGWTFGAGAALQIPFAMQMAYRFNGIGVTQNVLYENQKLIANQFNSAIGKIQDSLSSTASALGKLQDVVNQNAQALNTLVKQLSSNFGAISSVLNDILSRLDKVEAEVQIDRLITGRLQSLQTYVTQQLIRAAEIRASANLAATKMSECVLGQSKRVDFCGKGYHLMSFPQCAPHGVVFLHVTYVPAQEKNFTTAPAICHDGKAHFPREGVFVSNGTHWFVTQRNFYEPQIITTDNTFVSGNCDVVIGIVNNTVYDPLQPELDS

SEQ ID NO: 3585 - protein, 1147 aa, Artificial Sequence
  SARS-CoV-2/France/HF1805/2020__EPI_ISL_414628 spike protein (1-1147)(T874C_S1055C)
MFVFLVLLPLVSSQCVNLTTRTQLPPAYTNSFTRGVYYPDKVFRSSVLHSTQDLFLPFFSNVTWFHAIHVSGTNGTKRFDNPVLPFNDGVYFASTEKSNIIRGWIFGTTLDSKTQSLLIVNNATNVVIKVCEFQFCNDPFLGVYYHKNNKSWMESEFRVYSSANNCTFEYVSQPFLMDLEGKQGNFKNLREFVFKNIDGYFKIYSKHTPINLVRDLPQGFSALEPLVDLPIGINITRFQTLLALHRSYLTPGDSSSGWTAGAAAYYVGYLQPRTFLLKYNENGTITDAVDCALDPLSETKCTLKSFTVEKGIYQTSNFRVQPTESIVRFPNITNLCPFGEVFNATRFASVYAWNRKRISNCVADYSVLYNSASFSTFKCYGVSPTKLNDLCFTNVYADSFVIRGDEVRQIAPGQTGKIADYNYKLPDDFTGCVIAWNSNNLDSKVGGNYNYLYRLFRKSNLKPFERDISTEIYQAGSTPCNGVEGFNCYFPLQSYGFQPTNGVGYQPYRVVVLSFELLHAPATVCGPKKSTNLVKNKCVNFNFNGLTGTGVLTESNKKFLPFQQFGRDIADTTDAVRDPQTLEILDITPCSFGGVSVITPGTNTSNQVAVLYQGVNCTEVPVAIHADQLTPTWRVYSTGSNVFQTRAGCLIGAEHVNNSYECDIPIGAGICASYQTQTNSPRRARSVASQSIIAYTMSLGAENSVAYSNNSIAIPTNFTISVTTEILPVSMTKTSVDCTMYICGDSTECSNLLLQYGSFCTQLNRALTGIAVEQDKNTQEVFAQVKQIYKTPPIKDFGGFNFSQILPDPSKPSKRSFIEDLLFNKVTLADAGFIKQYGDCLGDIAARDLICAQKFNGLTVLPPLLTDEMIAQYCSALLAGTITSGWTFGAGAALQIPFAMQMAYRFNGIGVTQNVLYENQKLIANQFNSAIGKIQDSLSSTASALGKLQDVVNQNAQALNTLVKQLSSNFGAISSVLNDILSRLDKVEAEVQIDRLITGRLQSLQTYVTQQLIRAAEIRASANLAATKMSECVLGQSKRVDFCGKGYHLMSFPQCAPHGVVFLHVTYVPAQEKNFTTAPAICHDGKAHFPREGVFVSNGTHWFVTQRNFYEPQIITTDNTFVSGNCDVVIGVVNNTVYDPLQPELDS

SEQ ID NO: 3586 - protein, 1147 aa, Artificial Sequence
  SARS-CoV-2/Netherlands/ZuidHolland_9/2020__EPI_ISL_414445 spike protein (1-1147)(T874C_S1055C)
MFVFLVLLPLVSSQCVNLTTRTQLPPAYTNSFTRGVYYPDKVFRSSVLHSTQDLFLPFFSNVTWFHAIHVSGTNGTKRFDNPVLPFNDGVYFASTEKSNIIRGWIFGTTLDSKTQSLLIVNNATNVVIKVCEFQFCNDPFLGVYYHKNNKSWMESEFRVYSSANNCTFEYVSQPFLMDLEGKQGNFKNLREFVFKNIDGYFKIYSKHTPINLVRDLPQGFSALEPLVDLPIGINITRFQTLLALHRSYLTPGDSSSGWTAGAAAYYVGYLQPRTFLLKYNENGTITDAVDCALDPLSETKCTLKSFTVEKGIYQTSNFRVQPTESIVRFPNITNLCPFGEVFNATRFASVYAWNRKRISNCVADYSVLYNSASFSTFKCYGVSPTKLNDLCFTNVYADSFVIRGDEVRQIAPGQTGKIADYNYKLPDDFTGCVIAWNSNNLDSKVGGNYNYLYRLFRKSNLKPFERDISTEIYQAGSTPCNGVEGFNCYFPLQSYGFQPTNGVGYQPYRVVVLSFELLHAPATVCGPKKSTNLVKNKCVNFNFNGLTGTGVLTESNKKFLPFQQFGRDIADTTDAVRDPQTLEILDITPCSFGGVSVITPGTNTSNQVAVLYQGVNCTEVPVAIHADQLTPTWRVYSTGSNVFQTRAGCLIGAEHVNNSYECDIPIGAGICASYQTQTNSPRRARSVASQSIIAYTMSLGAENSVAYSNNSIAIPTNFTISVTTEILPVSMTKTSVDCTMYICGDSTECSNLLLQYGSFCTQLNRALTGIAVEQDKNTQEVFAQVKQIYKTPPIKDFGGFNFSQILPDPSKPSKRSFIEDLLFNKVTLADAGFIKQYGDCLGDIAARDLICVQKFNGLTVLPPLLTDEMIAQYCSALLAGTITSGWTFGAGAALQIPFAMQMAYRFNGIGVTQNVLYENQKLIANQFNSAIGKIQDSLSSTASALGKLQDVVNQNAQALNTLVKQLSSNFGAISSVLNDILSRLDKVEAEVQIDRLITGRLQSLQTYVTQQLIRAAEIRASANLAATKMSECVLGQSKRVDFCGKGYHLMSFPQCAPHGVVFLHVTYVPAQEKNFTTAPAICHDGKAHFPREGVFVSNGTHWFVTQRNFYEPQIITTDNTFVSGNCDVVIGIVNNTVYDPLQPELDS

SEQ ID NO: 3587 - protein, 1147 aa, Artificial Sequence
  SARS-CoV-2/Finland/FIN03032020A/2020__EPI_ISL_413602 spike protein (1-1147)(T874C_S1055C)
MFVFLVLLPLVSSQCVNLTTRTQLPPAYTNSFTRGVYYPDKVFRSSVLHSTQDLFLPFFSNVTWFHAIHVSGTNGTKRFDNPVLPFNDGVYFASTEKSNIIRGWIFGTTLDSKTQSLLIVNNATNVVIKVCEFQFCNDPFLGVYYHKNNKSWMESEFRVYSSANNCTFEYVSQPFLMDLEGKQGNFKNLREFVFKNIDGYFKIYSKHTPINLVRDLPQGFSALEPLVDLPIGINITRFQTLLALHRSYLTPGDSSSGWTAGAAAYYVGYLQPRTFLLKYNENGTITDAVDCALDPLSETKCTLKSFTVEKGIYQTSNFRVQPTESIVRFPNITNLCPFGEVFNATRFASVYAWNRKRISNCVADYSVLYNSASFSTFKCYGVSPTKLNDLCFTNVYADSFVIRGDEVRQIAPGQTGKIADYNYKLPDDFTGCVISWNSNNLDSKVGGNYNYLYRLFRKSNLKPFERDISTEIYQAGSTPCNGVEGFNCYFPLQSYGFQPTNGVGYQPYRVVVLSFELLHAPATVCGPKKSTNLVKNKCVNFNFNGLTGTGVLTESNKKFLPFQQFGRDIADTTDAVRDPQTLEILDITPCSFGGVSVITPGTNTSNQVAVLYQGVNCTEVPVAIHADQLTPTWRVYSTGSNVFQTRAGCLIGAEHVNNSYECDIPIGAGICASYQTQTNSPRRARSVASQSIIAYTMSLGAENSVAYSNNSIAIPTNFTISVTTEILPVSMTKTSVDCTMYICGDSTECSNLLLQYGSFCTQLNRALTGIAVEQDKNTQEVFAQVKQIYKTPPIKDFGGFNFSQILPDPSKPSKRSFIEDLLFNKVTLADAGFIKQYGDCLGDIAARDLICAQKFNGLTVLPPLLTDEMIAQYCSALLAGTITSGWTFGAGAALQIPFAMQMAYRFNGIGVTQNVLYENQKLIANQFNSAIGKIQDSLSSTASALGKLQDVVNQNAQALNTLVKQLSSNFGAISSVLNDILSRLDKVEAEVQIDRLITGRLQSLQTYVTQQLIRAAEIRASANLAATKMSECVLGQSKRVDFCGKGYHLMSFPQCAPHGVVFLHVTYVPAQEKNFTTAPAICHDGKAHFPREGVFVSNGTHWFVTQRNFYEPQIITTDNTFVSGNCDVVIGIVNNTVYDPLQPELDS

SEQ ID NO: 3588 - protein, 1147 aa, Artificial Sequence
  SARS-CoV-2/France/GE1977/2020__EPI_ISL_414632 spike protein (1-1147)(T874C_S1055C)
MFVFLVLLPLVSSQCVNLTTRTQLPPAYTNSFTRGVYYPDKVFRSSVLHSTQDLFLPFFSNVTWFHAIHVSGTNGTKRFDNPVLPFNDGVYFASTEKSNIIRGWIFGTTLDSKTQSLLIVNNATNVVIKVCEFQFCNDPFLGVYYHKNNKSWMESEFRVYSSANNCTFEYVSQPFLMDLEGKQGNFKNLREFVFKNIDGYFKIYSKHTPINLVRDLPQGFSALEPLVDLPIGINITRFQTLLALHRSYLTPGDSSSGWTAGAAAYYVGYLQPRTFLLKYNENGTITDAVDCALDPLSETKCTLKSFTVEKGIYQTSNFRVQPTESIVRFPNITNLCPFGEVFNATRFASVYAWNRKRISNCVADYSVLYNSASFSTFKCYGVSPTKLNDLCFTNVYADSFVIRGDEVRQIAPGQTGKIADYNYKLPDDFTGCVIAWNSNNLDSKVGGNYNYLYRLFRKSNLKPFERDISTEIYQAGSTPCNGVEGFNCYFPLQSYGFQPTNGVGYQPYRVVVLSFELLHAPATVCGPKKSTNLVKNKCVNFNFNGLTGTGVLTESNKKFLPFQQFGRDIADTTDAVRDPQTLEILDITPCSFGGVSVITPGTNTSNQVAVLYQGVNCTEVPVAIHADQLTPTWRVYSTGSNVFQTRAGCLIGAEHVNNSYECDIPIGAGICASYQTQTNSPRRARSVASQSIIAYTMSLGAENSVAYSNNSIAIPTNFTISVTTEILPVSMTKTSVDCTMYICGDSTECSNLLLQYGSFCTQLNRALTGIAVEQDKNTQEVFAQVKQIYKTPPIKDFGGFNFSQILPDPSKPSKRSFIEDLLFNKVTLADAGFIKQYGDCLGDIAARDLICAQKFNGLTVLPPLLTDEMIAQYCSALLAGTITSGWTFGAGAALQIPFAMQMAYRFNGIGVTQNVLYENQKLIANQFNSAIGKIQDSLFSTASALGKLQDVVNQNAQALNTLVKQLSSNFGAISSVLNDILSRLDKVEAEVQIDRLITGRLQSLQTYVTQQLIRAAEIRASANLAATKMSECVLGQSKRVDFCGKGYHLMSFPQCAPHGVVFLHVTYVPAQEKNFTTAPAICHDGKAHFPREGVFVSNGTHWFVTQRNFYEPQIITTDNTFVSGNCDVVIGIVNNTVYDPLQPELDS

SEQ ID NO: 3589 - protein, 1147 aa, Artificial Sequence
  SARS-CoV-2/Finland/FIN-313/2020__EPI_ISL_414641 spike protein (1-1147)(T874C_S1055C)
MFVFLVLLPLVSSQCVNLTTRTQLPPAYTNSFTRGVYYPDKVFRSSVLHSTQDLFLPFFSNVTWFHAIHVSGTNGTKRFDNPVLPFNDGVYFASTEKSNIIRGWIFGTTLDSKTQSLLIVNNATNVVIKVCEFQFCNDPFLGVYYHKNNKSWMESEFRVYSSANNCTFEYVSQPFLMDLEGKQGNFKNLREFVFKNIDGYFKIYSKHTPINLVRDLPQGFSALEPLVDLPIGINITRFKTLLALHRSYLTPGDSSSGWTAGAAAYYVGYLQPRTFLLKYNENGTITDAVDCALDPLSETKCTLKSFTVEKGIYQTSNFRVQPTESIVRFPNITNLCPFGEVFNATRFASVYAWNRKRISNCVADYSVLYNSASFSTFKCYGVSPTKLNDLCFTNVYADSFVIRGDEVRQIAPGQTGKIADYNYKLPDDFTGCVIAWNSNNLDSKVGGNYNYLYRLFRKSNLKPFERDISTEIYQAGSTPCNGVEGFNCYFPLQSYGFQPTNGVGYQPYRVVVLSFELLHAPATVCGPKKSTNLVKNKCVNFNFNGLTGTGVLTESNKKFLPFQQFGRDIADTTDAVRDPQTLEILDITPCSFGGVSVITPGTNTSNQVAVLYQGVNCTEVPVAIHADQLTPTWRVYSTGSNVFQTRAGCLIGAEHVNNSYECDIPIGAGICASYQTQTNSPRRARSVASQSIIAYTMSLGAENSVAYSNNSIAIPTNFTISVTTEILPVSMTKTSVDCTMYICGDSTECSNLLLQYGSFCTQLNRALTGIAVEQDKNTQEVFAQVKQIYKTPPIKDFGGFNFSQILPDPSKPSKRSFIEDLLFNKVTLADAGFIKQYGDCLGDIAARDLICAQKFNGLTVLPPLLTDEMIAQYCSALLAGTITSGWTFGAGAALQIPFAMQMAYRFNGIGVTQNVLYENQKLIANQFNSAIGKIQDSLSSTASALGKLQDVVNQNAQALNTLVKQLSSNFGAISSVLNDILSRLDKVEAEVQIDRLITGRLQSLQTYVTQQLIRAAEIRASANLAATKMSECVLGQSKRVDFCGKGYHLMSFPQCAPHGVVFLHVTYVPAQEKNFTTAPAICHDGKAHFPREGVFVSNGTHWFVTQRNFYEPQIITTDNTFVSGNCDVVIGIVNNTVYDPLQPELDS

SEQ ID NO: 3590 - protein, 1147 aa, Artificial Sequence
  SARS-CoV-2/Netherlands/ZuidHolland_2/2020__EPI_ISL_414556 spike protein (1-1147)(T874C_S1055C)
MFVFLVLLPLVSSQCVNLTTRTQLPPAYTNSFTRGVYYPDKVFRSSVLHSTQDLFLPFFSNVTWFHAIHVSGTNGTKRFDNPVLPFNDGVYFASTEKSNIIRGWIFGTTLDSKTQSLLIVNNATNVVIKVCEFQFCNDPFLGVYYHKNNKSWMESEFRVYSSANNCTFEYVSQPFLMDLEGKQGNFKNLREFVFKNIDGYFKIYSKHTPINLVRDLPQGFSALEPLVDLPIGINITRFQTLLALHRSYLTPGDSSSGWTAGAAAYYVGYLQPRTFLLKYNENGTITDAVDCALDPLSETKCTLKSFTVEKGIYQTSNFRVQPTESIVRFPNITNLCPFGEVFNATRFASVYAWNRKRISNCVADYSVLYNSASFSTFKCYGVSPTKLNDLCFTNVYADSFVIRGDEVRQIAPGQTGKIADYNYKLPDDFTGCVIAWNSNNLDSKVGGNYNYLYRLFRKSNLKPFERDISTEIYQAGSTPCNGVEGFNCYFPLQSYGFQPTNGVGYQPYRVVVLSFELLHAPATVCGPKKSTNLVKNKCVNFNFNGLTGTGVLTESNKKFLPFQQFGRDIADTTDAVRDPQTLEILDITPCSFGGVSVITPGTNTSNQVAVLYQGVNCTEVPVAIHADQLTPTWRVYSTGSNVFQTRAGCLIGAEHVNNSYECDIPIGAGICASYQTQTNSPRRARSVASQSIIAYTMSLGAENSVAYSNNSIAIPTNFTISVTTEILPVSMTKTSVDCTMYICGDSTECSNLLLQYGSFCTQLNRALTGIALEQDKNTQEVFAQVKQIYKTPPIKDFGGFNFSQILPDPSKPSKRSFIEDLLFNKVTLADAGFIKQYGDCLGDIAARDLICAQKFNGLTVLPPLLTDEMIAQYCSALLAGTITSGWTFGAGAALQIPFAMQMAYRFNGIGVTQNVLYENQKLIANQFNSAIGKIQDSLSSTASALGKLQDVVNQNAQALNTLVKQLSSNFGAISSVLNDILSRLDKVEAEVQIDRLITGRLQSLQTYVTQQLIRAAEIRASANLAATKMSECVLGQSKRVDFCGKGYHLMSFPQCAPHGVVFLHVTYVPAQEKNFTTAPAICHDGKAHFPREGVFVSNGTHWFVTQRNFYEPQIITTDNTFVSGNCDVVIGIVNNTVYDPLQPELDS

SEQ ID NO: 3591 - protein, 1147 aa, Artificial Sequence
  SARS-CoV-2/USA/WA-UW31/2020__EPI_ISL_414618 spike protein (1-1147)(T874C_S1055C)
MFVFLVLLPLVSSQCVNLTTRTQLPPAYTNSFTRGVYYPDKVFRSSVLHSTQDLFLPFFSNVTWFHAIHVSGTNGTKRFDNPVLPFNDGVYFASTEKSNIIRGWIFGTTLDSKTQSLLIVNNATNVVIKVCEFQFCNDPFLGVYYHKNNKSWMESEFRVYSSANNCTFEYVSQPFLMDLEGKQGNFKNLREFVFKNIDGYFKIYSKHTPINLVRDLPQGFSALEPLVDLPIGINITRFQTLLALHRSYLTPGDSSSGWTAGAAAYYVGYLQPRTFLLKYNENGTITDAVDCALDPLSETKCTLKSFTVEKGIYQTSNFRVQPTESIVRFPNITNLCPFGEVFNATRFASVYAWNRKRISNCVADYSVLYNSASFSTFKCYGVSPTKLNDLCFTNVYADSFVIRGDEVRQIAPGQTGKIADYNYKLPDDFTGCVIAWNSNNLDSKVGGNYNYLYRLFRKSNLKPFERDISTEIYQAGSTPCNGAEGFNCYFPLQSYGFQPTNGVGYQPYRVVVLSFELLHAPATVCGPKKSTNLVKNKCVNFNFNGLTGTGVLTESNKKFLPFQQFGRDIADTTDAVRDPQTLEILDITPCSFGGVSVITPGTNTSNQVAVLYQDVNCTEVPVAIHADQLTPTWRVYSTGSNVFQTRAGCLIGAEHVNNSYECDIPIGAGICASYQTQTNSPRRARSVASQSIIAYTMSLGAENSVAYSNNSIAIPTNFTISVTTEILPVSMTKTSVDCTMYICGDSTECSNLLLQYGSFCTQLNRALTGIAVEQDKNTQEVFAQVKQIYKTPPIKDFGGFNFSQILPDPSKPSKRSFIEDLLFNKVTLADAGFIKQYGDCLGDIAARDLICAQKFNGLTVLPPLLTDEMIAQYCSALLAGTITSGWTFGAGAALQIPFAMQMAYRFNGIGVTQNVLYENQKLIANQFNSAIGKIQDSLSSTASALGKLQDVVNQNAQALNTLVKQLSSNFGAISSVLNDILSRLDKVEAEVQIDRLITGRLQSLQTYVTQQLIRAAEIRASANLAATKMSECVLGQSKRVDFCGKGYHLMSFPQCAPHGVVFLHVTYVPAQEKNFTTAPAICHDGKAHFPREGVFVSNGTHWFVTQRNFYEPQIITTDNTFVSGNCDVVIGIVNNTVYDPLQPELDS

SEQ ID NO: 3592 - protein, 1147 aa, Artificial Sequence
  SARS-CoV-2/South Korea/SNU01/2020__EPI_ISL_411929 spike protein (1-1147)(T874C_S1055C)
MFVFLVLLPLVSSQCVNLTTRTQLPPAYTNSFTRGVYYPDKVFRSSVLHSTQDLFLPFFSNVTWFHAIHVSGTNGTKRFDNPVLPFNDGVYFASTEKSNIIRGWIFGTTLDSKTQSLLIVNNATNVVIKVCEFQFCNDPFLGVYYHKNNKSWMESEFRVYSSANNCTFEYVSQPFLMDLEGKQGNFKNLREFVFKNIDGYFKIYSKHTPINLVRDLPQGFWALEPLVDLPIGINITRFQTLLALHRSYLTPGDSSSGWTAGAAAYYVGYLQPRTFLLKYNENGTITDAVDCALDPLSETKCTLKSFTVEKGIYQTSNFRVQPTESIVRFPNITNLCPFGEVFNATRFASVYAWNRKRISNCVADYSVLYNSASFSTFKCYGVSPTKLNDLCFTNVYADSFVIRGDEVRQIAPGQTGKIADYNYKLPDDFTGCVIAWNSNNLDSKVGGNYNYLYRLFRKSNLKPFERDISTEIYQAGSTPCNGVEGFNCYFPLQSYGFQPTNGVGYQPYRVVVLSFELLHAPATVCGPKKSTNLVKNKCVNFNFNGLTGTGVLTESNKKFLPFQQFGRDIADTTDAVRDPQTLEILDITPCSFGGVSVITPGTNTSNQVAVLYQDVNCTEVPVAIHADQLTPTWRVYSTGSNVFQTRAGCLIGAEHVNNSYECDIPIGAGICASYQTQTNSPRRARSVASQSIIAYTMSLGAENSVAYSNNSIAIPTNFTISVTTEILPVSMTKTSVDCTMYICGDSTECSNLLLQYGSFCTQLNRALTGIAVEQDKNTQEVFAQVKQIYKTPPIKDFGGFNFSQILPDPSKPSKRSFIEDLLFNKVTLADAGFIKQYGDCLGDIAARDLICAQKFNGLTVLPPLLTDEMIAQYCSALLAGTITSGWTFGAGAALQIPFAMQMAYRFNGIGVTQNVLYENQKLIANQFNSAIGKIQDSLSSTASALGKLQDVVNQNAQALNTLVKQLSSNFGAISSVLNDILSRLDKVEAEVQIDRLITGRLQSLQTYVTQQLIRAAEIRASANLAATKMSECVLGQSKRVDFCGKGYHLMSFPQCAPHGVVFLHVTYVPAQEKNFTTAPAICHDGKAHFPREGVFVSNGTHWFVTQRNFYEPQIITTDNTFVSGNCDVVIGIVNNTVYDPLQPELDS

SEQ ID NO: 3593 - protein, 1147 aa, Artificial Sequence
  SARS-CoV-2/China/WF0004/2020__EPI_ISL_413694 spike protein (1-1147)(T874C_S1055C)
MFVFLVLLPLVSSQCVNLTTRTQLPPAYTNSFTRGVYYPDKVFRSSVLHSTQDLFLPFFSNVTWFHAIHVSGTNGTKRFDNPVLPFNDGVYFASTEKSNIIRGWIFGTTLDSKTQSLLIVNNATNVVIKVCEFQFCNDPFLGVYYHKNNKSWTESEFRVYSSANNCTFEYVSQPFLMDLEGKQGNFKNLREFVFKNIDGYFKIYSKHTPINLVRDLPQGFSALEPLVDLPIGINITRFQTLLALHRSYLTPGDSSSGWTAGAAAYYVGYLQPRTFLLKYNENGTITDAVDCALDPLSETKCTLKSFTVEKGIYQTSNFRVQPTESIVRFPNITNLCPFGEVFNATRFASVYAWNRKRISNCVADYSVLYNSASFSTFKCYGVSPTKLNDLCFTNVYADSFVIRGDEVRQIAPGQTGKIADYNYKLPDDFTGCVIAWNSNNLDSKVGGNYNYLYRLFRKSNLKPFERDISTEIYQAGSTPCNGVEGFNCYFPLQSYGFQPTNGVGYQPYRVVVLSFELLHAPATVCGPKKSTNLVKNKCVNFNFNGLTGTGVLTESNKKFLPFQQFGRDIADTTDAVRDPQTLEILDITPCSFGGVSVITPGTNTSNQVAVLYQDVNCTEVPVAIHADQLTPTWRVYSTGSNVFQTRAGCLIGAEHVNNSYECDIPIGAGICASYQTQTNSPRRARSVASQSIIAYTMSLGAENSVAYSNNSIAIPTNFTISVTTEILPVSMTKTSVDCTMYICGDSTECSNLLLQYGSFCTQLNRALTGIAVEQDKNTQEVFAQVKQIYKTPPIKDFGGFNFSQILPDPSKPSKRSFIEDLLFNKVTLADAGFIKQYGDCLGDIAARDLICAQKFNGLTVLPPLLTDEMIAQYCSALLAGTITSGWTFGAGAALQIPFAMQMAYRFNGIGVTQNVLYENQKLIANQFNSAIGKIQDSLSSTASALGKLQDVVNQNAQALNTLVKQLSSNFGAISSVLNDILSRLDKVEAEVQIDRLITGRLQSLQTYVTQQLIRAAEIRASANLAATKMSECVLGQSKRFDFCGKGYHLMSFPQCAPHGVVFLHVTYVPAQEKNFTTAPAICHDGKAHFPREGVFVSNGTHWFVTQRNFYEPQIITTDNTFVSGNCDVVIGIVNNTVYDPLQPELDS

SEQ ID NO: 3594 - protein, 1147 aa, Artificial Sequence
  SARS-CoV-2/China/WF0028/2020__EPI_ISL_413791 spike protein (1-1147)(T874C_S1055C)
MFVFLVLLPLVSSQCVNLTTRTQLPPAYTNSFTRGVYYPDKVFRSSVLHSTQDLFLPFFSNVTWFHAIHVSGTNGTKRFDNPVLPFNDGVYFASTEKSNIIRGWIFGTTLDSKTQSLLIVNNATNVVIKVCEFQFCNDPFLGVYYHKNNKSWMESEFRVYSSANNCTFEYVSQPFLMDLEGKQGNFKNLREFVFKNIDGYFKIYSKHTPINLVRDLPQGFSALEPLVDLPIGINITRFQTLLALHRSYLTPGDSSSGWTAGAAAYYVGYLQPRTFLLKYNENGTITDAVDCALDPLSETKCTLKSFTVEKGIYQTSNFRVQPTESIVRFPNITNLCPFGEVFNATRFASVYAWNRKRISNCVADYSVLYNSASFSTFKCYGVSPTKLNDLCFTNVYADSFVIRGDEVRQIAPGQTGKIADYNYKLPDDFTGCVIAWNSNNLDSKVGGNYNYLYRLFRKSNLKPFERDISTEIYQAGSTPCNGVEGFNCYFPLQSYGFQPTNGVGYQPYRVVVLSFELLHAPATVCGPKKSTNLVKNKCVNFNFNGLTGTGVLTESNKKFLPFQQFGRDIADTTDAVRDPQTLEILDITPCSFGGVSVITPGTNTSNQVAVLYQDVNCTEVPVAIHADQLTPTWRVYSTGSNVFQTRAGCLIGAEHVNNSYECDIPIGAGICASYQTQTNSPRRARSVASQSIIAYTMSLGAENSVAYSNNSIAIPTNFTISVTTEILPVSMTKTSVDCTMYICGDSTECSNLLLQYGSFCTQLNRALTGIAVEQDKNTQEVFAQVKQIYKTPPIKDFGGFNFSQILPDPSKPSKRSFIEDLLFNKVTLADAGFIKQYGDCLGDIAARDLICAQKFNGLTVLPPLLTDEMIAQYCSALLAGTITSGWTFGAGAALQIPFAMQMAYRFNGIGVTQNVLYENQKLIANQFNSAIGKIQDSLSSTASALGKLQDVVNQNAQALNTLVKQLSSNFGAISSVLNDILSRLDKVEAEVQIDRLITGRLQSLQTYVTQQLIRAAEIRASANLAATKMSECVLGQSKRVDFCGKGYHLMSFPQCAPHGVVFLHVTYVPAQEKNFTTAPAICHDGKAHFPREGVFVSNGTHWFVTQRNFYEPQIITTDNTFVSGNCDVVIGIVNNTVYDPLQPELES

SEQ ID NO: 3595 - protein, 1147 aa, Artificial Sequence
  SARS-CoV-2/2019-nCoV/USA-CruiseA-18/2020__MT159716.1 spike protein (1-1147)(T874C_S1055C)
MFVFLVLLPLVSSQCVNLTTRTQLPPAYTNSFTRGVYYPDKVFRSSVLHSTQDLFLPFFSNVTWFHAIHVSGTNGTKRFDNPVLPFNDGVYFASTEKSNIIRGWIFGTTLDSKTQSLLIVNNATNVVIKVCEFQFCNDPFLGVYYHKNNKSWMESELRVYSSANNCTFEYVSQPFLMDLEGKQGNFKNLREFVFKNIDGYFKIYSKHTPINLVRDLPQGFSALEPLVDLPIGINITRFQTLLALHRSYLTPGDSSSGWTAGAAAYYVGYLQPRTFLLKYNENGTITDAVDCALDPLSETKCTLKSFTVEKGIYQTSNFRVQPTESIVRFPNITNLCPFGEVFNATRFASVYAWNRKRISNCVADYSVLYNSASFSTFKCYGVSPTKLNDLCFTNVYADSFVIRGDEVRQIAPGQTGKIADYNYKLPDDFTGCVIAWNSNNLDSKVGGNYNYLYRLFRKSNLKPFERDISTEIYQAGSTPCNGVEGFNCYFPLQSYGFQPTNGVGYQPYRVVVLSFELLHAPATVCGPKKSTNLVKNKCVNFNFNGLTGTGVLTESNKKFLPFQQFGRDIADTTDAVRDPQTLEILDITPCSFGGVSVITPGTNTSNQVAVLYQDVNCTEVPVAIHADQLTPTWRVYSTGSNVFQTRAGCLIGAEHVNNSYECDIPIGAGICASYQTQTNSPRRARSVASQSIIAYTMSLGAENSVAYSNNSIAIPTNFTISVTTEILPVSMTKTSVDCTMYICGDSTECSNLLLQYGSFCTQLNRALTGIAVEQDKNTQEVFAQVKQIYKTPPIKDFGGFNFSQILPDPSKPSKRSFIEDLLFNKVTLADAGFIKQYGDCLGDIAARDLICAQKFNGLTVLPPLLTDEMIAQYCSALLAGTITSGWTFGAGAALQIPFAMQMAYRFNGIGVTQNVLYENQKLIANQFNSAIGKIQDSLSSTASALGKLQDVVNQNAQALNTLVKQLSSNFGAISSVLNDILSRLDKVEAEVQIDRLITGRLQSLQTYVTQQLIRAAEIRASANLAATKMSECVLGQSKRVDFCGKGYHLMSFPQCAPHGVVFLHVTYVPAQEKNFTTAPAICHDGKAHFPREGVFVSNGTHWFVTQRNFYEPQIITTDNTFVSGNCDVVIGIVNNTVYDPLQPELDS

SEQ ID NO: 3596 - protein, 1147 aa, Artificial Sequence
  SARS-CoV-2/SARS-CoV-2/Yunnan-01/human/2020/CHN__MT049951.1 spike protein (1-1147)(T874C_S1055C)
MFVFLVLLPLVSSQCVNLTTRTQLPPANTNSFTRGVYYPDKVFRSSVLHSTQDLFLPFFSNVTWFHAIHVSGTNGTKRFDNPVLPFNDGVYFASTEKSNIIRGWIFGTTLDSKTQSLLIVNNATNVVIKVCEFQFCNDPFLGVYYHKNNKSWMESEFRVYSSANNCTFEYVSQPFLMDLEGKQGNFKNLREFVFKNIDGYFKIYSKHTPINLVRDLPQGFSALEPLVDLPIGINITRFQTLLALHRSYLTPGDSSSGWTAGAAAYYVGYLQPRTFLLKYNENGTITDAVDCALDPLSETKCTLKSFTVEKGIYQTSNFRVQPTESIVRFPNITNLCPFGEVFNATRFASVYAWNRKRISNCVADYSVLYNSASFSTFKCYGVSPTKLNDLCFTNVYADSFVIRGDEVRQIAPGQTGKIADYNYKLPDDFTGCVIAWNSNNLDSKVGGNYNYLYRLFRKSNLKPFERDISTEIYQAGSTPCNGVEGFNCYFPLQSYGFQPTNGVGYQPYRVVVLSFELLHAPATVCGPKKSTNLVKNKCVNFNFNGLTGTGVLTESNKKFLPFQQFGRDIADTTDAVRDPQTLEILDITPCSFGGVSVITPGTNTSNQVAVLYQDVNCTEVPVAIHADQLTPTWRVYSTGSNVFQTRAGCLIGAEHVNNSYECDIPIGAGICASYQTQTNSPRRARSVASQSIIAYTMSLGAENSVAYSNNSIAIPTNFTISVTTEILPVSMTKTSVDCTMYICGDSTECSNLLLQYGSFCTQLNRALTGIAVEQDKNTQEVFAQVKQIYKTPPIKDFGGFNFSQILPDPSKPSKRSFIEDLLFNKVTLADAGFIKQYGDCLGDIAARDLICAQKFNGLTVLPPLLTDEMIAQYCSALLAGTITSGWTFGAGAALQIPFAMQMAYRFNGIGVTQNVLYENQKLIANQFNSAIGKIQDSLSSTASALGKLQDVVNQNAQALNTLVKQLSSNFGAISSVLNDILSRLDKVEAEVQIDRLITGRLQSLQTYVTQQLIRAAEIRASANLAATKMSECVLGQSKRVDFCGKGYHLMSFPQCAPHGVVFLHVTYVPAQEKNFTTAPAICHDGKAHFPREGVFVSNGTHWFVTQRNFYEPQIITTDNTFVSGNCDVVIGIVNNTVYDPLQPELDS

SEQ ID NO: 3597 - protein, 1147 aa, Artificial Sequence
  SARS-CoV-2/USA/WA-UW292/2020__EPI_ISL_418077 spike protein (1-1147)(T874C_S1055C)
MFVFLVLLPLVSSQCVNLTTRTQLPPAYTNSFTRGVYYPDKVFRSSVLHSTQDLFLPFFSNVTWFHAIHVSGTNGTKRFDNPVLPFNDGVYFASTEKSNIIRGWIFGTTLDSKTQSLLIVNNATNVVIKVCEFQFCNDPFLGVYYHKNNKSWMESEFRVYSSANNCTFEYVSQPFLMDLEGKQGNFKNLREFVFKNIDGYFKIYSKHTPINLVRDLPQGFSALEPLVDLPIGINITRFQTLLALHRSYLTPGDSSSGWTAGAAAYYVGYLQPRTFLLKYNENGTITDAVDCALDPLSETKCTLKSFTVEKGIYQTSNFRVQPTESIVRFPNITNLCPFGEVFNATRFASVYAWNRKRISNCVADYSVLYNSASFSTFKCYGVSPTKLNDLCFTNVYADSFVIRGDEVRQIAPGQTGKIADYNYKLPDDFTGCVIAWNSNNLDSKVGGNYNYLYRLFRKSNLKPFERDISTEIYQASSTPCNGVEGFNCYFPLQSYGFQPTNGVGYQPYRVVVLSFELLHAPATVCGPKKSTNLVKNKCVNFNFNGLTGTGVLTESNKKFLPFQQFGRDIADTTDAVRDPQTLEILDITPCSFGGVSVITPGTNTSNQVAVLYQDVNCTEVPVAIHADQLTPTWRVYSTGSNVFQTRAGCLIGAEHVNNSYECDIPIGAGICASYQTQTNSPRRARSVASQSIIAYTMSLGAENSVAYSNNSIAIPTNFTISVTTEILPVSMTKTSVDCTMYICGDSTECSNLLLQYGSFCTQLNRALTGIAVEQDKNTQEVFAQVKQIYKTPPIKDFGGFNFSQILPDPSKPSKRSFIEDLLFNKVTLADAGFIKQYGDCLGDIAARDLICAQKFNGLTVLPPLLTDEMIAQYCSALLAGTITSGWTFGAGAALQIPFAMQMAYRFNGIGVTQNVLYENQKLIANQFNSAIGKIQDSLSSTASALGKLQDVVNQNAQALNTLVKQLSSNFGAISSVLNDILSRLDKVEAEVQIDRLITGRLQSLQTYVTQQLIRAAEIRASANLAATKMSECVLGQSKRVDFCGKGYHLMSFPQCAPHGVVFLHVTYVPAQEKNFTTAPAICHDGKAHFPREGVFVSNGTHWFVTQRNFYEPQIITTDNTFVSGNCDVVIGIVNNTVYDPLQPELDS

SEQ ID NO: 3598 - protein, 1147 aa, Artificial Sequence
  SARS-CoV-2/Iceland/192/2020__EPI_ISL_417819 spike protein (1-1147)(T874C_S1055C)
MFVFFVLLPLVSSQCVNLTTRTQLPPAYTNSFTRGVYYPDKVFRSSVLHSTQDLFLPFFSNVTWFHAIHVSGTNGTKRFDNPVLPFNDGVYFASTEKSNIIRGWIFGTTLDSKTQSLLIVNNATNVVIKVCEFQFCNDPFLGVYYHKNNKSWMESEFRVYSSANNCTFEYVSQPFLMDLEGKQGNFKNLREFVFKNIDGYFKIYSKHTPINLVRDLPQGFSALEPLVDLPIGINITRFQTLLALHRSYLTPGDSSSGWTAGAAAYYVGYLQPRTFLLKYNENGTITDAVDCALDPLSETKCTLKSFTVEKGIYQTSNFRVQPTESIVRFPNITNLCPFGEVFNATRFASVYAWNRKRISNCVADYSVLYNSASFSTFKCYGVSPTKLNDLCFTNVYADSFVIRGDEVRQIAPGQTGKIADYNYKLPDDFTGCVIAWNSNNLDSKVGGNYNYLYRLFRKSNLKPFERDISTEIYQAGSTPCNGVEGFNCYFPLQSYGFQPTNGVGYQPYRVVVLSFELLHAPATVCGPKKSTNLVKNKCVNFNFNGLTGTGVLTESNKKFLPFQQFGRDIADTTDAVRDPQTLEILDITPCSFGGVSVITPGTNTSNQVAVLYQGVNCTEVPVAIHADQLTPTWRVYSTGSNVFQTRAGCLIGAEHVNNSYECDIPIGAGICASYQTQTNSPRRARSVASQSIIAYTMSLGAENSVAYSNNSIAIPTNFTISVTTEILPVSMTKTSVDCTMYICGDSTECSNLLLQYGSFCTQLNRALTGIAVEQDKNTQEVFAQVKQIYKTPPIKDFGGFNFSQILPDPSKPSKRSFIEDLLFNKVTLADAGFIKQYGDCLGDIAARDLICAQKFNGLTVLPPLLTDEMIAQYCSALLAGTITSGWTFGAGAALQIPFAMQMAYRFNGIGVTQNVLYENQKLIANQFNSAIGKIQDSLSSTASALGKLQDVVNQNAQALNTLVKQLSSNFGAISSVLNDILSRLDKVEAEVQIDRLITGRLQSLQTYVTQQLIRAAEIRASANLAATKMSECVLGQSKRVDFCGKGYHLMSFPQCAPHGVVFLHVTYVPAQEKNFTTAPAICHDGKAHFPREGVFVSNGTHWFVTQRNFYEPQIITTDNTFVSGNCDVVIGIVNNTVYDPLQPELDS

SEQ ID NO: 3599 - protein, 1147 aa, Artificial Sequence
  SARS-CoV-2/Belgium/ULG-6939/2020__EPI_ISL_417020 spike protein (1-1147)(T874C_S1055C)
MFVFLVLLPLVSSQCVNLTTRTQLPPAYTNSFTRGVYYPDKVFRSSVLHSTQDLFLPFFSNVTWFHAIHVSGTNGTKRFDNPVLPFNDGVYFASTEKSNIIRGWIFGTTLDSKTQSLLIVNNATNVVIKVCEFQFCNDPFLGVYYHKNNKSWMESEFRVYSSANNCTFEYVSQPFLMDLEGKQGNFKNLREFVFKNIDGYFKIYSKHTPINLVRDLPQGFSALEPLVDLPIGINITRFQTLLALHRSYLTPGDSSSGWTAGAAAYYVGYLQPRTFLLKYNENGTITDAVDCALDPLSETKCTLKSFTVEKGIYQTSNFRVQPTESIVRFPNITNLCPFGEVFNATRFASVYAWNRKRISNCVADYSVLYNSASFSTFKCYGVSPTKLNDLCFTNVYADSFVIRGDEVRQIAPGQTGKIADYNYKLPDDFTGCVIAWNSNNLDSKVGGNYNYLYRLFRKSNLKPFERDISTEIYQAGSTPCNGVEGFNCYFPLQSYGFQPTNGVGYQPYRVVVLSFELLHAPATVCGPKKSTNLVKNKCVNFNFNGLTGTGVLTESNKKFLPFQQFGRDIADTTDAVRDPQTLEILDITPCSFGGVSVITPGTNTSNQVAVLYQGVNCTEVPVAIHADQLTPTWRVYSTGSNVFQTRAGCLIGAEHVNNSYECDIPIGAGICASYQTQTNSPRRARSVASQSIIAYTMSLGAENSVVYSNNSIAIPTNFTISVTTEILPVSMTKTSVDCTMYICGDSTECSNLLLQYGSFCTQLNRALTGIAVEQDKNTQEVFAQVKQIYKTPPIKDFGGFNFSQILPDPSKPSKRSFIEDLLFNKVTLADAGFIKQYGDCLGDIAARDLICAQKFNGLTVLPPLLTDEMIAQYCSALLAGTITSGWTFGAGAALQIPFAMQMAYRFNGIGVTQNVLYENQKLIANQFNSAIGKIQDSLSSTASALGKLQDVVNQNAQALNTLVKQLSSNFGAISSVLNDILSRLDKVEAEVQIDRLITGRLQSLQTYVTQQLIRAAEIRASANLAATKMSECVLGQSKRVDFCGKGYHLMSFPQCAPHGVVFLHVTYVPAQEKNFTTAPAICHDGKAHFPREGVFVSNGTHWFVTQRNFYEPQIITTDNTFVSGNCDVVIGIVNNTVYDPLQPELDS

SEQ ID NO: 3600 - protein, 1147 aa, Artificial Sequence
  SARS-CoV-2/France/HF2496/2020__EPI_ISL_418231 spike protein (1-1147)(T874C_S1055C)
MFVFLVLLPLVSSQCVNLTTRTQLPPAYTNSFTRGVYYPDKVFRSSVLHSTQDLFLPFFSNVTWFHAIHVSGTNGTKRFDNPVLPFNDGVYFASTEKSNIIRGWIFGTTLDSKTQSLLIVNNATNVVIKVCEFQFCNDPFLGVYYHKNNKSWMESEFRVYSSANNCTFEYVSQPFLMDLEGKQGNFKNLREFVFKNIDGYFKIYSKHTPINLVRDLPQGFSALEPLVDLPIGINITRFQTLLALHRSYLTPGDSSSGWTAGAAAYYVGYLQPRTFLLKYNENGTITDAVDCALDPLSETKCTLKSFTVEKGIYQTSNFRVQPTESIVRFPNITNLCPFGEVFNATRFASVYAWNRKRISNCVADYSVLYNSASFSTFKCYGVSPTKLNDLCFTNVYADSFVIRGDEVRQIAPGQTGKIADYNYKLPDDFTGCVIAWNSNNLDSKVGGNYNYLYRLFRKSNLKPFERDISTEIYQAGSTPCNGVEGFNCYFPLQSYGFQPTNGVGYQPYRVVVLSFELLHAPATVCGPKKSTNLVKNKCVNFNFNGLTGTGVLTESNKKFLPFQQFGRDIADTTDAVRDPQTLEILDITPCSFGGVSVITPGTNTSNQVAVLYQGVNCTEVPVAIHADQLTPTWRVYSTGSNVFQTRAGCLIGAEHVNNSYECDIPIGAGICASYQTQTNSPRRARSVASQSIIAYTMSLGAENSVAYSNNSIAIPTNFTISVTTEILPVSMTKTSVDCTMYICGDSTECSNLLLQYGSFCTQLNRALTGIAVEQDKNTQEVFAQVKQIYKTPPIKDFGGFNFSQILPDPSKPSKRSFIEDLLFNKVTLADAGFIKQYGDCLGDIVARDLICAQKFNGLTVLPPLLTDEMIAQYCSALLAGTITSGWTFGAGAALQIPFAMQMAYRFNGIGVTQNVLYENQKLIANQFNSAIGKIQDSLSSTASALGKLQDVVNQNAQALNTLVKQLSSNFGAISSVLNDILSRLDKVEAEVQIDRLITGRLQSLQTYVTQQLIRAAEIRASANLAATKMSECVLGQSKRVDFCGKGYHLMSFPQCAPHGVVFLHVTYVPAQEKNFTTAPAICHDGKAHFPREGVFVSNGTHWFVTQRNFYEPQIITTDNTFVSGNCDVVIGIVNNTVYDPLQPELDS

SEQ ID NO: 3601 - protein, 1147 aa, Artificial Sequence
  SARS-CoV-2/USA/WA-UW291/2020__EPI_ISL_418076 spike protein (1-1147)(T874C_S1055C)
MFVFLVLLPLVSSQCVNLTTRTQLPPAYTNSFTRGVYYPDKVFRSSVLHSTQDLFLPFFSNVTWFHAIHVSGTNGTKRFDNPVLPFNDGVYFASTEKSNIIRGWIFGTTLDSKTQSLLIVNNATNVVIKVCEFQFCNDPFLGVYYHKNNKSWMESEFRVYSSANNCTFEYVSQPFLMDLEGKQGNFKNLREFVFKNIDGYFKIYSKHTPINLVRDLPQGFSALEPLVDLPIGINITRFQTLLALHRSYLTPGDSSSGWTAGAAAYYVGYLQPRTFLLKYNENGTITDAVDCALDPLSETKCTLKSFTVEKGIYQTSNFRVQPTESIVRFPNITNLCPFGEVFNATRFASVYAWNRKRISNCVADYSVLYNSASFSTFKCYGVSPTKLNDLCFTNVYADSFVIRGDEVRQIAPGQTGKIADYNYKLPDDFTGCVIAWNSNNLDSKVGGNYNYLYRLFRKSNLKPFERDISTEIYQAGSTPCNGVEGFNCYFPLQSYGFQPTNGVGYQPYRVVVLSFELLHAPATVCGPKKSTNLVKNKCVNFNFNGLTGTGVLTESNKKFLPFQQFGRDIADTTDAVRDPQTLEILDITPCSFGGVSVITPGTNTSNQVAVLYQGVNCTEVPVAIHADQLTPTWRVYSTGSNVFQTRAGCLIGAEHVNNSYECDIPIGAGICASYQTQTNSPRRARSVASQSIIAYTMSLGAENSVAYSNNSIAIPTNFTISVTTEILPVSMTKTSVDCTMYICGDSTECSNLLLQYGSFCTQLNRALTGIAVEQDKNTQEVFAQVKQIYKTPPIKDFGGFNFSQILPDPSKPSKRSFIEDLLFNKVTLADAGFIKQYGDCLGDIAARDLICAQKFNGLTVLPPLLTDEMIAQYCSALLAGTITSGWTFGAGAALQIPFAMQMAYRFNGIGVTQNVLYENQKLIANQFNSAIGKIQYSLSSTASALGKLQDVVNQNAQALNTLVKQLSSNFGAISSVLNDILSRLDKVEAEVQIDRLITGRLQSLQTYVTQQLIRAAEIRASANLAATKMSECVLGQSKRVDFCGKGYHLMSFPQCAPHGVVFLHVTYVPAQEKNFTTAPAICHDGKAHFPREGVFVSNGTHWFVTQRNFYEPQIITTDNTFVSGNCDVVIGIVNNTVYDPLQPELDS

SEQ ID NO: 3602 - protein, 1147 aa, Artificial Sequence; identical to SEQ ID NO: 3565
  SARS-CoV-2/Portugal/PT0034/2020__EPI_ISL_418019 spike protein (1-1147)(T874C_S1055C)

SEQ ID NO: 3603 - protein, 1147 aa, Artificial Sequence; identical to SEQ ID NO: 3557
  SARS-CoV-2/Iceland/202/2020__EPI_ISL_417750 spike protein (1-1147)(T874C_S1055C)

SEQ ID NO: 3604 - protein, 1147 aa, Artificial Sequence
  SARS-CoV-2/USA/WA-UW261/2020__EPI_ISL_418046 spike protein (1-1147)(T874C_S1055C)
MFVFLVLLPLVSSQCVNLTTRTQLPPAYTNSFTRGVYYPDKVFRSSVLHSTQDLFLPFFSNVTWFHAIHVSGTNGTKRFDNPVLPFNDGVYFASTEKSNIIRGWIFGTTLDSKTQSLLIVNNATNVVIKVCEFQFCNDPFLGVYYHKNNKSWMESEFRVYSSANNCTFEYVSQPFLMDLEGKQGNFKNLREFVFKNIDGYFKIYSKHTPINLVRDLPQGFSALEPLVDLPIGINITRFQTLLALHRSYLTPGDSSSGWTAGAAAYYVGYLQPRTFLLKYNENGTITDAVDCALDPLSETKCTLKSFTVEKGIYQTSNFRVQPTESIVRFPNITNLCPFGEVFNATRFTSVYAWNRKRISNCVADYSVLYNSASFSTFKCYGVSPTKLNDLCFTNVYADSFVIRGDEVRQIAPGQTGKIADYNYKLPDDFTGCVIAWNSNNLDSKVGGNYNYLYRLFRKSNLKPFERDISTEIYQAGSTPCNGVEGFNCYFPLQSYGFQPTNGVGYQPYRVVVLSFELLHAPATVCGPKKSTNLVKNKCVNFNFNGLTGTGVLTESNKKFLPFQQFGRDIADTTDAVRDPQTLEILDITPCSFGGVSVITPGTNTSNQVAVLYQDVNCTEVPVAIHADQLTPTWRVYSTGSNVFQTRAGCLIGAEHVNNSYECDIPIGAGICASYQTQTNSPRRARSVASQSIIAYTMSLGAENSVAYSNNSIAIPTNFTISVTTEILPVSMTKTSVDCTMYICGDSTECSNLLLQYGSFCTQLNRALTGIAVEQDKNTQEVFAQVKQIYKTPPIKDFGGFNFSQILPDPSKPSKRSFIEDLLFNKVTLADAGFIKQYGDCLGDIAARDLICAQKFNGLTVLPPLLTDEMIAQYCSALLAGTITSGWTFGAGAALQIPFAMQMAYRFNGIGVTQNVLYENQKLIANQFNSAIGKIQDSLSSTASALGKLQDVVNQNAQALNTLVKQLSSNFGAISSVLNDILSRLDKVEAEVQIDRLITGRLQSLQTYVTQQLIRAAEIRASANLAATKMSECVLGQSKRVDFCGKGYHLMSFPQCAPHGVVFLHVTYVPAQEKNFTTAPAICHDGKAHFPREGVFVSNGTHWFVTQRNFYEPQIITTDNTFVSGNCDVVIGIVNNTVYDPLQPELDS

SEQ ID NO: 3605 - protein, 1147 aa, Artificial Sequence
  SARS-CoV-2/Portugal/PT0035/2020__EPI_ISL_418020 spike protein (1-1147)(T874C_S1055C)
MFVFLVLLPLVSSQCVNLTTRTQLPPAYTNSFTRGVYYPDKVFRSSVLHSTQDLFLPFFSNVTWFHAIHVSGTNGTKRFDNPVLPFNDGVYFASTEKSNIIRGWIFGTTLDSKTQSLLIVNNATNVVIKVCEFQFCNDPFLGVYYHKNNKSWMESEFRVYSSANNCTFEYVSQPFLMDLEGKQGNFKNLREFVFKNIDGYFKIYSKHTPINLVRDLPQGFSALEPLVDLPIGINITRFQTLLALHRSYLTPGDSSSGWTAGAAAYYVGYLQPRTFLLKYNENGTITDAVDCALDPLSETKCTLKSFTVEKGIYQTSNFRVQPTESIVRFPNITNLCPFGEVFNATRFASVYAWNRKRISNCVADYSVLYNSASFSTFKCYGVSPTKLNDLCFTNVYADSFVIRGDEVRQIAPGQTGKIADYNYKLPDDFTGCVIAWNSNNLDSKVGGNYNYLYRLFRKSNLKPFERDISTEIYQAGSTPCNGVEGFNCYFPLQSYGFQPTNGVGYQPYRVVVLSFELLHAPATVCGPKKSTNLVKNKCVNFNFNGLTGTGVLTESNKKFLPFQQFGRDIADTTDAVRDPQTLEILDITPCSFGGVSVITPGTNTSNQVAVLYQDVNCTEVPVAIHADQLTPTWRVYSTGSNVFQTRAGCLIGAEHVNNSYECDIPIGAGICASYQTQTNSPRRARSVASQSIIAYTMSLGAENSVAYSNNSIAIPTNFTISVTTEILPVSMTKTSVDCTMYICGDSTECSNLLLQYGSFCTQLNRALTGIAVEQDKNTQEVFAQVKQIYKTPPIKDFGGFNFSQILPDPSKPSKRSFIEDLLFNKVTLADAGFIKQYGDCLGDISARDLICAQKFNGLTVLPPLLTDEMIAQYCSALLAGTITSGWTFGAGAALQIPFAMQMAYRFNGIGVTQNVLYENQKLIANQFNSAIGKIQDSLSSTASALGKLQDVVNQNAQALNTLVKQLSSNFGAISSVLNDILSRLDKVEAEVQIDRLITGRLQSLQTYVTQQLIRAAEIRASANLAATKMSECVLGQSKRVDFCGKGYHLMSFPQCAPHGVVFLHVTYVPAQEKNFTTAPAICHDGKAHFPREGVFVSNGTHWFVTQRNFYEPQIITTDNTFVSGNCDVVIGIVNNTVYDPLQPELDS

SEQ ID NO: 3606 - protein, 1147 aa, Artificial Sequence
  SARS-CoV-2/USA/NY-NYUMC7/2020__EPI_ISL_418192 spike protein (1-1147)(T874C_S1055C)
MFVFLVLLPLVSSQCVNLTTRTQLPPAYTNSFTRGVYYPDKVFRSSVLHSTQDLFLPFFSNVTWFHAIHVSGTNGTKRFDNPVLPFNDGVYFASTEKSNIIRGWIFGTTLDSKTQSLLIVNNATNVVIKVCEFQFCNDPFLGVYHHKNNKSWMESEFRVYSSANNCTFEYVSQPFLMDLEGKQGNFKNLREFVFKNIDGYFKIYSKHTPINLVRDLPQGFSALEPLVDLPIGINITRFQTLLALHRSYLTPGDSSSGWTAGAAAYYVGYLQPRTFLLKYNENGTITDAVDCALDPLSETKCTLKSFTVEKGIYQTSNFRVQPTESIVRFPNITNLCPFGEVFNATRFASVYAWNRKRISNCVADYSVLYNSASFSTFKCYGVSPTKLNDLCFTNVYADSFVIRGDEVRQIAPGQTGKIADYNYKLPDDFTGCVIAWNSNNLDSKVGGNYNYLYRLFRKSNLKPFERDISTEIYQAGSTPCNGVEGFNCYFPLQSYGFQPTNGVGYQPYRVVVLSFELLHAPATVCGPKKSTNLVKNKCVNFNFNGLTGTGVLTESNKKFLPFQQFGRDIADTTDAVRDPQTLEILDITPCSFGGVSVITPGTNTSNQVAVLYQGVNCTEVPVAIHADQLTPTWRVYSTGSNVFQTRAGCLIGAEHVNNSYECDIPIGAGICASYQTQTNSPRRARSVASQSIIAYTMSLGAENSVAYSNNSIAIPTNFTISVTTEILPVSMTKTSVDCTMYICGDSTECSNLLLQYGSFCTQLNRALTGIAVEQDKNTQEVFAQVKQIYKTPPIKDFGGFNFSQILPDPSKPSKRSFIEDLLFNKVTLADAGFIKQYGDCLGDIAARDLICAQKFNGLTVLPPLLTDEMIAQYCSALLAGTITSGWTFGAGAALQIPFAMQMAYRFNGIGVTQNVLYENQKLIANQFNSAIGKIQDSLSSTASALGKLQDVVNQNAQALNTLVKQLSSNFGAISSVLNDILSRLDKVEAEVQIDRLITGRLQSLQTYVTQQLIRAAEIRASANLAATKMSECVLGQSKRVDFCGKGYHLMSFPQCAPHGVVFLHVTYVPAQEKNFTTAPAICHDGKAHFPREGVFVSNGTHWFVTQRNFYEPQIITTDNTFVSGNCDVVIGIVNNTVYDPLQPELDS

SEQ ID NO: 3607 - protein, 1147 aa, Artificial Sequence
  SARS-CoV-2/Iceland/189/2020__EPI_ISL_417709 spike protein (1-1147)(T874C_S1055C)
MFVFLVLLPLVSSQCVNLTTRTQLPPAYTNSFTRGVYYPDKVFRSSVLHSTQDLFLPFFSNVTWFHAIHVSGTNGTKRFDNPVLPFNDGVYFASTEKSNIIRGWIFGTTLDSKTQSLLIVNNATNVVIKVCEFQFCNDPFLGVYYHKNNKSWMESEFRVYSSANNCTFEYVSQPFLMDLEGKQGNFKNLREFVFKNIDGYFKIYSKHTPINLVRDLPQGFSALEPLVDLPIGINITRFQTLLALHRSYLTPGDSSSGWTAGAAAYYVGYLQPRTFLLKYNENGTITDAVDCALDPLSETKCTLKSFTVEKGIYQTSNFRVQPTESIVRFPNITNLCPFGEVFNATRFASVYAWNRKRISNCVADYSVLYNSASFSTFKCYGVSPTKLNDLCFTNVYADSFVIRGDEVRQIAPGQTGKIADYNYKLPDDFTGCVIAWNSNNLDSKVGGNYNYLYRLFRKSNLKPFERDISTEIYQAGSTPCNGVEGFNCYFPLQSYGFQPTNGVGYQPYRVVVLSFELLHAPATVCGPKKSTNLVKNKCVNFNFNGLTGTGVLTESNKKFLPFQQFGRDIADTTDAVRDPQTLEILDITPCSFGGVSVITPGTNTSNQVAVLYQGVNCTEVPVAIHADQLTPTWRVYSTGSNVFQTRAGCLIGAEHVNNSYECDIPIGAGICASYQTQTNSPRRARSVASQSIIAYTMSLGAENSVAYSNNSIAIPTNFTISVTTEILPVSMTKTSVDCTMYICGDSTECSNLLLQYGSFCTQLNRALTGIAVEQDKNTQEVFAQVKQIYKTPPIKDFGGFNFSQILPDPSKPSKRSFIEDLLFNKVTLADAGFTKQYGDCLGDIAARDLICAQKFNGLTVLPPLLTDEMIAQYCSALLAGTITSGWTFGAGAALQIPFAMQMAYRFNGIGVTQNVLYENQKLIANQFNSAIGKIQDSLSSTASALGKLQDVVNQNAQALNTLVKQLSSNFGAISSVLNDILSRLDKVEAEVQIDRLITGRLQSLQTYVTQQLIRAAEIRASANLAATKMSECVLGQSKRVDFCGKGYHLMSFPQCAPHGVVFLHVTYVPAQEKNFTTAPAICHDGKAHFPREGVFVSNGTHWFVTQRNFYEPQIITTDNTFVSGNCDVVIGIVNNTVYDPLQPELDS

SEQ ID NO: 3608 - protein, 1147 aa, Artificial Sequence
  SARS-CoV-2/Australia/NSW56/2020__EPI_ISL_417408 spike protein (1-1147)(T874C_S1055C)
MFVFLVLLPLVSSQCVNLTTRTQLPPAYTNSFTRGVYYPDKVFRSSVLHSTQDLFLPFFSNVTWFHAIHVSGTNGTKRFDNPVLPFNDGVYFASTEKSNIIRGWIFGTTLDSKTQSLLIVNNATNVVIKVCEFQFCNDPFLGVYYHKNNKSWMESEFRVYSSANNCTFEYVSQPFLMDLEGKQGNFKNLREFVFKNIDGYFKIYSKHTPINLVRDLPQGFSALEPLVDLPIGINITRFQTLLALHRSYLTPGDSSSGWTAGAAAYYVGYLQPRTFLLKYNENGTITDAVDCALDPLSETKCTLKSFTVEKGIYQTSNFRVQPTESIVRFPNITNLCPFGEVFNATRFASVYAWNRKRISNCVADYSVLYNSASFSTFKCYGVSPTKLNDLCFTNVYADSFVIRGDEVRQIAPGQTGKIADYNYKLPDDFTGCVIAWNSNNLDSKVGGNYNYLYRLFRKSNLKPFERDISTEIYQAGSTPCNGVEGFNCYFPLQSYGFQPTNGVGYQPYRVVVLSFELLHAPATVCGPKKSTNLVKNKCVNFNFNGLTGTGVLTESNKKFLPFQQFGRDIADTTDAVRDPQTLEILDITPCSFGGVSVITPGTNTSNQVAVLYQDVNCTEVPVAIHADQLTPTWRVYSTGSNVFQTRAGCLIGAEHVNNSYECDIPIGAGICASYQTQTNSPRRARSVASQSIIAYTMSLGAENSVAYSNNSIAIPTNFTISVTTEILPVSMTKTSVDCTMYICGDSTECSNLLLQYGSFCTQLNRALTGIAVEQDKNTQEVFAQVKQIYKTPPIKDFGGFNFSQILPDSSKPSKRSFIEDLLFNKVTLADAGFIKQYGDCLGDIAARDLICAQKFNGLTVLPPLLTDEMIAQYCSALLAGTITSGWTFGAGAALQIPFAMQMAYRFNGIGVTQNVLYENQKLIANQFNSAIGKIQDSLSSTASALGKLQDVVNQNAQALNTLVKQLSSNFGAISSVLNDILSRLDKVEAEVQIDRLITGRLQSLQTYVTQQLIRAAEIRASANLAATKMSECVLGQSKRVDFCGKGYHLMSFPQCAPHGVVFLHVTYVPAQEKNFTTAPAICHDGKAHFPREGVFVSNGTHWFVTQRNFYEPQIITTDNTFVSGNCDVVIGIVNNTVYDPLQPELDS

SEQ ID NO: 3609 - protein, 1147 aa, Artificial Sequence
  SARS-CoV-2/Iceland/280/2020__EPI_ISL_417608 spike protein (1-1147)(T874C_S1055C)
MFVFLVLLPLVSSQCVNLTTRTQLPPAYTNSFTRGVYYPDKVFRSSVLHSTQDLFLPFFSNVTWFHAIHVSGTNGTKRFDNPVLPFNDGVYFASTEKSNIIRGWIFGTTLDSKTQSLLIVNNATNVVIKVCEFQFCNDPFLGVYYHKNNKSWMESEFRVYSSANNCTFEYVSQPFLMDLEGKQGNFKNLREFVFKNIDGYFKIYSKHTPINLVRDLPQGFSALEPLVDLPIGINITRFQTLLALHRSYLTPGDSSSGWTAGAAAYYVGYLQPRTFLLKYNENGTITDAVDCALDPLSETKCTLKSFTVEKGIYQTSNFRVQPTESIVRFPNITNLCPFGEVFNATRFASVYAWNRKRISNCVADYSVLYNSASFSTFKCYGVSPTKLNDLCFTNVYADSFVIRGDEVRQIAPGQTGKIADYNYKLPDDFTGCVIAWNSNNLDSKVGGNYNYLYRLFRKSNLKPFERDISTEIYQAGSTPCNGVEGFNCYFPLQSYGFQPTNGVGYQPYRVVVLSFELLHAPATVCGPKKSTNLVKNKCVNFNFNGLTGTGVLTESNKKFLPFQQFGRDIADTTDAVRDPQTLEILDITPCSFGGVSVITPGTNTSNQVAVLYQGVNCTEVPVAIHADQLTPTWRVYSTGSNVFQTRAGCLIGAEHVNNSYECDIPIGAGICASYHTQTNSPRRARSVASQSIIAYTMSLGAENSVAYSNNSIAIPTNFTISVTTEILPVSMTKTSVDCTMYICGDSTECSNLLLQYGSFCTQLNRALTGIAVEQDKNTQEVFAQVKQIYKTPPIKDFGGFNFSQILPDPSKPSKRSFIEDLLFNKVTLADAGFIKQYGDCLGDIAARDLICAQKFNGLTVLPPLLTDEMIAQYCSALLAGTITSGWTFGAGAALQIPFAMQMAYRFNGIGVTQNVLYENQKLIANQFNSAIGKIQDSLSSTASALGKLQDVVNQNAQALNTLVKQLSSNFGAISSVLNDILSRLDKVEAEVQIDRLITGRLQSLQTYVTQQLIRAAEIRASANLAATKMSECVLGQSKRVDFCGKGYHLMSFPQCAPHGVVFLHVTYVPAQEKNFTTAPAICHDGKAHFPREGVFVSNGTHWFVTQRNFYEPQIITTDNTFVSGNCDVVIGIVNNTVYDPLQPELDS

SEQ ID NO: 3610 - protein, 1147 aa, Artificial Sequence; identical to SEQ ID NO: 3565
  SARS-CoV-2/Iceland/247/2020__EPI_ISL_417575 spike protein (1-1147)(T874C_S1055C)

SEQ ID NO: 3611 - protein, 1147 aa, Artificial Sequence
  SARS-CoV-2/Iceland/238/2020__EPI_ISL_417566 spike protein (1-1147)(T874C_S1055C)
MFVFLVLLPLVSSQCVNLTTRTQLPPAYTNSFTRGVYYPDKVFRSSVLHSTQDLFLPFFSNVTWFHAIHVSGTNGTKRFDNPVLPFNDGVYFASTEKSNIIRGWIFGTTLDSKTQSLLIVNNATNVVIKVCEFQFCNDPFLGVYYHKNNKSWMESEFRVYSSANNCTFEYVSQPFLMDLEGKQGNFKNLREFVFKNIDGYFKIYSKHTPINLVRDLPQGFSALEPLVDLPIGINITRFQTLLALHRSYLTPGDSSSGWTAGAAAYYVGYLQPRTFLLKYNENGTITDAVDCALDPLSETKCTLKSFTVEKGIYQTSNFRVQPTESIVRFPNITNLCPFGEVFNATRFASVYAWNRKRISNCVADYSVLYNSASFSTFKCYGVSPTKLNDLCFTNVYADSFVIRGDEVRQIAPGQTGKIADYNYKLPDDFTGCVIAWNSNNLDSKVGGNYNYLYRLFRKSNLKPFERDISTEIYQAGSTPCNGVEGFNCYFPLQSYGFQPTNGVGYQPYRVVVLSFELLHAPATVCGPKKSTNLVKNKCVNFNFNGLTGTGVLTESNKKFLPFQQFGRDIADTTDAVRDPQTLEILDITPCSFGGVSVITPGTNTSNQVAVLYQGVNCTEVPVAIHADQLTPTWRVYSTGSNVFQTRAGCLIGAEHVNNSYECDIPIGAGICASYQTQTNSPRRARSVASQSIIAYTMSLGAENSVAYSNNSIAIPTNFTISVTTEILPVSMTKTSVDCTMYICGDSTECSNLLLQYGSFCTQLNRALTGIAVEQDKNTQEVFAQVKQIYKTPPIKDFGGFNFSQILPDPSKPSKRSFIEDLLFNKVTLADVGFIKQYGDCLGDIAARDLICAQKFNGLTVLPPLLTDEMIAQYCSALLAGTITSGWTFGAGAALQIPFAMQMAYRFNGIGVTQNVLYENQKLIANQFNSAIGKIQDSLSSTASALGKLQDVVNQNAQALNTLVKQLSSNFGAISSVLNDILSRLDKVEAEVQIDRLITGRLQSLQTYVTQQLIRAAEIRASANLAATKMSECVLGQSKRVDFCGKGYHLMSFPQCAPHGVVFLHVTYVPAQEKNFTTAPAICHDGKAHFPREGVFVSNGTHWFVTQRNFYEPQIITTDNTFVSGNCDVVIGIVNNTVYDPLQPELDS

SEQ ID NO: 3612 - protein, 1147 aa, Artificial Sequence
  SARS-CoV-2/Greece/16/2020__EPI_ISL_418265 spike protein (1-1147)(T874C_S1055C)
MFVFLVLLPLVSSQCVNLTTRTQLPPAYTNSFTRGVYYPDKVFRSSVLHSTQDLFLPFFSNVTWFHAIHVSGTNGTKRFDNPVLPFNDGVYFASTEKSNIIRGWIFGTTLDSKTQSLLIVNNATNVVIKVCEFQFCNDPFLGVYYHKNNKSWMESEFRVYSSANNCTFEYVSQPFLMDLEGKQGNFKNLREFVFKNVDGYFKIYSKHTPINLVRDLPQGFSALEPLVDLPIGINITRFQTLLALHRSYLTPGDSSSGWTAGAAAYYVGYLQPRTFLLKYNENGTITDAVDCALDPLSETKCTLKSFTVEKGIYQTSNFRVQPTESIVRFPNITNLCPFGEVFNATRFASVYAWNRKRISNCVADYSVLYNSASFSTFKCYGVSPTKLNDLCFTNVYADSFVIRGDEVRQIAPGQTGKIADYNYKLPDDFTGCVIAWNSNNLDSKVGGNYNYLYRLFRKSNLKPFERDISTEIYQAGSTPCNGVEGFNCYFPLQSYGFQPTNGVGYQPYRVVVLSFELLHAPATVCGPKKSTNLVKNKCVNFNFNGLTGTGVLTESNKKFLPFQQFGRDIADTTDAVRDPQTLEILDITPCSFGGVSVITPGTNTSNQVAVLYQDVNCTEVPVAIHADQLTPTWRVYSTGSNVFQTRAGCLIGAEHVNNSYECDIPIGAGICASYQTQTNSPRRARSVASQSIIAYTMSLGAENSVAYSNNSIAIPTNFTISVTTEILPVSMTKTSVDCTMYICGDSTECSNLLLQYGSFCTQLNRALTGIAVEQDKNTQEVFAQVKQIYKTPPIKDFGGFNFSQILPDPSKPSKRSFIEDLLFNKVTLADAGFIKQYGDCLGDIAARDLICAQKFNGLTVLPPLLTDEMIAQYCSALLAGTITSGWTFGAGAALQIPFAMQMAYRFNGIGVTQNVLYENQKLIANQFNSAIGKIQDSLSSTASALGKLQDVVNQNAQALNTLVKQLSSNFGAISSVLNDILSRLDKVEAEVQIDRLITGRLQSLQTYVTQQLIRAAEIRASANLAATKMSECVLGQSKRVDFCGKGYHLMSFPQCAPHGVVFLHVTYVPAQEKNFTTAPAICHDGKAHFPREGVFVSNGTHWFVTQRNFYEPQIITTDNTFVSGNCDVVIGIVNNTVYDPLQPELDS

SEQ ID NO: 3613 - protein, 1147 aa, Artificial Sequence
  SARS-CoV-2/Iceland/319/2020__EPI_ISL_417648 spike protein (1-1147)(T874C_S1055C)
MFVFLVLLPLVSSQCVNLTTRTQLPPAYTNSFTRGVYYPDKVFRSSVLHSTQDLFLPFFSNVTWFHAIHVSGTNGTKRFDNPVLPFNDGVYFASTEKSNIIRGWIFGTTLDSKTQSLLIVNNATNVVIKVCEFQFCNDPFLGVYYHKNNKSWMESEFRVYSSANNCTFEYVSQPFLIDLEGKQGNFKNLREFVFKNIDGYFKIYSKHTPINLVRDLPQGFSALEPLVDLPIGINITRFQTLLALHRSYLTPGDSSSGWTAGAAAYYVGYLQPRTFLLKYNENGTITDAVDCALDPLSETKCTLKSFTVEKGIYQTSNFRVQPTESIVRFPNITNLCPFGEVFNATRFASVYAWNRKRISNCVADYSVLYNSASFSTFKCYGVSPTKLNDLCFTNVYADSFVIRGDEVRQIAPGQTGKIADYNYKLPDDFTGCVIAWNSNNLDSKVGGNYNYLYRLFRKSNLKPFERDISTEIYQAGSTPCNGVEGFNCYFPLQSYGFQPTNGVGYQPYRVVVLSFELLHAPATVCGPKKSTNLVKNKCVNFNFNGLTGTGVLTESNKKFLPFQQFGRDIADTTDAVRDPQTLEILDITPCSFGGVSVITPGTNTSNQVAVLYQGVNCTEVPVAIHADQLTPTWRVYSTGSNVFQTRAGCLIGAEHVNNSYECDIPIGAGICASYQTQTNSPRRARSVASQSIIAYTMSLGAENSVAYSNNSIAIPTNFTISVTTEILPVSMTKTSVDCTMYICGDSTECSNLLLQYGSFCTQLNRALTGIAVEQDKNTQEVFAQVKQIYKTPPIKDFGGFNFSQILPDPSKPSKRSFIEDLLFNKVTLADAGFIKQYGDCLGDIAARDLICAQKFNGLTVLPPLLTDEMIAQYCSALLAGTITSGWTFGAGAALQIPFAMQMAYRFNGIGVTQNVLYENQKLIANQFNSAIGKIQDSLSSTASALGKLQDVVNQNAQALNTLVKQLSSNFGAISSVLNDILSRLDKVEAEVQIDRLITGRLQSLQTYVTQQLIRAAEIRASANLAATKMSECVLGQSKRVDFCGKGYHLMSFPQCAPHGVVFLHVTYVPAQEKNFTTAPAICHDGKAHFPREGVFVSNGTHWFVTQRNFYEPQIITTDNTFVSGNCDVVIGIVNNTVYDPLQPELDS

SEQ ID NO: 3614 - protein, 1147 aa, Artificial Sequence
  SARS-CoV-2/Congo/94/2020__EPI_ISL_417947 spike protein (1-1147)(T874C_S1055C)
MFVFLVLLPLVSSQCVNLTTRTQLPPAYTNSFTRGVYYPDKVFRSSVLHSTQDLFLPFFSNVTWFHAIHVSGTNGTKRFDNPVLPFNDGVYFASTEKSNIIRGWIFGTTLDSKTQSLLIVNNATNVVIKVCEFQFCNDPFLGVYYHKNNKSWMESEFRVYSSANNCTFEYVSQPFLMDLEGKQGNFKNLREFVFKNIDGYFKIYSKHTPINLVRDLPQGFSALEPLVDLPIGINITRFQTLLALHRSYLTPGDSSSGWTAGAAAYYVGYLQPRTFLLKYNENGTITDAVDCALDPLSETKCTLKSFTVEKGIYQTSNFRVQPTESIVRFPNITNLCPFGEVFNATRFASVYAWNRKRISNCVADYSVLYNSASFSTFKCYGVSPTKLNDLCFTNVYADSFVIRGDEVRQIAPGQTGKIADYNYKLPDDFTGCVIAWNSNNLDSKVGGNYNYLYRLFRKSNLKPFERDISTEIYQAGSTPCNGVEGFNCYFPLQSYGFQPTNGVGYQPYRVVVLSFELLHAPATVCGPKKSTNLVKNKCVNFNFNGLTGTGVLTESNKKFLPFQQFGRDIADTTDAVRDPQTLEILDITPCSFGGVSVITPGTNTSNQVAVLYQGVNCTEVPVAIHADQLTPTWRVYSTGSNVFQTRAGCLIGAEHVNNSYECDIPIGAGICASYQTQTNSPRRARSVASQSIIAYTMSLGAENSVAYSNNSIAIPTNFTISVTTEILPVSMTKTSVDCTMYICGDSTECSNLLLQYGSFCTQLNRALTGIAVEQDKNTQEVFAQVKQIYKTPPIKDFGGFNFSQILPDPSKPSKRSFIEDILFNKVTLADAGFIKQYGDCLGDIAARDLICAQKFNGLTVLPPLLTDEMIAQYCSALLAGTITSGWTFGAGAALQIPFAMQMAYRFNGIGVTQNVLYENQKLIANQFNSAIGKIQDSLSSTASALGKLQDVVNQNAQALNTLVKQLSSNFGAISSVLNDILSRLDKVEAEVQIDRLITGRLQSLQTYVTQQLIRAAEIRASANLAATKMSECVLGQSKRVDFCGKGYHLMSFPQCAPHGVVFLHVTYVPAQEKNFTTAPAICHDGKAHFPREGVFVSNGTHWFVTQRNFYEPQIITTDNTFVSGNCDVVIGIVNNTVYDPLQPELDS

SEQ ID NO: 3615 - protein, 1147 aa, Artificial Sequence
  SARS-CoV-2/Congo/158/2020__EPI_ISL_417950 spike protein (1-1147)(T874C_S1055C)
MFVFLVLLPLVSSQCVNLTTRTQLPPAYTNSFTRGVYYPDKVFRSSVLHSTQDLFLPFFSNVTWFHAIHVSGTNGTKRFDNPVLPFNDGVYFASTEKSNIIRGWIFGTTLDSKTQSLLIVNNATNVVIKVCEFQFCNDPFLGVYYHKNNKSWMESEFRVYSSANNCTFEYVSQPFLMDLEGKQGNFKNLREFVFKNIDGYFKIYSKHTPINLVRDLPQGFSALEPLVDLPIGINITRFQTLLALHRSYLTPGDSSSGWTAGAAAYYVGYLQPRTFLLKYNENGTITDAVDCALDPLSETKCTLKSFTVEKGIYQTSNFRVQPTESIVRFPNITNLCPFGEVFNATRFASVYAWNRKRISNCVADYSVLYNSASFSTFKCYGVSPTKLNDLCFTNVYADSFVIRGDEVRQIAPGQTGKIADYNYKLPDDFTGCVIAWNSNNLDSKVGGNYNYLYRLFRKSNLKPFERDISTEIYQAGSTPCNGVEGFNCYFPLQSYGFQPTNGVGYQPYRVVVLSFELLHAPATVCGPKKSTNLVKNKCVNFNFNGLTGTGVLTESNKKFLPFQQFGRDIADTTDAVRDPQTLEILDITPCSFGGVSVITPGTNTSNQVAVLYQDVNCTEVPVAIHADQLTPTWRVYSTGSNVFQTRAGCLIGAEHVNNSYECDIPIGAGICASYQTQTNSPRRARSVASQSIIAYTMSLGAENSVAYSNNSIAIPTNFTISVTTEILPVSMTKTSVDCTMYICGDSTECSNLLLQYGSFCTQLNRALTGIAVEQDKNTQEVFAQVKQIYKTPPIKDFGGFNFSQILPDPSKPSKRSFIEDLLFNKVTLADAGFIKQYGDCLGDIAARDLICAQKFNGLTVLPPLLTDEMIAQYCSALLAGTITSGWTFGAGAALQIPFAMQMAYRFNGIGVTQNVLYENQKLIANQFNSAIGKIQDSLSSTASALGKLQDVVNQNAQALNTLVKQLSSNFGAISSVLNDILSRLDKVEAEVQIDRLITGRLQSLQTYVTQQLIRAAEIRASANLAATKMSECVLGQSKRVDFCGKGYHLMSFPQCAPHGVVFLHVTYVPAQEKNFTTAPAICHDGKAHFPREGVFVSNGTHWFVTQRNFYEPQIITTDNTFLSGNCDVVIGIVNNTVYDPLQPELDS

SEQ ID NO: 3616 - protein, 1147 aa, Artificial Sequence
  SARS-CoV-2/USA/UT-00034/2020__EPI_ISL_417977 spike protein (1-1147)(T874C_S1055C)
MFVFLVLLPLVSSQCVNLTTRTQLPPAYTNSFTRGVYYPDKVFRSSVLHSTQDLFLPFFSNVTWFHAIHVSGTNGTKRFDNPVLPFNDGVYFASTEKSNIIRGWIFGTTLDSKTQSLLIVNNATNVVIKVCEFQFCNDPFLGVYYYKNNKSWMESEFRVYSSANNCTFEYVSQPFLMDLEGKQGNFKNLREFVFKNIDGYFKIYSKHTPINLVRDLPQGFSALEPLVDLPIGINITRFQTLLALHRSYLTPGDSSSGWTAGAAAYYVGYLQPRTFLLKYNENGTITDAVDCALDPLSETKCTLKSFTVEKGIYQTSNFRVQPTESIVRFPNITNLCPFGEVFNATRFASVYAWNRKRISNCVADYSVLYNSASFSTFKCYGVSPTKLNDLCFTNVYADSFVIRGDEVRQIAPGQTGKIADYNYKLPDDFTGCVIAWNSNNLDSKVGGNYNYLYRLFRKSNLKPFERDISTEIYQAGSTPCNGVEGFNCYFPLQSYGFQPTNGVGYQPYRVVVLSFELLHAPATVCGPKKSTNLVKNKCVNFNFNGLTGTGVLTESNKKFLPFQQFGRDIADTTDAVRDPQTLEILDITPCSFGGVSVITPGTNTSNQVAVLYQGVNCTEVPVAIHADQLTPTWRVYSTGSNVFQTRAGCLIGAEHVNNSYECDIPIGAGICASYQTQTNSPRRARSVASQSIIAYTMSLGAENSVAYSNNSIAIPTNFTISVTTEILPVSMTKTSVDCTMYICGDSTECSNLLLQYGSFCTQLNRALTGIAVEQDKNTQEVFAQVKQIYKTPPIKDFGGFNFSQILPDPSKPSKRSFIEDLLFNKVTLADAGFIKQYGDCLGDIAARDLICAQKFNGLTVLPPLLTDEMIAQYCSALLAGTITSGWTFGAGAALQIPFAMQMAYRFNGIGVTQNVLYENQKLIANQFNSAIGKIQDSLSSTASALGKLQDVVNQNAQALNTLVKQLSSNFGAISSVLNDILSRLDKVEAEVQIDRLITGRLQSLQTYVTQQLIRAAEIRASANLAATKMSECVLGQSKRVDFCGKGYHLMSFPQCAPHGVVFLHVTYVPAQEKNFTTAPAICHDGKAHFPREGVFVSNGTHWFVTQRNFYEPQIITTDNTFVSGNCDVVIGIVNNTVYDPLQPELDS

SEQ ID NO: 3617 - protein, 1147 aa, Artificial Sequence
  SARS-CoV-2/USA/UT-00033/2020__EPI_ISL_417976 spike protein (1-1147)(T874C_S1055C)
MFVFLVLLPLVSSQCVNLTTRTQLPPAYTNSFTRGVYYPDKVFRSSVLHSTQDLFLPFFSNVTWFHAIHVSGTNGTKRFDNPVLPFNDGVYFASTEKSNIIRGWIFGTTLDSKTQSLLIVNNATNVVIKVCEFQFCNDPFLGVYYHKNNKSWMESEFRVYSSANNCTFEYVSQPFLMDLEGKQGNFKNLREFVFKNIDGYFKIYSKHTPINLVRDLPQGFSALEPLVDLPIGINITRFQTLLALHRSYLTPGDSSSGLTAGAAAYYVGYLQPRTFLLKYNENGTITDAVDCALDPLSETKCTLKSFTVEKGIYQTSNFRVQPTESIVRFPNITNLCPFGEVFNATRFASVYAWNRKRISNCVADYSVLYNSASFSTFKCYGVSPTKLNDLCFTNVYADSFVIRGDEVRQIAPGQTGKIADYNYKLPDDFTGCVIAWNSNNLDSKVGGNYNYLYRLFRKSNLKPFERDISTEIYQAGSTPCNGVEGFNCYFPLQSYGFQPTNGVGYQPYRVVVLSFELLHAPATVCGPKKSTNLVKNKCVNFNFNGLTGTGVLTESNKKFLPFQQFGRDIADTTDAVRDPQTLEILDITPCSFGGVSVITPGTNTSNQVAVLYQGVNCTEVPVAIHADQLTPTWRVYSTGSNVFQTRAGCLIGAEHVNNSYECDIPIGAGICASYQTQTNSPRRARSVASQSIIAYTMSLGAENSVAYSNNSIAIPTNFTISVTTEILPVSMTKTSVDCTMYICGDSTECSNLLLQYGSFCTQLNRALTGIAVEQDKNTQEVFAQVKQIYKTPPIKDFGGFNFSQILPDPSKPSKRSFIEDLLFNKVTLADAGFIKQYGDCLGDIAARDLICAQKFNGLTVLPPLLTDEMIAQYCSALLAGTITSGWTFGAGAALQIPFAMQMAYRFNGIGVTQNVLYENQKLIANQFNSAIGKIQDSLSSTASALGKLQDVVNQNAQALNTLVKQLSSNFGAISSVLNDILSRLDKVEAEVQIDRLITGRLQSLQTYVTQQLIRAAEIRASANLAATKMSECVLGQSKRVDFCGKGYHLMSFPQCAPHGVVFLHVTYVPAQEKNFTTAPAICHDGKAHFPREGVFVSNGTHWFVTQRNFYEPQIITTDNTFVSGNCDVVIGIVNNTVYDPLQPELDS

SEQ ID NO: 3618 - protein, 1147 aa, Artificial Sequence
  SARS-CoV-2/USA/WI-13/2020__EPI_ISL_417516 spike protein (1-1147)(T874C_S1055C)
MFVFLVLLPLVSSQCVNLTTRTQLPPAYTNSFTRGVYYPDKVFRSSVLHSTQDLFLPFFSNVTWFHAIHVSGTNGTKRFDNPVLPFNDGVYFASTEKSNIIRGWIFGTTLDSKTQSLLIVNNATNVVIKVCEFQFCNDPFLGVYYHKNNKSWMESEFRVYSSANNCTFEYVSQPFLMDLEGKQGNFKNLREFVFKNIDGYFKIYSKHTPINLVRDLPQGFSALEPLVDLPIGINITRFQTLLALHRSYLTPGDSSSGWTAGAAAYYVGYLQPRTFLLKYNENGTITDAVDCALDPLSETKCTLKSFTVEKGIYQTSNFRVLPTESIVRFPNITNLCPFGEVFNATRFASVYAWNRKRISNCVADYSVLYNSASFSTFKCYGVSPTKLNDLCFTNVYADSFVIRGDEVRQIAPGQTGKIADYNYKLPDDFTGCVIAWNSNNLDSKVGGNYNYLYRLFRKSNLKPFERDISTEIYQAGSTPCNGVEGFNCYFPLQSYGFQPTNGVGYQPYRVVVLSFELLHAPATVCGPKKSTNLVKNKCVNFNFNGLTGTGVLTESNKKFLPFQQFGRDIADTTDAVRDPQTLEILDITPCSFGGVSVITPGTNTSNQVAVLYQGVNCTEVPVAIHADQLTPTWRVYSTGSNVFQTRAGCLIGAEHVNNSYECDIPIGAGICASYQTQTNSPRRARSVASQSIIAYTMSLGAENSVAYSNNSIAIPTNFTISVTTEILPVSMTKTSVDCTMYICGDSTECSNLLLQYGSFCTQLNRALTGIAVEQDKNTQEVFAQVKQIYKTPPIKDFGGFNFSQILPDPSKPSKRSFIEDLLFNKVTLADAGFIKQYGDCLGDIAARDLICAQKFNGLTVLPPLLTDEMIAQYCSALLAGTITSGWTFGAGAALQIPFAMQMAYRFNGIGVTQNVLYENQKLIANQFNSAIGKIQDSLSSTASALGKLQDVVNQNAQALNTLVKQLSSNFGAISSVLNDILSRLDKVEAEVQIDRLITGRLQSLQTYVTQQLIRAAEIRASANLAATKMSECVLGQSKRVDFCGKGYHLMSFPQCAPHGVVFLHVTYVPAQEKNFTTAPAICHDGKAHFPREGVFVSNGTHWFVTQRNFYEPQIITTDNTFVSGNCDVVIGIVNNTVYDPLQPELDS

SEQ ID NO: 3619 - protein, 1146 aa, Artificial Sequence
  SARS-CoV-2/India/1-27/2020__EPI_ISL_413522 spike protein (1-1146)(T873C_S1054C)
MFVFLVLLPLVSSQCVNLTTRTQLPPAYTNSFTRGVYYPDKVFRSSVLHSTQDLFLPFFSNVTWFHAIHVSGTNGTKRFDNPVLPFNDGVYFASTEKSNIIRGWIFGTTLDSKTQSLLIVNNATNVVIKVCEFQFCNDPFLGVYHKNNKSWMESEFRVYSSANNCTFEYVSQPFLMDLEGKQGNFKNLREFVFKNIDGYFKIYSKHTPINLVRDLPQGFSALEPLVDLPIGINITRFQTLLALHRSYLTPGDSSSGWTAGAAAYYVGYLQPRTFLLKYNENGTITDAVDCALDPLSETKCTLKSFTVEKGIYQTSNFRVQPTESIVRFPNITNLCPFGEVFNATRFASVYAWNRKRISNCVADYSVLYNSASFSTFKCYGVSPTKLNDLCFTNVYADSFVIRGDEVIQIAPGQTGKIADYNYKLPDDFTGCVIAWNSNNLDSKVGGNYNYLYRLFRKSNLKPFERDISTEIYQAGSTPCNGVEGFNCYFPLQSYGFQPTNGVGYQPYRVVVLSFELLHAPATVCGPKKSTNLVKNKCVNFNFNGLTGTGVLTESNKKFLPFQQFGRDIADTTDAVRDPQTLEILDITPCSFGGVSVITPGTNTSNQVAVLYQDVNCTEVPVAIHADQLTPTWRVYSTGSNVFQTRAGCLIGAEHVNNSYECDIPIGAGICASYQTQTNSPRRARSVASQSIIAYTMSLGAENSVAYSNNSIAIPTNFTISVTTEILPVSMTKTSVDCTMYICGDSTECSNLLLQYGSFCTQLNRALTGIAVEQDKNTQEVFAQVKQIYKTPPIKDFGGFNFSQILPDPSKPSKRSFIEDLLFNKVTLADAGFIKQYGDCLGDIAARDLICAQKFNGLTVLPPLLTDEMIAQYCSALLAGTITSGWTFGAGAALQIPFAMQMAYRFNGIGVTQNVLYENQKLIANQFNSAIGKIQDSLSSTASALGKLQDVVNQNAQALNTLVKQLSSNFGAISSVLNDILSRLDKVEAEVQIDRLITGRLQSLQTYVTQQLIRAAEIRASANLAATKMSECVLGQSKRVDFCGKGYHLMSFPQCAPHGVVFLHVTYVPAQEKNFTTAPAICHDGKAHFPREGVFVSNGTHWFVTQRNFYEPQIITTDNTFVSGNCDVVIGIVNNTVYDPLQPELDS

SEQ ID NO: 3620 - protein, 1141 aa, Artificial Sequence
  SARS-CoV-2/pangolin/Guangxi/P4L/2017__EPI_ISL_410538 spike protein (1-1141)(T868C_S1049C)
MFVFLFVLPLVSSQCVNLTTRTGIPPGYTNSSTRGVYYPDKVFRSSILHLTQDLFLPFFSNVTWFNTINYQGGFKKFDNPVLPFNDGVYFASTEKSNIIRGWIFGTTLDARTQSLLIVNNATNVVIKVCEFQFCTDPFLGVYYHNNNKTWVENEFRVYSSANNCTFEYISQPFLMDLEGKQGNFKNLREFVFKNVDGYFKIYSKHTPIDLVRDLPRGFAALEPLVDLPIGINITRFQTLLALHRSYLTPGNLESGWTTGAAAYYVGYLQQRTFLLSYNQNGTITDAVDCSLDPLSETKCTLKSLTVEKGIYQTSNFRVQPTISIVRFPNITNLCPFGEVFNASKFASVYAWNRKRISNCVADYSVLYNSTSFSTFKCYGVSPTKLNDLCFTNVYADSFVVKGDEVRQIAPGQTGVIADYNYKLPDDFTGCVIAWNSVKQDALTGGNYGYLYRLFRKSKLKPFERDISTEIYQAGSTPCNGQVGLNCYYPLERYGFHPTTGVNYQPFRVVVLSFELLNGPATVCGPKLSTTLVKDKCVNFNFNGLTGTGVLTTSKKQFLPFQQFGRDISDTTDAVRDPQTLEILDITPCSFGGVSVITPGTNTSNQVAVLYQDVNCTEVPMAIHAEQLTPAWRVYSAGANVFQTRAGCLVGAEHVNNSYECDIPVGAGICASYHSMSSLRSVNQRSIIAYTMSLGAENSVAYSNNSIAIPTNFTISVTTEILPVSMTKTSVDCTMYICGDSIECSNLLLQYGSFCTQLNRALTGIAVEQDKNTQEVFAQVKQIYKTPPIKDFGGFNFSQILPDPSKPSKRSFIEDLLFNKVTLADAGFIKQYGDCLGDIAARDLICAQKFNGLTVLPPLLTDEMIAQYCSALLAGTITSGWTFGAGAALQIPFAMQMAYRFNGIGVTQNVLYENQKLIANQFNSAIGKIQDSLSSTASALGKLQDVVNQNAQALNTLVKQLSSNFGAISSVLNDILSRLDKVEAEVQIDRLITGRLQSLQTYVTQQLIRAAEIRASANLAATKMSECVLGQSKRVDFCGKGYHLMSFPQCAPHGVVFLHVTYVPAQEKNFTTAPAICHEGKAHFPREGVFVSNGTHWFITQRNFYEPQIITTDNTFVSGSCDVVIGIVNNTVYDPLQPELDS

SEQ ID NO: 3621 - protein, 1141 aa, Artificial Sequence
  SARS-CoV-2/pangolin/Guangxi/P5L/2017__EPI_ISL_410540 spike protein (1-1141)(T868C_S1049C)
MFVFLFVLPLVSSQCVNLTTRTGIPPGYTNSSTRGVYYPDKVFRSSILHLTQDLFLPFFSNVTWFNTINYQGGFKKFDNPVLPFNDGVYFASTEKSNIIRGWIFGTTLDARTQSLLIVNNATNVVIKVCEFQFCTDPFLGVYYHNNNKTWVENEFRVYSSANNCTFEYISQPFLMDLEGKQGNFKNLREFVFKNVDGYFKIYSKHTPIDLVRDLPRGFAALEPLVDLPIGINITRFQTLLALHRSYLTPGKLESGWTTGAAAYYVGYLQQRTFLLSYNQNGTITDAVDCSLDPLSETKCTLKSLTVEKGIYQTSNFRVQPTISIVRFPNITNLCPFGEVFNASKFASVYAWNRKRISNCVADYSVLYNSTSFSTFKCYGVSPTKLNDLCFTNVYADSFVVKGDEVRQIAPGQTGVIADYNYKLPDDFTGCVIAWNSVKQDALTGGNYGYLYRLFRKSKLKPFERDISTEIYQAGSTPCNGQVGLNCYYPLERYGFHPTTGVNYQPFRVVVLSFELLNGPATVCGPKLSTTLVKDKCVNFNFNGLTGTGVLTTSKKQFLPFQQFGRDISDTTDAVRDPQTLEILDITPCSFGGVSVITPGTNTSNQVAVLYQDVNCTEVPMAIHAEQLTPAWRVYSAGANVFQTRAGCLVGAEHVNNSYECDIPVGAGICASYHSMSSFRSVNQRSIIAYTMSLGAENSVAYSNNSIAIPTNFTISVTTEILPVSMTKTSVDCTMYICGDSIECSNLLLQYGSFCTQLNRALTGIAVEQDKNTQEVFAQVKQIYKTPPIKDFGGFNFSQILPDPSKPSKRSFIEDLLFNKVTLADAGFIKQYGDCLGDIAARDLICAQKFNGLTVLPPLLTDEMIAQYCSALLAGTITSGWTFGAGAALQIPFAMQMAYRFNGIGVTQNVLYENQKLIANQFNSAIGKIQDSLSSTASALGKLQDVVNQNAQALNTLVKQLSSNFGAISSVLNDILSRLDKVEAEVQIDRLITGRLQSLQTYVTQQLIRAAEIRASANLAATKMSECVLGQSKRVDFCGKGYHLMSFPQCAPHGVVFLHVTYVPAQEKNFTTAPAICHEGKAHFPREGVFVSNGTHWFITQRNFYEPQIITTDNTFVSGSCDVVIGIVNNTVYDPLQPELDS

SEQ ID NO: 3622 - protein, 1141 aa, Artificial Sequence
  SARS-CoV-2/pangolin/Guangxi/P5E/2017__EPI_ISL_410541 spike protein (1-1141)(T868C_S1049C)
MFVFLFVLPLVSSQCVNLTTRTGIPPGYTNSSTRGVYYPDKVFRSSILHLTQDLFLPFFSNVTWFNTITYQGGSKKFDNPVLPFNDGVYFASTEKSNIIRGWIFGTTLDARTQSLLIVNNATNVVIKVCEFQFCTDPFLGVYYHNNNKTWVENEFRVYSSANNCTFEYISQPFLMDLEGKQGNFKNLREFVFKNVDGYFKIYSKHTPIDLVRDLPRGFAALEPLVDLPIGINITRFQTLLALHRSYLTPGKLESGWTTGAAAYYVGYLQQRTFLLSYNQNGTITDAVDCSLDPLSETKCTLKSLTVEKGIYQTSNFRVQPTISIVRFPNITNLCPFGEVFNASKFASVYAWNRKRISNCVADYSVLYNSTSFSTFKCYGVSPTKLNDLCFTNVYADSFVVKGDEVRQIAPGQTGVIADYNYKLPDDFTGCVIAWNSVKQDALTGDNYGYLYRLFRKSKLKPFERDISTEIYQAGSTPCNGQVGLNCYYPLERYGFHPTTGVNYQPFRVVVLSFELLNGPATVCGPKLSTTLVKDKCVNFNFNGLTGTGVLTTSKKQFLPFQQFGRDISDTTDAVRDPQTLEILDITPCSFGGVSVITPGTNTSNQVAVLYQDVNCTEVPMAIHAEQLTPAWRVYSAGANVFQTRAGCLVGAEHVNNSYECDIPVGAGICASYHSMSSFRSVNQRSIIAYTMSLGAENSVAYSNNSIAIPTNFTISVTTEILPVSMTKTSVDCTMYICGDSIECSNLLLQYGSFCTQLNRALTGIAVEQDKNTQEVFAQVKQIYKTPPIKDFGGFNFSQILPDPSKPSKRSFIEDLLFNKVTLADAGFIKQYGDCLGDIAARDLICAQKFNGLTVLPPLLTDEMIAQYCSALLAGTITSGWTFGAGAALQIPFAMQMAYRFNGIGVTQNVLYENQKLIANQFNSAIGKIQDSLSSTASALGKLQDVVNQNAQALNTLVKQLSSNFGAISSVLNDILSRLDKVEAEVQIDRLITGRLQSLQTYVTQQLIRAAEIRASANLAATKMSECVLGQSKRVDFCGKGYHLMSFPQCAPHGVVFLHVTYVPAQEKNFTTAPAICHEGKAHFPREGVFVSNGTHWFITQRNFYEPQIITTDNTFVSGSCDVVIGIVNNTVYDPLQPELDS

SEQ ID NO: 3623 - protein, 1139 aa, Artificial Sequence
  SARS-CoV-2/pangolin/Guangxi/P1E/2017__EPI_ISL_410539 spike protein (1-1139)(T866C_S1047C)
MFVFLFVLPLVSSQCVNLTTRTGIQPGYTNSSTRGVYYPDKVFRSSILHLTQDLFLPFFSNVTWFNTINYQGGFKKFDNPVLPFNDGVYFASTEKSNIIRGWIFGTTLDARTQSLLIVNNATNVVIKVCEFQFCTDPFLGVYYHNNNKTWVENEFRVYSSANNCTFEYISQPFLMDLEGKQGNFKNLREFVFKNVDGYFKIYSKHTPIDLVRDLPRGFAALEPLVDLPIGINITRFQTLLALHRSYLTPGKLESGWTTGAAAYYVGYLQQRTFLLSYNQNGTITDAVDCSLDPLSETKCTLKSLTVEKGIYQTSNFRVQPTISIVRFPNITNLCPFGEVFNASKFASVYAWNRKRISNCVADYSVLYNSTSFSTFKCYGVSPTKLNDLCFTNVYADSFVVKGDEVRQIAPGQTGVIADYNYKLPDDFTGCVIAWNSVKQDALTGGNYLYRLFRKSKLKPFERDISTEIYQAGSTPCNGQVGLNCYYPLERYGFHPTTGVNYQPFRVVVLSFELLNGPATVCGPKLSTTLVKDKCVNFNFNGLTGTGVLTTSKKQFLPFQQFGRDISDTTDAVRDPQTLEILDITPCSFGGVSVITPGTNTSNQVAVLYQDVNCTEVPMAIHAEQLTPAWRVYSAGANVFQTRAGCLVGAEHVNNSYECDIPVGAGICASYHSMSSLRSVNQRSIIAYTMSLGAENSVAYSNNSIAIPTNFTISVTTEILPVSMTKTSVDCTMYICGDSIECSNLLLQYGSFCTQLNRALTGIAVEQDKNTQEVFAQVKQIYKTPPIKDFGGFNFSQILPDPSKPSKRSFIEDLLFNKVTLADAGFIKQYGDCLGDIAARDLICAQKFNGLTVLPPLLTDEMIAQYCSALLAGTITSGWTFGAGAALQIPFAMQMAYRFNGIGVTQNVLYENQKLIANQFNSAIGKIQDSLSSTASALGKLQDVVNQNAQALNTLVKQLSSNFGAISSVLNDILSRLDKVEAEVQIDRLITGRLQSLQTYVTQQLIRAAEIRASANLAATKMSECVLGQSKRVDFCGKGYHLMSFPQCAPHGVVFLHVTYVPAQEKNFTTAPAICHEGKAHFPREGVFVSNGTHWFITQRNFYEPQIITTDNTFVSGSCDVVIGIVNNTVYDPLQPELDS

SEQ ID NO: 3624 - protein, 1371 aa, Artificial Sequence; identical to SEQ ID NO: 58
  SARS-CoV-2/Wuhan/WIV05/2019__EPI_ISL_402128 spike protein (1-1211) LumSynth construct

SEQ ID NO: 3625 - protein, 1367 aa, Artificial Sequence; identical to SEQ ID NO: 59
  SARS-CoV-2/bat/Yunnan/RaTG13/2013__EPI_ISL_402131 spike protein (1-1207) LumSynth construct

SEQ ID NO: 3626 - protein, 1371 aa, Artificial Sequence; identical to SEQ ID NO: 60
  SARS-CoV-2/Wuhan/HBCDC-HB-01/2019__EPI_ISL_402132 spike protein (1-1211) LumSynth construct

SEQ ID NO: 3627 - protein, 1371 aa, Artificial Sequence; identical to SEQ ID NO: 61
  SARS-CoV-2/Guangdong/20SF028/2020__EPI_ISL_403936 spike protein (1-1211) LumSynth construct

SEQ ID NO: 3628 - protein, 1371 aa, Artificial Sequence; identical to SEQ ID NO: 62
  SARS-CoV-2/Shenzhen/SZTH-001/2020__EPI_ISL_406592 spike protein (1-1211) LumSynth construct

SEQ ID NO: 3629 - protein, 1371 aa, Artificial Sequence; identical to SEQ ID NO: 63
  SARS-CoV-2/Shenzhen/SZTH-004/2020__EPI_ISL_406595 spike protein (1-1211) LumSynth construct

SEQ ID NO: 3630 - protein, 1371 aa, Artificial Sequence; identical to SEQ ID NO: 64
  SARS-CoV-2/France/IDF0372/2020__EPI_ISL_406596 spike protein (1-1211) LumSynth construct

SEQ ID NO: 3631 - protein, 1371 aa, Artificial Sequence; identical to SEQ ID NO: 65
  SARS-CoV-2/Australia/VIC01/2020__EPI_ISL_406844 spike protein (1-1211) LumSynth construct

SEQ ID NO: 3632 - protein, 1371 aa, Artificial Sequence; identical to SEQ ID NO: 66
  SARS-CoV-2/Germany/BavPat1/2020__EPI_ISL_406862 spike protein (1-1211) LumSynth construct

SEQ ID NO: 3633 - protein, 1371 aa, Artificial Sequence
  SARS-CoV-2/Wuhan/HBCDC-HB-02/2020__EPI_ISL_412978 spike protein (1-1211) LumSynth construct
MFVFLVLLPLVSSQCVNLTTRTQLPPAYTNSFTRGVYYPDKVFRSSVLHSTQDLFLPFFSNVTWFHAIHVSGTNGTKRFDNPVLPFNDGVYFASTEKSNIIRGWIFGTTLDSKTQSLLIVNNATNVVIKVCEFQFCNDPFLGVYYHKNNKSWMESEFRVYSSANNCTFEYVSQPFLMDLEGKQGNFKNLREFVFKNIDGYFKIYSKHTPINLVRDLPQGFSALEPLVDLPIGINITRFQTLLALHRSYLTPGDSSSGWTAGAAAYYVGYLQPRTFLLKYNENGTITDAVDCALDPLSETKCTLKSFTVEKGIYQTSNFRVQPTESIVRFPNITNLCPFGEVFNATRFASVYAWNRKRISNCVADYSVLYNSASFSTFKCYGVSPTKLNDLCFTNVYADSFVIRGDEVRQIAPGQTGKIADYNYKLPDDFTGCVIAWNSNNLDSKVGGNYNYLYRLFRKSNLKPFERDISTEIYQAGSTPCNGVEGFNCYFPLQSYGFQPTNGVGYQPYRVVVLSFELLHAPATVCGPKKSTNLVKNKCVNFNFNGLTGTGVLTESNKKFLPFQQFGRDIADTTDAVRDPQTLEILDITPCSFGGVSVITPGTNTSNQVAVLYQDVNCTEVPVAIHADQLTPTWRVYSTGSNVFQTRAGCLIGAEHVNNSYECDIPIGAGICASYQTQTNSPRRARSVASQSIIAYTMSLGAENSVAYSNNSIAIPTNFTISVTTEILPVSMTKTSVDCTMYICGDSTECSNFLLQYGSFCTQLNRALTGIAVEQDKNTQEVFAQVKQIYKTPPIKDFGGFNFSQILPDPSKPSKRSFIEDLLFNKVTLADAGFIKQYGDCLGDIAARDLICAQKFNGLTVLPPLLTDEMIAQYTSALLAGTITSGWTFGAGAALQIPFAMQMAYRFNGIGVTQNVLYENQKLIANQFNSAIGKIQDSLSSTASALGKLQDVVNQNAQALNTLVKQLSSNFGAISSVLNDILSRLDKVEAEVQIDRLITGRLQSLQTYVTQQLIRAAEIRASANLAATKMSECVLGQSKRVDFCGKGYHLMSFPQSAPHGVVFLHVTYVPAQEKNFTTAPAICHDGKAHFPREGVFVSNGTHWFVTQRNFYEPQIITTDNTFVSGNCDVVIGIVNNTVYDPLQPELDSFKEELDKYFKNHTSPDVDLGDISGINASVVNIQKEIDRLNEVAKNLNESLIDLQELGKYEQYIKGGGSGGGQIYEGKLTAEGLRFGIVASRFNHALVDRLVEGAIDAIVRHGGREEDITLVRVPGSWEIPVAAGELARKEDIDAVIAIGVLIRGATPHFDYIASEVSKGLADLSLELRKPITFGVITADTLEQAIERAGTKHGNKGWEAALSAIEMANLFKSLR

SEQ ID NO: 3634 - protein, 1371 aa, Artificial Sequence
  SARS-CoV-2/Australia/QLD02/2020__EPI_ISL_407896 spike protein (1-1211) LumSynth construct
MFVFLVLLPLVSSQCVNLTTRTQLPPAYTNSFTRGVYYPDKVFRSSVLHSTQDLFLPFFSNVTWFHAIHVSGTNGTKRFDNPVLPFNDGVYFASTEKSNIIRGWIFGTTLDSKTQSLLIVNNATNVVIKVCEFQFCNDPFLGVYYHKNNKSWMESEFRVYSSANNCTFEYVSQPFLMDLEGKQGNFKNLREFVFKNIDGYFKIYSKHTPINLVRDLPQGFSALEPLVDLPIGINITRFQTLLALHRSYLTPGDSSSGWTAGAAAYYVGYLQPRTFLLKYNENGTITDAVDCALDPLSETKCTLKSFTVEKGIYQTSNFRVQPTESIVRFPNITNLCPFGEVFNATRFASVYAWNRKRISNCVADYSVLYNSASFSTFKCYGVSPTKLNDLCFTNVYADSFVIRGDEVRQIAPGQTGKIADYNYKLPDDFTGCVIAWNSNNLDSKVGGNYNYLYRLFRKSNLKPFERDISTEIYQAGSTPCNGVEGFNCYFPLQSYGFQPTNGVGYQPYRVVVLSFELLHAPATVCGPKKSTNLVKNKCVNFNFNGLTGTGVLTESNKKFLPFQQFGRDIADTTDAVRDPQTLEILDITPCSFGGVSVITPGTNTSNQVAVLYQDVNCTEVPVAIHADQLTPTWRVYSTGSNVFQTRAGCLIGAEHVNNSYECDIPIGAGICASYQTQTNSPRRARSVASQSIIAYTMSLGAENSVAYSNNSIAIPTNFTISVTTEILPVSMTKTSVDCTMYICGDSTECSNLLLQYGSFCTQLNRALTGIAVEQDKNTQEVFAQVKQIYKTPPIKDFGGFNFSQILPDPSKPSKRSFIEDLLFNKVTLADAGFIKQYGDCLGDIAARDLICAQKFNGLTVLPPLLTDEMIAQYTSALLAGTITSGWTFGAGAALQIPFAMQMAYRFNGIGVTQNVLYENQKLIANQFNSAIGKIQDSLSSTASALGKLQDVVNQNAQALNTLVKQLSSNFGAISSVLNDILSRLDKVEAEVQIDRLITGRLQSLQTYVTQQLIRAAEIRASANLAATKMSECVLGQSKRVDFCGKGYHLMSFPQSAPHGVVFLHVTYVPAQEKNFTTAPAICHDGKAHFPREGVFVSNGTHWFVTQRNFYEPQIITTDNTFVSGNCDVVIGIVNNTVYDPLQLELDSFKEELDKYFKNHTSPDVDLGDISGINASVVNIQKEIDRLNEVAKNLNESLIDLQELGKYEQYIKGGGSGGGQIYEGKLTAEGLRFGIVASRFNHALVDRLVEGAIDAIVRHGGREEDITLVRVPGSWEIPVAAGELARKEDIDAVIAIGVLIRGATPHFDYIASEVSKGLADLSLELRKPITFGVITADTLEQAIERAGTKHGNKGWEAALSAIEMANLFKSLR

SEQ ID NO: 3635 - protein, 1371 aa, Artificial Sequence
  SARS-CoV-2/India/1-31/2020__EPI_ISL_413523 spike protein (1-1211) LumSynth construct
MFVFLVLLPLVSSQCVNLTTRTQLPPAYTNSFTRGVYYPDKVFRSSVLHSTQDLFLPFFSNVTWFHAIHVSGTNGTKRFDNPVLPFNDGVYFASTEKSNIIRGWIFGTTLDSKTQSLLIVNNATNVVIKVCEFQFCNDPFLGVYYHKNNKSWMESEFRVYSSANNCTFEYVSQPFLMDLEGKQGNFKNLREFVFKNIDGYFKIYSKHTPINLVRDLPQGFSALEPLVDLPIGINITRFQTLLALHRSYLTPGDSSSGWTAGAAAYYVGYLQPRTFLLKYNENGTITDAVDCALDPLSETKCTLKSFTVEKGIYQTSNFRVQPTESIVRFPNITNLCPFGEVFNATRFASVYAWNRKRISNCVADYSVLYNSASFSTFKCYGVSPTKLNDLCFTNVYADSFVIRGDEVRQIAPGQTGKIADYNYKLPDDFTGCVIAWNSNNLDSKVGGNYNYLYRLFRKSNLKPFERDISTEIYQAGSTPCNGVEGFNCYFPLQSYGFQPTNGVGYQPYRVVVLSFELLHAPATVCGPKKSTNLVKNKCVNFNFNGLTGTGVLTESNKKFLPFQQFGRDIADTTDAVRDPQTLEILDITPCSFGGVSVITPGTNTSNQVAVLYQDVNCTEVPVAIHADQLTPTWRVYSTGSNVFQTRAGCLIGAEHVNNSYECDIPIGAGICASYQTQTNSPRRARSVASQSIIAYTMSLGAENSVAYSNNSIAIPTNFTISVTTEILPVSMTKTSVDCTMYICGDSTECSNLLLQYGSFCTQLNRALTGIAVEQDKNTQEVFAQVKQIYKTPPIKDFGGFNFSQILPDPSKPSKRSFIEDLLFNKVTLADAGFIKQYGDCLGDIAARDLICAQKFNGLTVLPPLLTDEMIAQYTSALLAGTITSGWTFGAGAALQIPFAMQMAYRFNGIGVTQNVLYENQKLIANQFNSVIGKIQDSLSSTASALGKLQDVVNQNAQALNTLVKQLSSNFGAISSVLNDILSRLDKVEAEVQIDRLITGRLQSLQTYVTQQLIRAAEIRASANLAATKMSECVLGQSKRVDFCGKGYHLMSFPQSAPHGVVFLHVTYVPAQEKNFTTAPAICHDGKAHFPREGVFVSNGTHWFVTQRNFYEPQIITTDNTFVSGNCDVVIGIVNNTVYDPLQPELDSFKEELDKYFKNHTSPDVDLGDISGINASVVNIQKEIDRLNEVAKNLNESLIDLQELGKYEQYIKGGGSGGGQIYEGKLTAEGLRFGIVASRFNHALVDRLVEGAIDAIVRHGGREEDITLVRVPGSWEIPVAAGELARKEDIDAVIAIGVLIRGATPHFDYIASEVSKGLADLSLELRKPITFGVITADTLEQAIERAGTKHGNKGWEAALSAIEMANLFKSLR

SEQ ID NO: 3636 - protein, 1371 aa, Artificial Sequence
  SARS-CoV-2/Guangdong/GD2020087-P0008/2020__EPI_ISL_413863 spike protein (1-1211) LumSynth construct
MFVFLVLLPLVSSQCVNLTTRTQLPPAYTNSFTRGVYYPDKVFRSSVLHSTQDLFLPFFSNVTWFHAIHVSGTNGTKRFDNPVLPFNDGVYFASTEKSNIIRGWIFGTTLDSKTQSLLIVNNATNVVIKVCEFQFCNDPFLGVYYHKNNKSWMESEFRVYSSANNCTFEYVSQPFLMDLEGKQGNFKNLREFVFKNIDGYFKIYSKHTPINLVRDLPQGFSALEPLVDLPIGINITRFQTLLALHRSYLTPGDSSSGWTAGAAAYYVGYLQPRTFLLKYNENGTITDAVDCALDPLSETKCTLKSFTVEKGIYQTSNFRVQPTESIVRFPNITNLCPFGEVFNATRFASVYAWNRKRISNCVADYSVLYNSASFSTFKCYGVSPTKLNDLCFTNVYADSFVIRGDEVREIAPGQTGKIADYNYKLPDDFTGCVIAWNSNNLDSKVGGNYNYLYRLFRKSNLKPFERDISTEIYQAGSTPCNGVEGFNCYFPLQSYGFQPTNGVGYQPYRVVVLSFELLHAPATVCGPKKSTNLVKNKCVNFNFNGLTGTGVLTESNKKFLPFQQFGRDIADTTDAVRDPQTLEILDITPCSFGGVSVITPGTNTSNQVAVLYQDVNCTEVPVAIHADQLTPTWRVYSTGSNVFQTRAGCLIGAEHVNNSYECDIPIGAGICASYQTQTNSPRRARSVASQSIIAYTMSLGAENSVAYSNNSIAIPTNFTISVTTEILPVSMTKTSVDCTMYICGDSTECSNLLLQYGSFCTQLNRALTGIAVEQDKNTQEVFAQVKQIYKTPPIKDFGGFNFSQILPDPSKPSKRSFIEDLLFNKVTLADAGFIKQYGDCLGDIAARDLICAQKFNGLTVLPPLLTDEMIAQYTSALLAGTITSGWTFGAGAALQIPFAMQMAYRFNGIGVTQNVLYENQKLIANQFNSAIGKIQDSLSSTASALGKLQDVVNQNAQALNTLVKQLSSNFGAISSVLNDILSRLDKVEAEVQIDRLITGRLQSLQTYVTQQLIRAAEIRASANLAATKMSECVLGQSKRVDFCGKGYHLMSFPQSAPHGVVFLHVTYVPAQEKNFTTAPAICHDGKAHFPREGVFVSNGTHWFVTQRNFYEPQIITTDNTFVSGNCDVVIGIVNNTVYDPLQPELDSFKEELDKYFKNHTSPDVDLGDISGINASVVNIQKEIDRLNEVAKNLNESLIDLQELGKYEQYIKGGGSGGGQIYEGKLTAEGLRFGIVASRFNHALVDRLVEGAIDAIVRHGGREEDITLVRVPGSWEIPVAAGELARKEDIDAVIAIGVLIRGATPHFDYIASEVSKGLADLSLELRKPITFGVITADTLEQAIERAGTKHGNKGWEAALSAIEMANLFKSLR

SEQ ID NO: 3637 - protein, 1371 aa, Artificial Sequence
  SARS-CoV-2/Sweden/01/2020__EPI_ISL_411951 spike protein (1-1211) LumSynth construct
MFVFLVLLPLVSSQCVNLTTRTQLPPAYTNSFTRGVYYPDKVFRSSVLHSTQDLFLPFFSNVTWFHAIHVSGTNGTKRFDNPVLPFNDGVYFASTEKSNIIRGWIFGTTLDSKTQSLLIVNNATNVVIKVCEFQFCNDPFLGVYYHKNNKSWMESEFRVYSSANNCTFEYVSQPFLMDLEGKQGNFKNLREFVFKNIDGYFKIYSKHTPINLVRDLPQGFSALEPLVDLPIGINITRFQTLLALHRSYLTPGDSSSGWTAGAAAYYVGYLQPRTFLLKYNENGTITDAVDCALDPLSETKCTLKSFTVEKGIYQTSNFRVQPTESIVRFPNITNLCPFGEVFNATRFASVYAWNRKRISNCVADYSVLYNSASFSTFKCYGVSPTKLNDLCFTNVYADSFVIRGDEVRQIAPGQTGKIADYNYKLPDDFTGCVIAWNSNNLDSKVGGNYNYLYRLFRKSNLKPFERDISTEIYQAGSTPCNGVEGFNCYFPLQSYGFQPTNGVGYQPYRVVVLSFELLHAPATVCGPKKSTNLVKNKCVNFNFNGLTGTGVLTESNKKFLPFQQFGRDIADTTDAVRDPQTLEILDITPCSFGGVSVITPGTNTSNQVAVLYQDVNCTEVPVAIHADQLTPTWRVYSTGSNVFQTRAGCLIGAEHVNNSYECDIPIGAGICASYQTQTNSPRRARSVASQSIIAYTMSLGAENSVAYSNNSIAIPTNFTISVTTEILPVSMTKTSVDCTMYICGDSTECSNLLLQYGSFCTQLNRALTGIAVEQDKNTQEVFAQVKQIYKTPPIKDCGGFNFSQILPDPSKPSKRSFIEDLLFNKVTLADAGFIKQYGDCLGDIAARDLICAQKFNGLTVLPPLLTDEMIAQYTSALLAGTITSGWTFGAGAALQIPFAMQMAYRFNGIGVTQNVLYENQKLIANQFNSAIGKIQDSLSSTASALGKLQDVVNQNAQALNTLVKQLSSNFGAISSVLNDILSRLDKVEAEVQIDRLITGRLQSLQTYVTQQLIRAAEIRASANLAATKMSECVLGQSKRVDFCGKGYHLMSFPQSAPHGVVFLHVTYVPAQEKNFTTAPAICHDGKAHFPREGVFVSNGTHWFVTQRNFYEPQIITTDNTFVSGNCDVVIGIVNNTVYDPLQPELDSFKEELDKYFKNHTSPDVDLGDISGINASVVNIQKEIDRLNEVAKNLNESLIDLQELGKYEQYIKGGGSGGGQIYEGKLTAEGLRFGIVASRFNHALVDRLVEGAIDAIVRHGGREEDITLVRVPGSWEIPVAAGELARKEDIDAVIAIGVLIRGATPHFDYIASEVSKGLADLSLELRKPITFGVITADTLEQAIERAGTKHGNKGWEAALSAIEMANLFKSLR

SEQ ID NO: 3638 - protein, 1371 aa, Artificial Sequence
  SARS-CoV-2/Tianmen/HBCDC-HB-07/2020__EPI_ISL_412983 spike protein (1-1211) LumSynth construct
MFVFLVLLPLVSSQCVNLTTRTQLPPAYTNSFTRGVYYPDKVFRSSVLHSTQDLFLPFFSNVTWFHAIHVSGTNGTKRFDNPVLPFNDGVYFASTEKSNIIRGWIFGTTLDSKTQSLLIVNNATNVVIKVCEFQFCNDPFLGVYYHKNNKSWMESEFRVYSSANNCTFEYVSQPFLMDLEGKQGNFKNLREFVFKNIDGYFKIYSKHTPINLVRDLPQGFSALEPLVDLPIGINITRFQTLLALHRSYLTPGDSSSGWTAGAAAYYVGYLQPRTFLLKYNENGTITDAVDCALDPLSETKCTLKSFTVEKGIYQTSNFRVQPTESIVRFPNITNLCPFGEVFNATRFASVYAWNRKRISNCVADYSVLYNSASFSTFKCYGVSPTKLNDLCFTNVYADSFVIRGDEVRQIAPGQTGKIADYNYKLPDDFTGCVIAWNSNNLDSKVGGNYNYLYRLFRKSNLKPFERDISTEIYQAGSTPCNGVEGFNCYFPLQSYGFQPTNGVGYQPYRVVVLSFELLHAPATVCGPKKSTNLVKNKCVNFNFNGLTGTGVLTESNKKFLPFQQFGRDIADTTDAVRDPQTLEILDITPCSFGGVSVITPGTNTSNQVAVLYQDLNCTEVPVAIHADQLTPTWRVYSTGSNVFQTRAGCLIGAEHVNNSYECDIPIGAGICASYQTQTNSPRRARSVASQSIIAYTMSLGAENSVAYSNNSIAIPTNFTISVTTEILPVSMTKTSVDCTMYICGDSTECSNLLLQYGSFCTQLNRALTGIAVEQDKNTQEVFAQVKQIYKTPPIKDFGGFNFSQILPDPSKPSKRSFIEDLLFNKVTLADAGFIKQYGDCLGDIAARDLICAQKFNGLTVLPPLLTDEMIAQYTSALLAGTITSGWTFGAGAALQIPFAMQMAYRFNGIGVTQNVLYENQKLIANQFNSAIGKIQDSLSSTASALGKLQDVVNQNAQALNTLVKQLSSNFGAISSVLNDILSRLDKVEAEVQIDRLITGRLQSLQTYVTQQLIRAAEIRASANLAATKMSECVLGQSKRVDFCGKGYHLMSFPQSAPHGVVFLHVTYVPAQEKNFTTAPAICHDGKAHFPREGVFVSNGTHWFVTQRNFYEPQIITTDNTFVSGNCDVVIGIVNNTVYDPLQPELDSFKEELDKYFKNHTSPDVDLGDISGINASVVNIQKEIDRLNEVAKNLNESLIDLQELGKYEQYIKGGGSGGGQIYEGKLTAEGLRFGIVASRFNHALVDRLVEGAIDAIVRHGGREEDITLVRVPGSWEIPVAAGELARKEDIDAVIAIGVLIRGATPHFDYIASEVSKGLADLSLELRKPITFGVITADTLEQAIERAGTKHGNKGWEAALSAIEMANLFKSLR

SEQ ID NO: 3639 - protein, 1371 aa, Artificial Sequence
  SARS-CoV-2/Hong Kong/case42_VM20002493/2020__EPI_ISL_414527 spike protein (1-1211) LumSynth construct
MFVFLVLLPLVSSQCVNLTTRTQLPPAYTNSFTRGVYYPDKVFRSSVLHSTQDLFLPFFSNVTWFHAIHVSGTNGTKRFDNPVLPFNDGVYFASTEKSNIIRGWIFGTTLDSKTQSLLIVNNATNVVIKVCEFQFCNDPFLGVYYHKNNKSWMESEFRVYSSANNCTFEYVSQPFLMDLEGKQGNFKNLREFVFKNIDGYFKIYSKHTPINLVRDLPQGFSALEPLVDLPIGINITRFQTLLALHRSYLTPGDSSSGWTAGAAAYYVGYLQPRTFLLKYNENGTITDAVDCALDPLSETKCTLKSFTVEKGIYQTSNFRVQPTESIVRFPNITNLCPFGEVFNATRFASVYAWNRKRISNCVADYSVLYNSASFSTFKCYGVSPTKLNDLCFTNVYADSFVIRGDEVRQIAPGQTGKIADYNYKLPDDFTGCVIAWNSNNLDSKVGGNYNYLYRLFRKSNLKPFERDISTEIYQAGSTPCNGVEGFNCYFPLQSYGFQPTNGVGYQPYRVVVLSFELLHAPATVCGPKKSTNLVKNKCVNFNFNGLTGTGVLTESNKKFLPFQQFGRDIADTTDAVRDPQTLEILDITPCSFGGVSVITPGTNTSNQVAVLYQDVNCTEVPVAIHADQLTPTWRVYSTGSNVFQTRAGCLIGAEHVNNSYECDIPIGAGICASYQTQTNSPRRARSVASQSIIAYTMSLGAENSVAYSNNSIAIPTNFAISVTTEILPVSMTKTSVDCTMYICGDSTECSNLLLQYGSFCTQLNRALTGIAVEQDKNTQEVFAQVKQIYKTPPIKDFGGFNFSQILPDPSKPSKRSFIEDLLFNKVTLADAGFIKQYGDCLGDIAARDLICAQKFNGLTVLPPLLTDEMIAQYTSALLAGTITSGWTFGAGAALQIPFAMQMAYRFNGIGVTQNVLYENQKLIANQFNSAIGKIQDSLSSTASALGKLQDVVNQNAQALNTLVKQLSSNFGAISSVLNDILSRLDKVEAEVQIDRLITGRLQSLQTYVTQQLIRAAEIRASANLAATKMSECVLGQSKRVDFCGKGYHLMSFPQSAPHGVVFLHVTYVPAQEKNFTTAPAICHDGKAHFPREGVFVSNGTHWFVTQRNFYEPQIITTDNTFVSGNCDVVIGIVNNTVYDPLQPELDSFKEELDKYFKNHTSPDVDLGDISGINASVVNIQKEIDRLNEVAKNLNESLIDLQELGKYEQYIKGGGSGGGQIYEGKLTAEGLRFGIVASRFNHALVDRLVEGAIDAIVRHGGREEDITLVRVPGSWEIPVAAGELARKEDIDAVIAIGVLIRGATPHFDYIASEVSKGLADLSLELRKPITFGVITADTLEQAIERAGTKHGNKGWEAALSAIEMANLFKSLR

SEQ ID NO: 3640 - protein, 1371 aa, Artificial Sequence
  SARS-CoV-2/USA/CruiseA-23/2020__EPI_ISL_414482 spike protein (1-1211) LumSynth construct
MFVFLVLLPLVSSQCVNLTTRTQLPPAYTNSFTRGVYYPDKVFRSSVLHSTQDLFLPFFSNVTWFHAIHVSGTNGTKRFDNPVLPFNDGVYFASTEKSNIIRGWIFGTTLDSKTQSLLIVNNATNVVIKVCEFQFCNDPFLGVYYHKNNKSWMESEFRVYSSANNCTFEYVSQPFLMDLEVKQGNFKNLREFVFKNIDGYFKIYSKHTPINLVRDLPQGFSALEPLVDLPIGINITRFQTLLALHRSYLTPGDSSSGWTAGAAAYYVGYLQPRTFLLKYNENGTITDAVDCALDPLSETKCTLKSFTVEKGIYQTSNFRVQPTESIVRFPNITNLCPFGEVFNATRFASVYAWNRKRISNCVADYSVLYNSASFSTFKCYGVSPTKLNDLCFTNVYADSFVIRGDEVRQIAPGQTGKIADYNYKLPDDFTGCVIAWNSNNLDSKVGGNYNYLYRLFRKSNLKPFERDISTEIYQAGSTPCNGVEGFNCYFPLQSYGFQPTNGVGYQPYRVVVLSFELLHAPATVCGPKKSTNLVKNKCVNFNFNGLTGTGVLTESNKKFLPFQQFGRDIADTTDAVRDPQTLEILDITPCSFGGVSVITPGTNTSNQVAVLYQDVNCTEVPVAIHADQLTPTWRVYSTGSNVFQTRAGCLIGAEHVNNSYECDIPIGAGICASYQTQTNSPRRARSVASQSIIAYTMSLGAENSVAYSNNSIAIPTNFTISVTTEILPVSMTKTSVDCTMYICGDSTECSNLLLQYGSFCTQLNRALTGIAVEQDKNTQEVFAQVKQIYKTPPIKDFGGFNFSQILPDPSKPSKRSFIEDLLFNKVTLADAGFIKQYGDCLGDIAARDLICAQKFNGLTVLPPLLTDEMIAQYTSALLAGTITSGWTFGAGAALQIPFAMQMAYRFNGIGVTQNVLYENQKLIANQFNSAIGKIQDSLSSTASALGKLQDVVNQNAQALNTLVKQLSSNFGAISSVLNDILSRLDKVEAEVQIDRLITGRLQSLQTYVTQQLIRAAEIRASANLAATKMSECVLGQSKRVDFCGKGYHLMSFPQSAPHGVVFLHVTYVPAQEKNFTTAPAICHDGKAHFPREGVFVSNGTHWFVTQRNFYEPQIITTDNTFVSGNCDVVIGIVNNTVYDPLQPELDSFKEELDKYFKNHTSPDVDLGDISGINASVVNIQKEIDRLNEVAKNLNESLIDLQELGKYEQYIKGGGSGGGQIYEGKLTAEGLRFGIVASRFNHALVDRLVEGAIDAIVRHGGREEDITLVRVPGSWEIPVAAGELARKEDIDAVIAIGVLIRGATPHFDYIASEVSKGLADLSLELRKPITFGVITADTLEQAIERAGTKHGNKGWEAALSAIEMANLFKSLR

SEQ ID NO: 3641 - protein, 1371 aa, Artificial Sequence
  SARS-CoV-2/Hong Kong/case85_VM20002868/2020__EPI_ISL_414519 spike protein (1-1211) LumSynth construct
MFVFLVLVPLVSSQCVNLTTRTQLPPAYTNSFTRGVYYPDKVFRSSVLHSTQDLFLPFFSNVTWFHAIHVSGTNGTKRFDNPVLPFNDGVYFASTEKSNIIRGWIFGTTLDSKTQSLLIVNNATNVVIKVCEFQFCNDPFLGVYYHKNNKSWMESEFRVYSSANNCTFEYVSQPFLMDLEGKQGNFKNLREFVFKNIDGYFKIYSKHTPINLVRDLPQGFSALEPLVDLPIGINITRFQTLLALHRSYLTPGDSSSGWTAGAAAYYVGYLQPRTFLLKYNENGTITDAVDCALDPLSETKCTLKSFTVEKGIYQTSNFRVQPTESIVRFPNITNLCPFGEVFNATRFASVYAWNRKRISNCVADYSVLYNSASFSTFKCYGVSPTKLNDLCFTNVYADSFVIRGDEVRQIAPGQTGKIADYNYKLPDDFTGCVIAWNSNNLDSKVGGNYNYLYRLFRKSNLKPFERDISTEIYQAGSTPCNGVEGFNCYFPLQSYGFQPTNGVGYQPYRVVVLSFELLHAPATVCGPKKSTNLVKNKCVNFNFNGLTGTGVLTESNKKFLPFQQFGRDIADTTDAVRDPQTLEILDITPCSFGGVSVITPGTNTSNQVAVLYQDVNCTEVPVAIHADQLTPTWRVYSTGSNVFQTRAGCLIGAEHVNNSYECDIPIGAGICASYQTQTNSPRRARSVASQSIIAYTMSLGAENSVAYSNNSIAIPTNFTISVTTEILPVSMTKTSVDCTMYICGDSTECSNLLLQYGSFCTQLNRALTGIAVEQDKNTQEVFAQVKQIYKTPPIKDFGGFNFSQILPDPSKPSKRSFIEDLLFNKVTLADAGFIKQYGDCLGDIAARDLICAQKFNGLTVLPPLLTDEMIAQYTSALLAGTITSGWTFGAGAALQIPFAMQMAYRFNGIGVTQNVLYENQKLIANQFNSAIGKIQDSLSSTASALGKLQDVVNQNAQALNTLVKQLSSNFGAISSVLNDILSRLDKVEAEVQIDRLITGRLQSLQTYVTQQLIRAAEIRASANLAATKMSECVLGQSKRVDFCGKGYHLMSFPQSAPHGVVFLHVTYVPAQEKNFTTAPAICHDGKAHFPREGVFVSNGTHWFVTQRNFYEPQIITTDNTFVSGNCDVVIGIVNNTVYDPLQPELDSFKEELDKYFKNHTSPDVDLGDISGINASVVNIQKEIDRLNEVAKNLNESLIDLQELGKYEQYIKGGGSGGGQIYEGKLTAEGLRFGIVASRFNHALVDRLVEGAIDAIVRHGGREEDITLVRVPGSWEIPVAAGELARKEDIDAVIAIGVLIRGATPHFDYIASEVSKGLADLSLELRKPITFGVITADTLEQAIERAGTKHGNKGWEAALSAIEMANLFKSLR

SEQ ID NO: 3642 - protein, 1371 aa, Artificial Sequence; identical to SEQ ID NO: 66
  SARS-CoV-2/England/200990660/2020__EPI_ISL_414523 spike protein (1-1211) LumSynth construct

SEQ ID NO: 3643 - protein, 1371 aa, Artificial Sequence
  SARS-CoV-2/Australia/NSW09/2020__EPI_ISL_413595 spike protein (1-1211) LumSynth construct
MFVFLVLLPLVSSQCVNLTTRTQLPPAYTNSFTRGVYYPDKVFRSSVLHSTQDLFLPFFSNVTWFHAIHVSGTNGTKRFDNPVLPFNDGVYFASTEKSNIIRGWIFGTTLDSKTQSLLIVNNATNVVIKVCEFQFCNDPFLGVYYHKNNKSWMESEFRVYSSANNCTFEYVSQPFLMDLEGKQGNFKNLREFVFKNIDGYFKIYSKHTPINLVRDLPQGFSALEPLVDLPIGINITRFQTLLALHRSYLTPGDSSSGWTAGAAAYYVGYLQPRTFLLKYNENGTITDAVDCALDPLSETKCTLKSFTVEKGIYQTSNFRVQPTESIVRFPNITNLCPFGEVFNATRFASVYAWNRKRISNCVADYSVLYNSASFSTFKCYGVSPTKLNDLCFTNVYADSFVIRGDEVRQIAPGQTGKIADYNYKLPDDFTGCVIAWNSNNLDSKVGGNYNYLYRLFRKSNLKPFERDISTEIYQAGSTPCNGVEGFNCYFPLQSYGFQPTNGVGYQPYRVVVLSFELLHAPATVCGPKKSTNLVKNKCVNFNFNGLTGTGVLTESNKKFLPFQQFGRDIADTTDAVRDPQTLEILDITPCSFGGVSVITPGTNTSNQVAVLYQDVNCTEVPVAIHADQLTPTWRVYSTGSNVFQTRAGCLIGAEHVNNSYECDIPIGAGICASYQTQTNSPRRARSVASQSIIAYTMSLGAENSVAYSNNSIAIPTNFTISVTTEILPVSMTKTSVDCTMYICGDSTECSNLLLQYGSFCTQLNRALTGIAVEQDKNTQEVFAQVKQIYKTPPIKDFGGFNFSQILPDPSKPSKRSFIEDLLFNKVTLADAGFIKQYGDCLGDIAARDLICAQKFNGLTVLPPLLTDEMIAQYTSALLAGTITSGWTFGAGAALQIPFAMQMAYRFNGIGVTQNVLYENQKLIANQFNSAIGKIQDSLSFTASALGKLQDVVNQNAQALNTLVKQLSSNFGAISSVLNDILSRLDKVEAEVQIDRLITGRLQSLQTYVTQQLIRAAEIRASANLAATKMSECVLGQSKRVDFCGKGYHLMSFPQSAPHGVVFLHVTYVPAQEKNFTTAPAICHDGKAHFPREGVFVSNGTHWFVTQRNFYEPQIITTDNTFVSGNCDVVIGIVNNTVYDPLQPELDSFKEELDKYFKNHTSPDVDLGDISGINASVVNIQKEIDRLNEVAKNLNESLIDLQELGKYEQYIKGGGSGGGQIYEGKLTAEGLRFGIVASRFNHALVDRLVEGAIDAIVRHGGREEDITLVRVPGSWEIPVAAGELARKEDIDAVIAIGVLIRGATPHFDYIASEVSKGLADLSLELRKPITFGVITADTLEQAIERAGTKHGNKGWEAALSAIEMANLFKSLR

SEQ ID NO: 3644 - protein, 1371 aa, Artificial Sequence; identical to SEQ ID NO: 58
  SARS-CoV-2/Australia/NSW10/2020__EPI_ISL_413596 spike protein (1-1211) LumSynth construct

SEQ ID NO: 3645 - protein, 1371 aa, Artificial Sequence
  SARS-CoV-2/Switzerland/1000477797/2020__EPI_ISL_413023 spike protein (1-1211) LumSynth construct
MFVFLVLLPLVSSQCVNLTTRTQLPPAYTNSFTRGVYYPDKVFRSSVLHSTQDLFLPFFSNVTWFHAIHVSGTNGTKRFDNPVLPFNDGVYFASTEKSNIIRGWIFGTTLDSKTQSLLIVNNATNVVIKVCEFQFCNDPFLGVYYHKNNKSWMESEFRVYSSANNCTFEYVSQPFLMDLEGKQGNFKNLREFVFKNIDGYFNIYSKHTPINLVRDLPQGFSALEPLVDLPIGINITRFQTLLALHRSYLTPGDSSSGWTAGAAAYYVGYLQPRTFLLKYNENGTITDAVDCALDPLSETKCTLKSFTVEKGIYQTSNFRVQPTESIVRFPNITNLCPFGEVFNATRFASVYAWNRKRISNCVADYSVLYNSASFSTFKCYGVSPTKLNDLCFTNVYADSFVIRGDEVRQIAPGQTGKIADYNYKLPDDFTGCVIAWNSNNLDSKVGGNYNYLYRLFRKSNLKPFERDISTEIYQAGSTPCNGVEGFNCYFPLQSYGFQPTNGVGYQPYRVVVLSFELLHAPATVCGPKKSTNLVKNKCVNFNFNGLTGTGVLTESNKKFLPFQQFGRDIADTTDAVRDPQTLEILDITPCSFGGVSVITPGTNTSNQVAVLYQGVNCTEVPVAIHADQLTPTWRVYSTGSNVFQTRAGCLIGAEHVNNSYECDIPIGAGICASYQTQTNSPRRARSVASQSIIAYTMSLGAENSVAYSNNSIAIPTNFTISVTTEILPVSMTKTSVDCTMYICGDSTECSNLLLQYGSFCTQLNRALTGIAVEQDKNTQEVFAQVKQIYKTPPIKDFGGFNFSQILPDPSKPSKRSFIEDLLFNKVTLADAGFIKQYGDCLGDIAARDLICAQKFNGLTVLPPLLTDEMIAQYTSALLAGTITSGWTFGAGAALQIPFAMQMAYRFNGIGVTQNVLYENQKLIANQFNSAIGKIQDSLSSTASALGKLQDVVNQNAQALNTLVKQLSSNFGAISSVLNDILSRLDKVEAEVQIDRLITGRLQSLQTYVTQQLIRAAEIRASANLAATKMSECVLGQSKRVDFCGKGYHLMSFPQSAPHGVVFLHVTYVPAQEKNFTTAPAICHDGKAHFPREGVFVSNGTHWFVTQRNFYEPQIITTDNTFVSGNCDVVIGIVNNTVYDPLQPELDSFKEELDKYFKNHTSPDVDLGDISGINASVVNIQKEIDRLNEVAKNLNESLIDLQELGKYEQYIKGGGSGGGQIYEGKLTAEGLRFGIVASRFNHALVDRLVEGAIDAIVRHGGREEDITLVRVPGSWEIPVAAGELARKEDIDAVIAIGVLIRGATPHFDYIASEVSKGLADLSLELRKPITFGVITADTLEQAIERAGTKHGNKGWEAALSAIEMANLFKSLR

SEQ ID NO: 3646 - protein, 1371 aa, Artificial Sequence
  SARS-CoV-2/Belgium/BA-02291/2020__EPI_ISL_415159 spike protein (1-1211) LumSynth construct
MFVFLVLLPLVSSQCVNLTTRTQLPPAYTNSFTRGVYYPDKVFRSSVLHSTQDLFLPFFSNVTWFHAIHVSGTNGTKRFDNPVLPFNDGVYFASTEKSNIIRGWIFGTTLDSKTQSLLIVNNATNVVIKVCEFQFCNDPFLGVYYHKNNKSWMESEFRVYSSANNCTFEYVSQPFLMDLEGKQGNFKNLREFVFKNIDGYFKIYSKHTPINLVRDLPQGFSALEPLVDLPIGINITRFQTLLALHRSYLTPGDSSSGWTAGAAAYYVGYLQPRTFLLKYNENGTITDAVDCALDPLSETKCTLKSFTVEKGIYQTSNFRVQPTESIVRFPNITNLCPFGEVFNATRFASVYAWNRKRISNCVADYSVLYNSASFSTFKCYGVSPTKLNDLCFTNVYADSFVIRGDEVRQIAPGQTGKIADYNYKLPDDFTGCVIAWNSNNLDSKVGGNYNYLYRLFRRSNLKPFERDISTEIYQAGSTPCNGVEGFNCYFPLQSYGFQPTNGVGYQPYRVVVLSFELLPAPATVCGPKKSTNLVKNKCVNFNFNGLTGTGVLTESNKKFLPFQQFGRDIADTTDAVRDPQTLEILDITPCSFGGVSVITPGTNTSNQVAVLYQGVNCTEVPVAIHADQLTPTWRVYSTGSNVFQTRAGCLIGAEHVNNSYECDIPIGAGICASYQTQTNSPRRARSVASQSIIAYTMSLGAENSVAYSNNSIAIPTNFTISVTTEILPVSMTKTSVDCTMYICGDSTECSNLLLQYGSFCTQLNRALTGIAVEQDKNTQEVFAQVKQIYKTPPIKDFGGFNFSQILPDPSKPSKRSFIEDLLFNKVTLADAGFIKQYGDCLGDIAARDLICAQKFNGLTVLPPLLTDEMIAQYTSALLAGTITSGWTFGAGAALQIPFAMQMAYRFNGIGVTQNVLYENQKLIANQFNSAIGKIQDSLSSAAPALGKLQDVVNQNAQALNTLVKQLSSNFGAISSVLNDILSRLDKVEAEVQIDRLITGRLQSLQTYVTQQLIRAAEIRASANLAATKMSECVLGQSKRVDFCGKGYHLMSFPQSAPHGVVFLHVTYVPAQEKNFTTAPAICHDGKAHFPREGVFVSNGTHWFVTQRNFYEPQIITTDNTFVSGNCDVVIGIVNNTVYDPLQPELDSFKEELDKYFKNHTSPDVDLGDISGINASVVNIQKEIDRLNEVAKNLNESLIDLQELGKYEQYIKGGGSGGGQIYEGKLTAEGLRFGIVASRFNHALVDRLVEGAIDAIVRHGGREEDITLVRVPGSWEIPVAAGELARKEDIDAVIAIGVLIRGATPHFDYIASEVSKGLADLSLELRKPITFGVITADTLEQAIERAGTKHGNKGWEAALSAIEMANLFKSLR

SEQ ID NO: 3647 - protein, 1371 aa, Artificial Sequence
  SARS-CoV-2/USA/WA8-UW5/2020__EPI_ISL_413486 spike protein (1-1211) LumSynth construct
MFVFLVLLPLVSSQCVNLTTRTQLPPAYTNSFTRGVYYPDKVFRSSVLHSTQDLFLPFFSNVTWFHAIHVSGTNGTKRFDNPVLPFNDGVYFASTEKSNIIRGWIFGTTLDSKTQSLLIVNNATNVVIKVCEFQFCNDPFLGVYYHKNNKSWMESEFRVYSSANNCTFEYVSQPFLMDLEGKQGNFKNLREFVFKNIDGYFKIYSKHTPINLVRDLPQGFSALEPLVDLPIGINITRFQTLLALHRSYLTPGDSSSGWTAGAAAYYVGYLQPRTFLLKYNENGTITDAVDCALDPLSETKCTLKSFTVEKGIYQTSNFRVQPTESIVRFPNITNLCPFGEVFNATRFASVYAWNRKRISNCVADYSVLYNSASFSTFKCYGVSPTKLNDLCFTNVYADSFVIRGDEVRQIAPGQTGKIADYNYKLPDDFTGCVIAWNSNNLDSKVGGNYNYLYRLFRKSNLKPFERDISTEIYQAGSTPCNGVEGFNCYFPLQSYGFQPTNGVGYQPYRVVVLSFELLHAPATVCGPKKSTNLVKNKCVNFNFNGLTGTGVLTESNKKFLPFQQFGRDIADTTDAVRDPQTLEILDITPCSFGGVSVITPGTNTSNQVAVLYQDVNCTEVPVAIHADQLTPTWRVYSTGSNVFQTRAGCLIGAEYVNNSYECDIPIGAGICASYQTQTNSPRRARSVASQSIIAYTMSLGAENSVAYSNNSIAIPTNFTISVTTEILPVSMTKTSVDCTMYICGDSTECSNLLLQYGSFCTQLNRALTGIAVEQDKNTQEVFAQVKQIYKTPPIKDFGGFNFSQILPDPSKPSKRSFIEDLLFNKVTLADAGFIKQYGDCLGDIAARDLICAQKFNGLTVLPPLLTDEMIAQYTSALLAGTITSGWTFGAGAALQIPFAMQMAYRFNGIGVTQNVLYENQKLIANQFNSAIGKIQDSLSSTASALGKLQDVVNQNAQALNTLVKQLSSNFGAISSVLNDILSRLDKVEAEVQIDRLITGRLQSLQTYVTQQLIRAAEIRASANLAATKMSECVLGQSKRVDFCGKGYHLMSFPQSAPHGVVFLHVTYVPAQEKNFTTAPAICHDGKAHFPREGVFVSNGTHWFVTQRNFYEPQIITTDNTFVSGNCDVVIGIVNNTVYDPLQPELDSFKEELDKYFKNHTSPDVDLGDISGINASVVNIQKEIDRLNEVAKNLNESLIDLQELGKYEQYIKGGGSGGGQIYEGKLTAEGLRFGIVASRFNHALVDRLVEGAIDAIVRHGGREEDITLVRVPGSWEIPVAAGELARKEDIDAVIAIGVLIRGATPHFDYIASEVSKGLADLSLELRKPITFGVITADTLEQAIERAGTKHGNKGWEAALSAIEMANLFKSLR

SEQ ID NO: 3648 - protein, 1371 aa, Artificial Sequence
  SARS-CoV-2/England/20102000506/2020__EPI_ISL_415147 spike protein (1-1211) LumSynth construct
MFVFLVLLPLVSSQCVNLTTRTQLPPAYTNSFTRGVYYPDKVFRSSVLHSTQDLFLPFFSNVTWFHAIHVSGTNGTKRFDNPVLPFNDGVYFASTEKSNIIRGWIFGTTLDSKTQSLLIVNNATNVVIKVCEFQFCNDPFLGVYYHKNNKSWMESEFRVYSSANNCTFEYVSQPFLMDLEGKQGNFKNLREFVFKNIDGYFKIYSKHTPINLVRDLPQGFSALEPLVDLPIGINITRFQTLLALHRSYLTPGDSSSGWTAGAAAYYVGYLQPRTFLLKYNENGTITDAVDCALDPLSETKCTLKSFTVEKGIYQTSNFRVQPTESIVRFPNITNLCPFGEVFNATRFASVYAWNRKRISNCVADYSVLYNSASFSTFKCYGVSPTKLNDLCFTNVYADSFVIRGDEVRQIAPGQTGKIADYNYKLPDDFTGCVIAWNSNNLDSKVGGNYNYLYRLFRKSNLKPFERDISTEIYQAGSTPCNGVEGFNCYFPLQSYGFQPTNGVGYQPYRVVVLSFELLHAPATVCGPKKSTNLVKNKCVNFNFNGLTGTGVLTESNKKFLPFQQFGRDIADTTDAVRDPQTLEILDITPCSFGGVSVITPGTNTSNQVAVLYQGVNCTEVPVAIHADQLTPTWRVYSTGSNVFQTRAGCLIGAEHVNNSYECDIPIGAGICASYQTQTNSPRRARSVASQSIIAYTMSLGAENSVAYSNNSIAIPTNFTISVTTEILPVSMTKTSVDCTMYICGDSTECSNLLLQYGSFCTQLNRALTGIAVEQDKNTQEVFAQVKQIYKTPPIKDFGGFNFSQILPDPSKPSKRSFIEDLLFNKVTLADAGFIKQYGYCLGDIAARDLICAQKFNGLTVLPPLLTDEMIAQYTSALLAGTITSGWTFGAGAALQIPFAMQMAYRFNGIGVTQNVLYENQKLIANQFNSAIGKIQDSLSSTASALGKLQDVVNQNAQALNTLVKQLSSNFGAISSVLNDILSRLDKVEAEVQIDRLITGRLQSLQTYVTQQLIRAAEIRASANLAATKMSECVLGQSKRVDFCGKGYHLMSFPQSAPHGVVFLHVTYVPAQEKNFTTAPAICHDGKAHFPREGVFVSNGTHWFVTQRNFYEPQIITTDNTFVSGNCDVVIGIVNNTVYDPLQPELDSFKEELDKYFKNHTSPDVDLGDISGINASVVNIQKEIDRLNEVAKNLNESLIDLQELGKYEQYIKGGGSGGGQIYEGKLTAEGLRFGIVASRFNHALVDRLVEGAIDAIVRHGGREEDITLVRVPGSWEIPVAAGELARKEDIDAVIAIGVLIRGATPHFDYIASEVSKGLADLSLELRKPITFGVITADTLEQAIERAGTKHGNKGWEAALSAIEMANLFKSLR

SEQ ID NO: 3649 - protein, 1371 aa, Artificial Sequence
  SARS-CoV-2/Belgium/VAG-03013/2020__EPI_ISL_415155 spike protein (1-1211) LumSynth construct
MFVFLVLLPLVSSQCVNLTTRTQLPPAYTNSFTRGVYYPDKVFRSSVLHSTQDLFLPFFSNVTWFHAIHVSGTNGTKRFDNPVLPFNDGVYFASTEKSNIIRGWIFGTTLDSKTQSLLIVNNATNVVIKVCEFQFCNDPFLGVYYHKNNKSWMESEFRVYSSANNCTFEYVSQPFLMDLEGKQGNFKNLREFVFKNIDGYFKIYSKHTPINLVRDLPQGFSALEPLVDLPIGINITRFQTLLALHRSYLTPGDSSSGWTAGAAAYYVGYLQPRTFLLKYNENGTITDAVDCALDPLSETKCTLKSFTVEKGIYQTSNFRVQPTESIVRFPNITNLCPFGEVFNATRFASVYAWNRKRISNCVADYSVLYNSASFSTFKCYGVSPTKLNDLCFTNVYADSFVIRGDEVRQIAPGQTGKIADYNYKLPDDFTGCVIAWNSNNLDSKVGGNYNYLYRLFRKSNLKPFERDISTEIYQAGSTPCNGVEGFNCYFPLQSYGFQPTNGVGYQPYRVVVLSFELLHAPATVCGPKKSTNLVKNKCVNFNFNGLTGTGVLTESNKKFLPFQQFGRDIADTTDAVRDPQTLEILDITPCSFGGVSVITPGTNTSNQVAVLYQGVNCTEVPVAIHADQLTPTWRVYSTGSNVFQTRAGCLIGAEHVNNSYECDIPIGAGICASYQTQTNSPRRARSVASQSIIAYTMSLGAENSVAYSNNSIAIPTNFTISVTTEILPVSMTKTSVDCTMYICGDSTECSNLLLQYGSFCTQLNRALTGIAVEQDKNTQEVFAQVKQIYKTPPIKDFGGFNFSQILPDPSKPSKRSFIEDLLFNKVTLADAGFIKQYGDCLGDIAARDLICAQKFNGLTVLPPLLTDEMIAQYTSALLAGTITSGWTFGAGAALQIPFAMQMAYRFNGIGVTQNVLYENQKLIANQFNSAIGKIQDSLSSTATALGKLQDVVNQNAQALNTLVKQLSSNFGAISSVLNDILSRLDKVEAEVQIDRLITGRLQSLQTYVTQQLIRAAEIRASANLAATKMSECVLGQSKRVDFCGKGYHLMSFPQSAPHGVVFLHVTYVPAQEKNFTTAPAICHDGKAHFPREGVFVSNGTHWFVTQRNFYEPQIITTDNTFVSGNCDVVIGIVNNTVYDPLQPELDSFKEELDKYFKNHTSPDVDLGDISGINASVVNIQKEIDRLNEVAKNLNESLIDLQELGKYEQYIKGGGSGGGQIYEGKLTAEGLRFGIVASRFNHALVDRLVEGAIDAIVRHGGREEDITLVRVPGSWEIPVAAGELARKEDIDAVIAIGVLIRGATPHFDYIASEVSKGLADLSLELRKPITFGVITADTLEQAIERAGTKHGNKGWEAALSAIEMANLFKSLR

SEQ ID NO: 3650 - protein, 1371 aa, Artificial Sequence
  SARS-CoV-2/Belgium/BC-03016/2020__EPI_ISL_415157 spike protein (1-1211) LumSynth construct
MFVFLVLLPLVSSQCVNLTTRTQLPPAYTNSFTRGVYYPDKVFRSSVLHSTQDLFLPFFSNVTWFHAIHVSGTNGTKRFDNPVLPFNDGVYFASTEKSNIIRGWIFGTTLDSKTQSLLIVNNATNVVIKVCEFQFCNDPFLGVYYHKNNKSWMESEFRVYSSANNCTFEYVSQPFLMDLEGKQGNFKNLREFVFKNIDGYFKIYSKHTPINLVRDLPQGFSALEPLVDLPIGINITRFQTLLALHRSYLTPGDSSSGWTAGAAAYYVGYLQPRTFLLKYNENGTITDAVDCALDPLSETKCTLKSFTVEKGIYQTSNFRVQPTESIVRFPNITNLCPFGEVFNATRFASVYAWNRKRISNCVADYSVLYNSASFSTFKCYGVSPTKLNDLCFTNVYADSFVIRGDEVRQIAPGQTGKIADYNYKLPDDFTGCVIAWNSNNLDSKVGGNYNYLYRLFRKSNLKPFERDISTEIYQAGSTPCNGVEGFNCYFPLQSYGFQPTNGVGYQPYRVVVLSFELLHAPATVCGPKKSTNLVKNKCVNFNFNGLTGTGVLTESNKKFLPFQQFGRDIADTTDAVRDPQTLEILDITPCSFGGVSVITPGTNTSNQVAVLYQGVNCTEVPVAIHADQLTPTWRVYSTGSNVFQTRAGCLIGAEHVNNSYECDIPIGAGICASYQTQTNSPRRARSVASQSIIAYTMSLGAENSVAYSNNSIAIPTNFTISVTTEILPVSMTKTSVDCTMYICGDSTECSNLLLQYGSFCTQLNRALTGIAVEQDKNTQEVFAQVKQIYKTPPIKDFGGFNFSQILPDPSKPSKRSFIEDLLFNKVTLADAGFIKQYGDCLGDIAARDLICAQKFNGLTVLPPLLTDEMIAQYTSALLAGTITSGWTFGAGAALQIPFAMQMAYRFNGIGVTQNVLYENQKLIANQFNSAIGKIQDSLSSTAPALGKLQDVVNQNAQALNTLVKQLSSNFGAISSVLNDILSRLDKVEAEVQIDRLITGRLQSLQTYVTQQLIRAAEIRASANLAATKMSECVLGQSKRVDFCGKGYHLMSFPQSAPHGVVFLHVTYVPAQEKNFTTAPAICHDGKAHFPREGVFVSNGTHWFVTQRNFYEPQIITTDNTFVSGNCDVVIGIVNNTVYDPLQPELDSFKEELDKYFKNHTSPDVDLGDISGINASVVNIQKEIDRLNEVAKNLNESLIDLQELGKYEQYIKGGGSGGGQIYEGKLTAEGLRFGIVASRFNHALVDRLVEGAIDAIVRHGGREEDITLVRVPGSWEIPVAAGELARKEDIDAVIAIGVLIRGATPHFDYIASEVSKGLADLSLELRKPITFGVITADTLEQAIERAGTKHGNKGWEAALSAIEMANLFKSLR

SEQ ID NO: 3651 - protein, 1371 aa, Artificial Sequence
  SARS-CoV-2/Germany/BavPat3/2020__EPI_ISL_414521 spike protein (1-1211) LumSynth construct
MFVFLVLLPLVSSQCVNLTTRTQLPPAYTNSFTRGVYYPDKVFRSSVLHSTQDLFLPFFSNVTWFHAIHVSGTNGTKRFDNPVLPFNDGVYFASTEKSNIIRGWIFGTTLDSKTQSLLIVNNATNVVIKVCEFQFCNDPFLGVYYHKNNKSWMESEFRVYSSANNCTFEYVSQPFLMDLEGKQGNFKNLREFVFKNIDGYFKIYSKHTPINLVRDLPQGFSALEPLVDLPIGINITRFQTLLALHRSYLTPGDSSSGWTAGAAAYYVGYLQPRTFLLKYNENGTITDAVDCALDPLSETKCTLKSFTVEKGIYQTSNFRVQPTESIVRFPNITNLCPFGEVFNATRFASVYAWNRKRISNCVADYSVLYNSASFSTFKCYGVSPTKLNDLCFTNVYADSFVIRGDEVRQIAPGQTGKIADYNYKLPDDFTGCVIAWNSNNLDSKVGGNYNYLYRLFRKSNLKPFERDISTEIYQAGSTPCNGVEGFNCYFPLQSYGFQPTNGVGYQPYRVVVLSFELLHAPATVCGPKKSTNLVKNKCVNFNFNGLTGTGVLTESNKKFLPFQQFGRDIADTTDAVRDPQTLEILDITPCSFGGVSVITPGTNTSNQVAVLYQDVNCTEVPVAIHADQLTPTWRVYSTGSNVFQTRAGCLIGAEHVNNSYECDIPIGAGICASYQTQTNSPRRARSVASQSIIAYTMSLGAENSVAYSNNSIAIPTNFTISVTTEILPVSMTKTSVDCTMYICGDSTECSNLLLQYGSFCTQLNRALTGIAVEQDKNTQQVFAQVKQIYKTPPIKDFGGFNFSQILPDPSKPSKRSFIEDLLFNKVTLADAGFIKQYGDCLGDIAARDLICAQKFNGLTVLPPLLTDEMIAQYTSALLAGTITSGWTFGAGAALQIPFAMQMAYRFNGIGVTQNVLYENQKLIANQFNSAIGKIQDSLSSTASALGKLQDVVNQNAQALNTLVKQLSSNFGAISSVLNDILSRLDKVEAEVQIDRLITGRLQSLQTYVTQQLIRAAEIRASANLAATKMSECVLGQSKRVDFCGKGYHLMSFPQSAPHGVVFLHVTYVPAQEKNFTTAPAICHDGKAHFPREGVFVSNGTHWFVTQRNFYEPQIITTDNTFVSGNCDVVIGIVNNTVYDPLQPELDSFKEELDKYFKNHTSPDVDLGDISGINASVVNIQKEIDRLNEVAKNLNESLIDLQELGKYEQYIKGGGSGGGQIYEGKLTAEGLRFGIVASRFNHALVDRLVEGAIDAIVRHGGREEDITLVRVPGSWEIPVAAGELARKEDIDAVIAIGVLIRGATPHFDYIASEVSKGLADLSLELRKPITFGVITADTLEQAIERAGTKHGNKGWEAALSAIEMANLFKSLR

SEQ ID NO: 3652 - protein, 1371 aa, Artificial Sequence
  SARS-CoV-2/France/HF1805/2020__EPI_ISL_414628 spike protein (1-1211) LumSynth construct
MFVFLVLLPLVSSQCVNLTTRTQLPPAYTNSFTRGVYYPDKVFRSSVLHSTQDLFLPFFSNVTWFHAIHVSGTNGTKRFDNPVLPFNDGVYFASTEKSNIIRGWIFGTTLDSKTQSLLIVNNATNVVIKVCEFQFCNDPFLGVYYHKNNKSWMESEFRVYSSANNCTFEYVSQPFLMDLEGKQGNFKNLREFVFKNIDGYFKIYSKHTPINLVRDLPQGFSALEPLVDLPIGINITRFQTLLALHRSYLTPGDSSSGWTAGAAAYYVGYLQPRTFLLKYNENGTITDAVDCALDPLSETKCTLKSFTVEKGIYQTSNFRVQPTESIVRFPNITNLCPFGEVFNATRFASVYAWNRKRISNCVADYSVLYNSASFSTFKCYGVSPTKLNDLCFTNVYADSFVIRGDEVRQIAPGQTGKIADYNYKLPDDFTGCVIAWNSNNLDSKVGGNYNYLYRLFRKSNLKPFERDISTEIYQAGSTPCNGVEGFNCYFPLQSYGFQPTNGVGYQPYRVVVLSFELLHAPATVCGPKKSTNLVKNKCVNFNFNGLTGTGVLTESNKKFLPFQQFGRDIADTTDAVRDPQTLEILDITPCSFGGVSVITPGTNTSNQVAVLYQGVNCTEVPVAIHADQLTPTWRVYSTGSNVFQTRAGCLIGAEHVNNSYECDIPIGAGICASYQTQTNSPRRARSVASQSIIAYTMSLGAENSVAYSNNSIAIPTNFTISVTTEILPVSMTKTSVDCTMYICGDSTECSNLLLQYGSFCTQLNRALTGIAVEQDKNTQEVFAQVKQIYKTPPIKDFGGFNFSQILPDPSKPSKRSFIEDLLFNKVTLADAGFIKQYGDCLGDIAARDLICAQKFNGLTVLPPLLTDEMIAQYTSALLAGTITSGWTFGAGAALQIPFAMQMAYRFNGIGVTQNVLYENQKLIANQFNSAIGKIQDSLSSTASALGKLQDVVNQNAQALNTLVKQLSSNFGAISSVLNDILSRLDKVEAEVQIDRLITGRLQSLQTYVTQQLIRAAEIRASANLAATKMSECVLGQSKRVDFCGKGYHLMSFPQSAPHGVVFLHVTYVPAQEKNFTTAPAICHDGKAHFPREGVFVSNGTHWFVTQRNFYEPQIITTDNTFVSGNCDVVIGVVNNTVYDPLQPELDSFKEELDKYFKNHTSPDVDLGDISGINASVVNIQKEIDRLNEVAKNLNESLIDLQELGKYEQYIKGGGSGGGQIYEGKLTAEGLRFGIVASRFNHALVDRLVEGAIDAIVRHGGREEDITLVRVPGSWEIPVAAGELARKEDIDAVIAIGVLIRGATPHFDYIASEVSKGLADLSLELRKPITFGVITADTLEQAIERAGTKHGNKGWEAALSAIEMANLFKSLR

SEQ ID NO: 3653 - protein, 1371 aa, Artificial Sequence
  SARS-CoV-2/Netherlands/ZuidHolland_9/2020__EPI_ISL_414445 spike protein (1-1211) LumSynth construct
MFVFLVLLPLVSSQCVNLTTRTQLPPAYTNSFTRGVYYPDKVFRSSVLHSTQDLFLPFFSNVTWFHAIHVSGTNGTKRFDNPVLPFNDGVYFASTEKSNIIRGWIFGTTLDSKTQSLLIVNNATNVVIKVCEFQFCNDPFLGVYYHKNNKSWMESEFRVYSSANNCTFEYVSQPFLMDLEGKQGNFKNLREFVFKNIDGYFKIYSKHTPINLVRDLPQGFSALEPLVDLPIGINITRFQTLLALHRSYLTPGDSSSGWTAGAAAYYVGYLQPRTFLLKYNENGTITDAVDCALDPLSETKCTLKSFTVEKGIYQTSNFRVQPTESIVRFPNITNLCPFGEVFNATRFASVYAWNRKRISNCVADYSVLYNSASFSTFKCYGVSPTKLNDLCFTNVYADSFVIRGDEVRQIAPGQTGKIADYNYKLPDDFTGCVIAWNSNNLDSKVGGNYNYLYRLFRKSNLKPFERDISTEIYQAGSTPCNGVEGFNCYFPLQSYGFQPTNGVGYQPYRVVVLSFELLHAPATVCGPKKSTNLVKNKCVNFNFNGLTGTGVLTESNKKFLPFQQFGRDIADTTDAVRDPQTLEILDITPCSFGGVSVITPGTNTSNQVAVLYQGVNCTEVPVAIHADQLTPTWRVYSTGSNVFQTRAGCLIGAEHVNNSYECDIPIGAGICASYQTQTNSPRRARSVASQSIIAYTMSLGAENSVAYSNNSIAIPTNFTISVTTEILPVSMTKTSVDCTMYICGDSTECSNLLLQYGSFCTQLNRALTGIAVEQDKNTQEVFAQVKQIYKTPPIKDFGGFNFSQILPDPSKPSKRSFIEDLLFNKVTLADAGFIKQYGDCLGDIAARDLICVQKFNGLTVLPPLLTDEMIAQYTSALLAGTITSGWTFGAGAALQIPFAMQMAYRFNGIGVTQNVLYENQKLIANQFNSAIGKIQDSLSSTASALGKLQDVVNQNAQALNTLVKQLSSNFGAISSVLNDILSRLDKVEAEVQIDRLITGRLQSLQTYVTQQLIRAAEIRASANLAATKMSECVLGQSKRVDFCGKGYHLMSFPQSAPHGVVFLHVTYVPAQEKNFTTAPAICHDGKAHFPREGVFVSNGTHWFVTQRNFYEPQIITTDNTFVSGNCDVVIGIVNNTVYDPLQPELDSFKEELDKYFKNHTSPDVDLGDISGINASVVNIQKEIDRLNEVAKNLNESLIDLQELGKYEQYIKGGGSGGGQIYEGKLTAEGLRFGIVASRFNHALVDRLVEGAIDAIVRHGGREEDITLVRVPGSWEIPVAAGELARKEDIDAVIAIGVLIRGATPHFDYIASEVSKGLADLSLELRKPITFGVITADTLEQAIERAGTKHGNKGWEAALSAIEMANLFKSLR

SEQ ID NO: 3654 - protein, 1371 aa, Artificial Sequence
  SARS-CoV-2/Finland/FIN03032020A/2020__EPI_ISL_413602 spike protein (1-1211) LumSynth construct
MFVFLVLLPLVSSQCVNLTTRTQLPPAYTNSFTRGVYYPDKVFRSSVLHSTQDLFLPFFSNVTWFHAIHVSGTNGTKRFDNPVLPFNDGVYFASTEKSNIIRGWIFGTTLDSKTQSLLIVNNATNVVIKVCEFQFCNDPFLGVYYHKNNKSWMESEFRVYSSANNCTFEYVSQPFLMDLEGKQGNFKNLREFVFKNIDGYFKIYSKHTPINLVRDLPQGFSALEPLVDLPIGINITRFQTLLALHRSYLTPGDSSSGWTAGAAAYYVGYLQPRTFLLKYNENGTITDAVDCALDPLSETKCTLKSFTVEKGIYQTSNFRVQPTESIVRFPNITNLCPFGEVFNATRFASVYAWNRKRISNCVADYSVLYNSASFSTFKCYGVSPTKLNDLCFTNVYADSFVIRGDEVRQIAPGQTGKIADYNYKLPDDFTGCVISWNSNNLDSKVGGNYNYLYRLFRKSNLKPFERDISTEIYQAGSTPCNGVEGFNCYFPLQSYGFQPTNGVGYQPYRVVVLSFELLHAPATVCGPKKSTNLVKNKCVNFNFNGLTGTGVLTESNKKFLPFQQFGRDIADTTDAVRDPQTLEILDITPCSFGGVSVITPGTNTSNQVAVLYQGVNCTEVPVAIHADQLTPTWRVYSTGSNVFQTRAGCLIGAEHVNNSYECDIPIGAGICASYQTQTNSPRRARSVASQSIIAYTMSLGAENSVAYSNNSIAIPTNFTISVTTEILPVSMTKTSVDCTMYICGDSTECSNLLLQYGSFCTQLNRALTGIAVEQDKNTQEVFAQVKQIYKTPPIKDFGGFNFSQILPDPSKPSKRSFIEDLLFNKVTLADAGFIKQYGDCLGDIAARDLICAQKFNGLTVLPPLLTDEMIAQYTSALLAGTITSGWTFGAGAALQIPFAMQMAYRFNGIGVTQNVLYENQKLIANQFNSAIGKIQDSLSSTASALGKLQDVVNQNAQALNTLVKQLSSNFGAISSVLNDILSRLDKVEAEVQIDRLITGRLQSLQTYVTQQLIRAAEIRASANLAATKMSECVLGQSKRVDFCGKGYHLMSFPQSAPHGVVFLHVTYVPAQEKNFTTAPAICHDGKAHFPREGVFVSNGTHWFVTQRNFYEPQIITTDNTFVSGNCDVVIGIVNNTVYDPLQPELDSFKEELDKYFKNHTSPDVDLGDISGINASVVNIQKEIDRLNEVAKNLNESLIDLQELGKYEQYIKGGGSGGGQIYEGKLTAEGLRFGIVASRFNHALVDRLVEGAIDAIVRHGGREEDITLVRVPGSWEIPVAAGELARKEDIDAVIAIGVLIRGATPHFDYIASEVSKGLADLSLELRKPITFGVITADTLEQAIERAGTKHGNKGWEAALSAIEMANLFKSLR

SEQ ID NO: 3655 - protein, 1371 aa, Artificial Sequence
  SARS-CoV-2/France/GE1977/2020__EPI_ISL_414632 spike protein (1-1211) LumSynth construct
MFVFLVLLPLVSSQCVNLTTRTQLPPAYTNSFTRGVYYPDKVFRSSVLHSTQDLFLPFFSNVTWFHAIHVSGTNGTKRFDNPVLPFNDGVYFASTEKSNIIRGWIFGTTLDSKTQSLLIVNNATNVVIKVCEFQFCNDPFLGVYYHKNNKSWMESEFRVYSSANNCTFEYVSQPFLMDLEGKQGNFKNLREFVFKNIDGYFKIYSKHTPINLVRDLPQGFSALEPLVDLPIGINITRFQTLLALHRSYLTPGDSSSGWTAGAAAYYVGYLQPRTFLLKYNENGTITDAVDCALDPLSETKCTLKSFTVEKGIYQTSNFRVQPTESIVRFPNITNLCPFGEVFNATRFASVYAWNRKRISNCVADYSVLYNSASFSTFKCYGVSPTKLNDLCFTNVYADSFVIRGDEVRQIAPGQTGKIADYNYKLPDDFTGCVIAWNSNNLDSKVGGNYNYLYRLFRKSNLKPFERDISTEIYQAGSTPCNGVEGFNCYFPLQSYGFQPTNGVGYQPYRVVVLSFELLHAPATVCGPKKSTNLVKNKCVNFNFNGLTGTGVLTESNKKFLPFQQFGRDIADTTDAVRDPQTLEILDITPCSFGGVSVITPGTNTSNQVAVLYQGVNCTEVPVAIHADQLTPTWRVYSTGSNVFQTRAGCLIGAEHVNNSYECDIPIGAGICASYQTQTNSPRRARSVASQSIIAYTMSLGAENSVAYSNNSIAIPTNFTISVTTEILPVSMTKTSVDCTMYICGDSTECSNLLLQYGSFCTQLNRALTGIAVEQDKNTQEVFAQVKQIYKTPPIKDFGGFNFSQILPDPSKPSKRSFIEDLLFNKVTLADAGFIKQYGDCLGDIAARDLICAQKFNGLTVLPPLLTDEMIAQYTSALLAGTITSGWTFGAGAALQIPFAMQMAYRFNGIGVTQNVLYENQKLIANQFNSAIGKIQDSLFSTASALGKLQDVVNQNAQALNTLVKQLSSNFGAISSVLNDILSRLDKVEAEVQIDRLITGRLQSLQTYVTQQLIRAAEIRASANLAATKMSECVLGQSKRVDFCGKGYHLMSFPQSAPHGVVFLHVTYVPAQEKNFTTAPAICHDGKAHFPREGVFVSNGTHWFVTQRNFYEPQIITTDNTFVSGNCDVVIGIVNNTVYDPLQPELDSFKEELDKYFKNHTSPDVDLGDISGINASVVNIQKEIDRLNEVAKNLNESLIDLQELGKYEQYIKGGGSGGGQIYEGKLTAEGLRFGIVASRFNHALVDRLVEGAIDAIVRHGGREEDITLVRVPGSWEIPVAAGELARKEDIDAVIAIGVLIRGATPHFDYIASEVSKGLADLSLELRKPITFGVITADTLEQAIERAGTKHGNKGWEAALSAIEMANLFKSLR

SEQ ID NO: 3656 - protein, 1371 aa, Artificial Sequence
  SARS-CoV-2/Finland/FIN-313/2020__EPI_ISL_414641 spike protein (1-1211) LumSynth construct
MFVFLVLLPLVSSQCVNLTTRTQLPPAYTNSFTRGVYYPDKVFRSSVLHSTQDLFLPFFSNVTWFHAIHVSGTNGTKRFDNPVLPFNDGVYFASTEKSNIIRGWIFGTTLDSKTQSLLIVNNATNVVIKVCEFQFCNDPFLGVYYHKNNKSWMESEFRVYSSANNCTFEYVSQPFLMDLEGKQGNFKNLREFVFKNIDGYFKIYSKHTPINLVRDLPQGFSALEPLVDLPIGINITRFKTLLALHRSYLTPGDSSSGWTAGAAAYYVGYLQPRTFLLKYNENGTITDAVDCALDPLSETKCTLKSFTVEKGIYQTSNFRVQPTESIVRFPNITNLCPFGEVFNATRFASVYAWNRKRISNCVADYSVLYNSASFSTFKCYGVSPTKLNDLCFTNVYADSFVIRGDEVRQIAPGQTGKIADYNYKLPDDFTGCVIAWNSNNLDSKVGGNYNYLYRLFRKSNLKPFERDISTEIYQAGSTPCNGVEGFNCYFPLQSYGFQPTNGVGYQPYRVVVLSFELLHAPATVCGPKKSTNLVKNKCVNFNFNGLTGTGVLTESNKKFLPFQQFGRDIADTTDAVRDPQTLEILDITPCSFGGVSVITPGTNTSNQVAVLYQGVNCTEVPVAIHADQLTPTWRVYSTGSNVFQTRAGCLIGAEHVNNSYECDIPIGAGICASYQTQTNSPRRARSVASQSIIAYTMSLGAENSVAYSNNSIAIPTNFTISVTTEILPVSMTKTSVDCTMYICGDSTECSNLLLQYGSFCTQLNRALTGIAVEQDKNTQEVFAQVKQIYKTPPIKDFGGFNFSQILPDPSKPSKRSFIEDLLFNKVTLADAGFIKQYGDCLGDIAARDLICAQKFNGLTVLPPLLTDEMIAQYTSALLAGTITSGWTFGAGAALQIPFAMQMAYRFNGIGVTQNVLYENQKLIANQFNSAIGKIQDSLSSTASALGKLQDVVNQNAQALNTLVKQLSSNFGAISSVLNDILSRLDKVEAEVQIDRLITGRLQSLQTYVTQQLIRAAEIRASANLAATKMSECVLGQSKRVDFCGKGYHLMSFPQSAPHGVVFLHVTYVPAQEKNFTTAPAICHDGKAHFPREGVFVSNGTHWFVTQRNFYEPQIITTDNTFVSGNCDVVIGIVNNTVYDPLQPELDSFKEELDKYFKNHTSPDVDLGDISGINASVVNIQKEIDRLNEVAKNLNESLIDLQELGKYEQYIKGGGSGGGQIYEGKLTAEGLRFGIVASRFNHALVDRLVEGAIDAIVRHGGREEDITLVRVPGSWEIPVAAGELARKEDIDAVIAIGVLIRGATPHFDYIASEVSKGLADLSLELRKPITFGVITADTLEQAIERAGTKHGNKGWEAALSAIEMANLFKSLR

SEQ ID NO: 3657 - protein, 1371 aa, Artificial Sequence
  SARS-CoV-2/Netherlands/ZuidHolland_2/2020__EPI_ISL_414556 spike protein (1-1211) LumSynth construct
MFVFLVLLPLVSSQCVNLTTRTQLPPAYTNSFTRGVYYPDKVFRSSVLHSTQDLFLPFFSNVTWFHAIHVSGTNGTKRFDNPVLPFNDGVYFASTEKSNIIRGWIFGTTLDSKTQSLLIVNNATNVVIKVCEFQFCNDPFLGVYYHKNNKSWMESEFRVYSSANNCTFEYVSQPFLMDLEGKQGNFKNLREFVFKNIDGYFKIYSKHTPINLVRDLPQGFSALEPLVDLPIGINITRFQTLLALHRSYLTPGDSSSGWTAGAAAYYVGYLQPRTFLLKYNENGTITDAVDCALDPLSETKCTLKSFTVEKGIYQTSNFRVQPTESIVRFPNITNLCPFGEVFNATRFASVYAWNRKRISNCVADYSVLYNSASFSTFKCYGVSPTKLNDLCFTNVYADSFVIRGDEVRQIAPGQTGKIADYNYKLPDDFTGCVIAWNSNNLDSKVGGNYNYLYRLFRKSNLKPFERDISTEIYQAGSTPCNGVEGFNCYFPLQSYGFQPTNGVGYQPYRVVVLSFELLHAPATVCGPKKSTNLVKNKCVNFNFNGLTGTGVLTESNKKFLPFQQFGRDIADTTDAVRDPQTLEILDITPCSFGGVSVITPGTNTSNQVAVLYQGVNCTEVPVAIHADQLTPTWRVYSTGSNVFQTRAGCLIGAEHVNNSYECDIPIGAGICASYQTQTNSPRRARSVASQSIIAYTMSLGAENSVAYSNNSIAIPTNFTISVTTEILPVSMTKTSVDCTMYICGDSTECSNLLLQYGSFCTQLNRALTGIALEQDKNTQEVFAQVKQIYKTPPIKDFGGFNFSQILPDPSKPSKRSFIEDLLFNKVTLADAGFIKQYGDCLGDIAARDLICAQKFNGLTVLPPLLTDEMIAQYTSALLAGTITSGWTFGAGAALQIPFAMQMAYRFNGIGVTQNVLYENQKLIANQFNSAIGKIQDSLSSTASALGKLQDVVNQNAQALNTLVKQLSSNFGAISSVLNDILSRLDKVEAEVQIDRLITGRLQSLQTYVTQQLIRAAEIRASANLAATKMSECVLGQSKRVDFCGKGYHLMSFPQSAPHGVVFLHVTYVPAQEKNFTTAPAICHDGKAHFPREGVFVSNGTHWFVTQRNFYEPQIITTDNTFVSGNCDVVIGIVNNTVYDPLQPELDSFKEELDKYFKNHTSPDVDLGDISGINASVVNIQKEIDRLNEVAKNLNESLIDLQELGKYEQYIKGGGSGGGQIYEGKLTAEGLRFGIVASRFNHALVDRLVEGAIDAIVRHGGREEDITLVRVPGSWEIPVAAGELARKEDIDAVIAIGVLIRGATPHFDYIASEVSKGLADLSLELRKPITFGVITADTLEQAIERAGTKHGNKGWEAALSAIEMANLFKSLR

SEQ ID NO: 3658 - protein, 1371 aa, Artificial Sequence
  SARS-CoV-2/USA/WA-UW31/2020__EPI_ISL_414618 spike protein (1-1211) LumSynth construct
MFVFLVLLPLVSSQCVNLTTRTQLPPAYTNSFTRGVYYPDKVFRSSVLHSTQDLFLPFFSNVTWFHAIHVSGTNGTKRFDNPVLPFNDGVYFASTEKSNIIRGWIFGTTLDSKTQSLLIVNNATNVVIKVCEFQFCNDPFLGVYYHKNNKSWMESEFRVYSSANNCTFEYVSQPFLMDLEGKQGNFKNLREFVFKNIDGYFKIYSKHTPINLVRDLPQGFSALEPLVDLPIGINITRFQTLLALHRSYLTPGDSSSGWTAGAAAYYVGYLQPRTFLLKYNENGTITDAVDCALDPLSETKCTLKSFTVEKGIYQTSNFRVQPTESIVRFPNITNLCPFGEVFNATRFASVYAWNRKRISNCVADYSVLYNSASFSTFKCYGVSPTKLNDLCFTNVYADSFVIRGDEVRQIAPGQTGKIADYNYKLPDDFTGCVIAWNSNNLDSKVGGNYNYLYRLFRKSNLKPFERDISTEIYQAGSTPCNGAEGFNCYFPLQSYGFQPTNGVGYQPYRVVVLSFELLHAPATVCGPKKSTNLVKNKCVNFNFNGLTGTGVLTESNKKFLPFQQFGRDIADTTDAVRDPQTLEILDITPCSFGGVSVITPGTNTSNQVAVLYQDVNCTEVPVAIHADQLTPTWRVYSTGSNVFQTRAGCLIGAEHVNNSYECDIPIGAGICASYQTQTNSPRRARSVASQSIIAYTMSLGAENSVAYSNNSIAIPTNFTISVTTEILPVSMTKTSVDCTMYICGDSTECSNLLLQYGSFCTQLNRALTGIAVEQDKNTQEVFAQVKQIYKTPPIKDFGGFNFSQILPDPSKPSKRSFIEDLLFNKVTLADAGFIKQYGDCLGDIAARDLICAQKFNGLTVLPPLLTDEMIAQYTSALLAGTITSGWTFGAGAALQIPFAMQMAYRFNGIGVTQNVLYENQKLIANQFNSAIGKIQDSLSSTASALGKLQDVVNQNAQALNTLVKQLSSNFGAISSVLNDILSRLDKVEAEVQIDRLITGRLQSLQTYVTQQLIRAAEIRASANLAATKMSECVLGQSKRVDFCGKGYHLMSFPQSAPHGVVFLHVTYVPAQEKNFTTAPAICHDGKAHFPREGVFVSNGTHWFVTQRNFYEPQIITTDNTFVSGNCDVVIGIVNNTVYDPLQPELDSFKEELDKYFKNHTSPDVDLGDISGINASVVNIQKEIDRLNEVAKNLNESLIDLQELGKYEQYIKGGGSGGGQIYEGKLTAEGLRFGIVASRFNHALVDRLVEGAIDAIVRHGGREEDITLVRVPGSWEIPVAAGELARKEDIDAVIAIGVLIRGATPHFDYIASEVSKGLADLSLELRKPITFGVITADTLEQAIERAGTKHGNKGWEAALSAIEMANLFKSLR

SEQ ID NO: 3659 - protein, 1371 aa, Artificial Sequence
  SARS-CoV-2/South Korea/SNU01/2020__EPI_ISL_411929 spike protein (1-1211) LumSynth construct
MFVFLVLLPLVSSQCVNLTTRTQLPPAYTNSFTRGVYYPDKVFRSSVLHSTQDLFLPFFSNVTWFHAIHVSGTNGTKRFDNPVLPFNDGVYFASTEKSNIIRGWIFGTTLDSKTQSLLIVNNATNVVIKVCEFQFCNDPFLGVYYHKNNKSWMESEFRVYSSANNCTFEYVSQPFLMDLEGKQGNFKNLREFVFKNIDGYFKIYSKHTPINLVRDLPQGFWALEPLVDLPIGINITRFQTLLALHRSYLTPGDSSSGWTAGAAAYYVGYLQPRTFLLKYNENGTITDAVDCALDPLSETKCTLKSFTVEKGIYQTSNFRVQPTESIVRFPNITNLCPFGEVFNATRFASVYAWNRKRISNCVADYSVLYNSASFSTFKCYGVSPTKLNDLCFTNVYADSFVIRGDEVRQIAPGQTGKIADYNYKLPDDFTGCVIAWNSNNLDSKVGGNYNYLYRLFRKSNLKPFERDISTEIYQAGSTPCNGVEGFNCYFPLQSYGFQPTNGVGYQPYRVVVLSFELLHAPATVCGPKKSTNLVKNKCVNFNFNGLTGTGVLTESNKKFLPFQQFGRDIADTTDAVRDPQTLEILDITPCSFGGVSVITPGTNTSNQVAVLYQDVNCTEVPVAIHADQLTPTWRVYSTGSNVFQTRAGCLIGAEHVNNSYECDIPIGAGICASYQTQTNSPRRARSVASQSIIAYTMSLGAENSVAYSNNSIAIPTNFTISVTTEILPVSMTKTSVDCTMYICGDSTECSNLLLQYGSFCTQLNRALTGIAVEQDKNTQEVFAQVKQIYKTPPIKDFGGFNFSQILPDPSKPSKRSFIEDLLFNKVTLADAGFIKQYGDCLGDIAARDLICAQKFNGLTVLPPLLTDEMIAQYTSALLAGTITSGWTFGAGAALQIPFAMQMAYRFNGIGVTQNVLYENQKLIANQFNSAIGKIQDSLSSTASALGKLQDVVNQNAQALNTLVKQLSSNFGAISSVLNDILSRLDKVEAEVQIDRLITGRLQSLQTYVTQQLIRAAEIRASANLAATKMSECVLGQSKRVDFCGKGYHLMSFPQSAPHGVVFLHVTYVPAQEKNFTTAPAICHDGKAHFPREGVFVSNGTHWFVTQRNFYEPQIITTDNTFVSGNCDVVIGIVNNTVYDPLQPELDSFKEELDKYFKNHTSPDVDLGDISGINASVVNIQKEIDRLNEVAKNLNESLIDLQELGKYEQYIKGGGSGGGQIYEGKLTAEGLRFGIVASRFNHALVDRLVEGAIDAIVRHGGREEDITLVRVPGSWEIPVAAGELARKEDIDAVIAIGVLIRGATPHFDYIASEVSKGLADLSLELRKPITFGVITADTLEQAIERAGTKHGNKGWEAALSAIEMANLFKSLR

SEQ ID NO: 3660 - protein, 1371 aa, Artificial Sequence
  SARS-CoV-2/China/WF0004/2020__EPI_ISL_413694 spike protein (1-1211) LumSynth construct
MFVFLVLLPLVSSQCVNLTTRTQLPPAYTNSFTRGVYYPDKVFRSSVLHSTQDLFLPFFSNVTWFHAIHVSGTNGTKRFDNPVLPFNDGVYFASTEKSNIIRGWIFGTTLDSKTQSLLIVNNATNVVIKVCEFQFCNDPFLGVYYHKNNKSWTESEFRVYSSANNCTFEYVSQPFLMDLEGKQGNFKNLREFVFKNIDGYFKIYSKHTPINLVRDLPQGFSALEPLVDLPIGINITRFQTLLALHRSYLTPGDSSSGWTAGAAAYYVGYLQPRTFLLKYNENGTITDAVDCALDPLSETKCTLKSFTVEKGIYQTSNFRVQPTESIVRFPNITNLCPFGEVFNATRFASVYAWNRKRISNCVADYSVLYNSASFSTFKCYGVSPTKLNDLCFTNVYADSFVIRGDEVRQIAPGQTGKIADYNYKLPDDFTGCVIAWNSNNLDSKVGGNYNYLYRLFRKSNLKPFERDISTEIYQAGSTPCNGVEGFNCYFPLQSYGFQPTNGVGYQPYRVVVLSFELLHAPATVCGPKKSTNLVKNKCVNFNFNGLTGTGVLTESNKKFLPFQQFGRDIADTTDAVRDPQTLEILDITPCSFGGVSVITPGTNTSNQVAVLYQDVNCTEVPVAIHADQLTPTWRVYSTGSNVFQTRAGCLIGAEHVNNSYECDIPIGAGICASYQTQTNSPRRARSVASQSIIAYTMSLGAENSVAYSNNSIAIPTNFTISVTTEILPVSMTKTSVDCTMYICGDSTECSNLLLQYGSFCTQLNRALTGIAVEQDKNTQEVFAQVKQIYKTPPIKDFGGFNFSQILPDPSKPSKRSFIEDLLFNKVTLADAGFIKQYGDCLGDIAARDLICAQKFNGLTVLPPLLTDEMIAQYTSALLAGTITSGWTFGAGAALQIPFAMQMAYRFNGIGVTQNVLYENQKLIANQFNSAIGKIQDSLSSTASALGKLQDVVNQNAQALNTLVKQLSSNFGAISSVLNDILSRLDKVEAEVQIDRLITGRLQSLQTYVTQQLIRAAEIRASANLAATKMSECVLGQSKRFDFCGKGYHLMSFPQSAPHGVVFLHVTYVPAQEKNFTTAPAICHDGKAHFPREGVFVSNGTHWFVTQRNFYEPQIITTDNTFVSGNCDVVIGIVNNTVYDPLQPELDSFKEELDKYFKNHTSPDVDLGDISGINASVVNIQKEIDRLNEVAKNLNESLIDLQELGKYEQYIKGGGSGGGQIYEGKLTAEGLRFGIVASRFNHALVDRLVEGAIDAIVRHGGREEDITLVRVPGSWEIPVAAGELARKEDIDAVIAIGVLIRGATPHFDYIASEVSKGLADLSLELRKPITFGVITADTLEQAIERAGTKHGNKGWEAALSAIEMANLFKSLR

SEQ ID NO: 3661 - protein, 1371 aa, Artificial Sequence
  SARS-CoV-2/China/WF0028/2020__EPI_ISL_413791 spike protein (1-1211) LumSynth construct
MFVFLVLLPLVSSQCVNLTTRTQLPPAYTNSFTRGVYYPDKVFRSSVLHSTQDLFLPFFSNVTWFHAIHVSGTNGTKRFDNPVLPFNDGVYFASTEKSNIIRGWIFGTTLDSKTQSLLIVNNATNVVIKVCEFQFCNDPFLGVYYHKNNKSWMESEFRVYSSANNCTFEYVSQPFLMDLEGKQGNFKNLREFVFKNIDGYFKIYSKHTPINLVRDLPQGFSALEPLVDLPIGINITRFQTLLALHRSYLTPGDSSSGWTAGAAAYYVGYLQPRTFLLKYNENGTITDAVDCALDPLSETKCTLKSFTVEKGIYQTSNFRVQPTESIVRFPNITNLCPFGEVFNATRFASVYAWNRKRISNCVADYSVLYNSASFSTFKCYGVSPTKLNDLCFTNVYADSFVIRGDEVRQIAPGQTGKIADYNYKLPDDFTGCVIAWNSNNLDSKVGGNYNYLYRLFRKSNLKPFERDISTEIYQAGSTPCNGVEGFNCYFPLQSYGFQPTNGVGYQPYRVVVLSFELLHAPATVCGPKKSTNLVKNKCVNFNFNGLTGTGVLTESNKKFLPFQQFGRDIADTTDAVRDPQTLEILDITPCSFGGVSVITPGTNTSNQVAVLYQDVNCTEVPVAIHADQLTPTWRVYSTGSNVFQTRAGCLIGAEHVNNSYECDIPIGAGICASYQTQTNSPRRARSVASQSIIAYTMSLGAENSVAYSNNSIAIPTNFTISVTTEILPVSMTKTSVDCTMYICGDSTECSNLLLQYGSFCTQLNRALTGIAVEQDKNTQEVFAQVKQIYKTPPIKDFGGFNFSQILPDPSKPSKRSFIEDLLFNKVTLADAGFIKQYGDCLGDIAARDLICAQKFNGLTVLPPLLTDEMIAQYTSALLAGTITSGWTFGAGAALQIPFAMQMAYRFNGIGVTQNVLYENQKLIANQFNSAIGKIQDSLSSTASALGKLQDVVNQNAQALNTLVKQLSSNFGAISSVLNDILSRLDKVEAEVQIDRLITGRLQSLQTYVTQQLIRAAEIRASANLAATKMSECVLGQSKRVDFCGKGYHLMSFPQSAPHGVVFLHVTYVPAQEKNFTTAPAICHDGKAHFPREGVFVSNGTHWFVTQRNFYEPQIITTDNTFVSGNCDVVIGIVNNTVYDPLQPELESFKEELDKYFKNHTSPDVDLGDISGINASVVNIQKEIDRLNEVAKNLNESLIDLQELGKYEQYIKGGGSGGGQIYEGKLTAEGLRFGIVASRFNHALVDRLVEGAIDAIVRHGGREEDITLVRVPGSWEIPVAAGELARKEDIDAVIAIGVLIRGATPHFDYIASEVSKGLADLSLELRKPITFGVITADTLEQAIERAGTKHGNKGWEAALSAIEMANLFKSLR

SEQ ID NO: 3662 - protein, 1371 aa, Artificial Sequence
  SARS-CoV-2/2019-nCoV/USA-CruiseA-18/2020__MT159716.1 spike protein (1-1211) LumSynth construct
MFVFLVLLPLVSSQCVNLTTRTQLPPAYTNSFTRGVYYPDKVFRSSVLHSTQDLFLPFFSNVTWFHAIHVSGTNGTKRFDNPVLPFNDGVYFASTEKSNIIRGWIFGTTLDSKTQSLLIVNNATNVVIKVCEFQFCNDPFLGVYYHKNNKSWMESELRVYSSANNCTFEYVSQPFLMDLEGKQGNFKNLREFVFKNIDGYFKIYSKHTPINLVRDLPQGFSALEPLVDLPIGINITRFQTLLALHRSYLTPGDSSSGWTAGAAAYYVGYLQPRTFLLKYNENGTITDAVDCALDPLSETKCTLKSFTVEKGIYQTSNFRVQPTESIVRFPNITNLCPFGEVFNATRFASVYAWNRKRISNCVADYSVLYNSASFSTFKCYGVSPTKLNDLCFTNVYADSFVIRGDEVRQIAPGQTGKIADYNYKLPDDFTGCVIAWNSNNLDSKVGGNYNYLYRLFRKSNLKPFERDISTEIYQAGSTPCNGVEGFNCYFPLQSYGFQPTNGVGYQPYRVVVLSFELLHAPATVCGPKKSTNLVKNKCVNFNFNGLTGTGVLTESNKKFLPFQQFGRDIADTTDAVRDPQTLEILDITPCSFGGVSVITPGTNTSNQVAVLYQDVNCTEVPVAIHADQLTPTWRVYSTGSNVFQTRAGCLIGAEHVNNSYECDIPIGAGICASYQTQTNSPRRARSVASQSIIAYTMSLGAENSVAYSNNSIAIPTNFTISVTTEILPVSMTKTSVDCTMYICGDSTECSNLLLQYGSFCTQLNRALTGIAVEQDKNTQEVFAQVKQIYKTPPIKDFGGFNFSQILPDPSKPSKRSFIEDLLFNKVTLADAGFIKQYGDCLGDIAARDLICAQKFNGLTVLPPLLTDEMIAQYTSALLAGTITSGWTFGAGAALQIPFAMQMAYRFNGIGVTQNVLYENQKLIANQFNSAIGKIQDSLSSTASALGKLQDVVNQNAQALNTLVKQLSSNFGAISSVLNDILSRLDKVEAEVQIDRLITGRLQSLQTYVTQQLIRAAEIRASANLAATKMSECVLGQSKRVDFCGKGYHLMSFPQSAPHGVVFLHVTYVPAQEKNFTTAPAICHDGKAHFPREGVFVSNGTHWFVTQRNFYEPQIITTDNTFVSGNCDVVIGIVNNTVYDPLQPELDSFKEELDKYFKNHTSPDVDLGDISGINASVVNIQKEIDRLNEVAKNLNESLIDLQELGKYEQYIKGGGSGGGQIYEGKLTAEGLRFGIVASRFNHALVDRLVEGAIDAIVRHGGREEDITLVRVPGSWEIPVAAGELARKEDIDAVIAIGVLIRGATPHFDYIASEVSKGLADLSLELRKPITFGVITADTLEQAIERAGTKHGNKGWEAALSAIEMANLFKSLR

SEQ ID NO: 3663 - protein, 1371 aa, Artificial Sequence
  SARS-CoV-2/SARS-CoV-2/Yunnan-01/human/2020/CHN__MT049951.1 spike protein (1-1211) LumSynth construct
MFVFLVLLPLVSSQCVNLTTRTQLPPANTNSFTRGVYYPDKVFRSSVLHSTQDLFLPFFSNVTWFHAIHVSGTNGTKRFDNPVLPFNDGVYFASTEKSNIIRGWIFGTTLDSKTQSLLIVNNATNVVIKVCEFQFCNDPFLGVYYHKNNKSWMESEFRVYSSANNCTFEYVSQPFLMDLEGKQGNFKNLREFVFKNIDGYFKIYSKHTPINLVRDLPQGFSALEPLVDLPIGINITRFQTLLALHRSYLTPGDSSSGWTAGAAAYYVGYLQPRTFLLKYNENGTITDAVDCALDPLSETKCTLKSFTVEKGIYQTSNFRVQPTESIVRFPNITNLCPFGEVFNATRFASVYAWNRKRISNCVADYSVLYNSASFSTFKCYGVSPTKLNDLCFTNVYADSFVIRGDEVRQIAPGQTGKIADYNYKLPDDFTGCVIAWNSNNLDSKVGGNYNYLYRLFRKSNLKPFERDISTEIYQAGSTPCNGVEGFNCYFPLQSYGFQPTNGVGYQPYRVVVLSFELLHAPATVCGPKKSTNLVKNKCVNFNFNGLTGTGVLTESNKKFLPFQQFGRDIADTTDAVRDPQTLEILDITPCSFGGVSVITPGTNTSNQVAVLYQDVNCTEVPVAIHADQLTPTWRVYSTGSNVFQTRAGCLIGAEHVNNSYECDIPIGAGICASYQTQTNSPRRARSVASQSIIAYTMSLGAENSVAYSNNSIAIPTNFTISVTTEILPVSMTKTSVDCTMYICGDSTECSNLLLQYGSFCTQLNRALTGIAVEQDKNTQEVFAQVKQIYKTPPIKDFGGFNFSQILPDPSKPSKRSFIEDLLFNKVTLADAGFIKQYGDCLGDIAARDLICAQKFNGLTVLPPLLTDEMIAQYTSALLAGTITSGWTFGAGAALQIPFAMQMAYRFNGIGVTQNVLYENQKLIANQFNSAIGKIQDSLSSTASALGKLQDVVNQNAQALNTLVKQLSSNFGAISSVLNDILSRLDKVEAEVQIDRLITGRLQSLQTYVTQQLIRAAEIRASANLAATKMSECVLGQSKRVDFCGKGYHLMSFPQSAPHGVVFLHVTYVPAQEKNFTTAPAICHDGKAHFPREGVFVSNGTHWFVTQRNFYEPQIITTDNTFVSGNCDVVIGIVNNTVYDPLQPELDSFKEELDKYFKNHTSPDVDLGDISGINASVVNIQKEIDRLNEVAKNLNESLIDLQELGKYEQYIKGGGSGGGQIYEGKLTAEGLRFGIVASRFNHALVDRLVEGAIDAIVRHGGREEDITLVRVPGSWEIPVAAGELARKEDIDAVIAIGVLIRGATPHFDYIASEVSKGLADLSLELRKPITFGVITADTLEQAIERAGTKHGNKGWEAALSAIEMANLFKSLR

SEQ ID NO: 3664 - protein, 1371 aa, Artificial Sequence
  SARS-CoV-2/USA/WA-UW292/2020__EPI_ISL_418077 spike protein (1-1211) LumSynth construct
MFVFLVLLPLVSSQCVNLTTRTQLPPAYTNSFTRGVYYPDKVFRSSVLHSTQDLFLPFFSNVTWFHAIHVSGTNGTKRFDNPVLPFNDGVYFASTEKSNIIRGWIFGTTLDSKTQSLLIVNNATNVVIKVCEFQFCNDPFLGVYYHKNNKSWMESEFRVYSSANNCTFEYVSQPFLMDLEGKQGNFKNLREFVFKNIDGYFKIYSKHTPINLVRDLPQGFSALEPLVDLPIGINITRFQTLLALHRSYLTPGDSSSGWTAGAAAYYVGYLQPRTFLLKYNENGTITDAVDCALDPLSETKCTLKSFTVEKGIYQTSNFRVQPTESIVRFPNITNLCPFGEVFNATRFASVYAWNRKRISNCVADYSVLYNSASFSTFKCYGVSPTKLNDLCFTNVYADSFVIRGDEVRQIAPGQTGKIADYNYKLPDDFTGCVIAWNSNNLDSKVGGNYNYLYRLFRKSNLKPFERDISTEIYQASSTPCNGVEGFNCYFPLQSYGFQPTNGVGYQPYRVVVLSFELLHAPATVCGPKKSTNLVKNKCVNFNFNGLTGTGVLTESNKKFLPFQQFGRDIADTTDAVRDPQTLEILDITPCSFGGVSVITPGTNTSNQVAVLYQDVNCTEVPVAIHADQLTPTWRVYSTGSNVFQTRAGCLIGAEHVNNSYECDIPIGAGICASYQTQTNSPRRARSVASQSIIAYTMSLGAENSVAYSNNSIAIPTNFTISVTTEILPVSMTKTSVDCTMYICGDSTECSNLLLQYGSFCTQLNRALTGIAVEQDKNTQEVFAQVKQIYKTPPIKDFGGFNFSQILPDPSKPSKRSFIEDLLFNKVTLADAGFIKQYGDCLGDIAARDLICAQKFNGLTVLPPLLTDEMIAQYTSALLAGTITSGWTFGAGAALQIPFAMQMAYRFNGIGVTQNVLYENQKLIANQFNSAIGKIQDSLSSTASALGKLQDVVNQNAQALNTLVKQLSSNFGAISSVLNDILSRLDKVEAEVQIDRLITGRLQSLQTYVTQQLIRAAEIRASANLAATKMSECVLGQSKRVDFCGKGYHLMSFPQSAPHGVVFLHVTYVPAQEKNFTTAPAICHDGKAHFPREGVFVSNGTHWFVTQRNFYEPQIITTDNTFVSGNCDVVIGIVNNTVYDPLQPELDSFKEELDKYFKNHTSPDVDLGDISGINASVVNIQKEIDRLNEVAKNLNESLIDLQELGKYEQYIKGGGSGGGQIYEGKLTAEGLRFGIVASRFNHALVDRLVEGAIDAIVRHGGREEDITLVRVPGSWEIPVAAGELARKEDIDAVIAIGVLIRGATPHFDYIASEVSKGLADLSLELRKPITFGVITADTLEQAIERAGTKHGNKGWEAALSAIEMANLFKSLR

SEQ ID NO: 3665 - protein, 1371 aa, Artificial Sequence
  SARS-CoV-2/Iceland/192/2020__EPI_ISL_417819 spike protein (1-1211) LumSynth construct
MFVFFVLLPLVSSQCVNLTTRTQLPPAYTNSFTRGVYYPDKVFRSSVLHSTQDLFLPFFSNVTWFHAIHVSGTNGTKRFDNPVLPFNDGVYFASTEKSNIIRGWIFGTTLDSKTQSLLIVNNATNVVIKVCEFQFCNDPFLGVYYHKNNKSWMESEFRVYSSANNCTFEYVSQPFLMDLEGKQGNFKNLREFVFKNIDGYFKIYSKHTPINLVRDLPQGFSALEPLVDLPIGINITRFQTLLALHRSYLTPGDSSSGWTAGAAAYYVGYLQPRTFLLKYNENGTITDAVDCALDPLSETKCTLKSFTVEKGIYQTSNFRVQPTESIVRFPNITNLCPFGEVFNATRFASVYAWNRKRISNCVADYSVLYNSASFSTFKCYGVSPTKLNDLCFTNVYADSFVIRGDEVRQIAPGQTGKIADYNYKLPDDFTGCVIAWNSNNLDSKVGGNYNYLYRLFRKSNLKPFERDISTEIYQAGSTPCNGVEGFNCYFPLQSYGFQPTNGVGYQPYRVVVLSFELLHAPATVCGPKKSTNLVKNKCVNFNFNGLTGTGVLTESNKKFLPFQQFGRDIADTTDAVRDPQTLEILDITPCSFGGVSVITPGTNTSNQVAVLYQGVNCTEVPVAIHADQLTPTWRVYSTGSNVFQTRAGCLIGAEHVNNSYECDIPIGAGICASYQTQTNSPRRARSVASQSIIAYTMSLGAENSVAYSNNSIAIPTNFTISVTTEILPVSMTKTSVDCTMYICGDSTECSNLLLQYGSFCTQLNRALTGIAVEQDKNTQEVFAQVKQIYKTPPIKDFGGFNFSQILPDPSKPSKRSFIEDLLFNKVTLADAGFIKQYGDCLGDIAARDLICAQKFNGLTVLPPLLTDEMIAQYTSALLAGTITSGWTFGAGAALQIPFAMQMAYRFNGIGVTQNVLYENQKLIANQFNSAIGKIQDSLSSTASALGKLQDVVNQNAQALNTLVKQLSSNFGAISSVLNDILSRLDKVEAEVQIDRLITGRLQSLQTYVTQQLIRAAEIRASANLAATKMSECVLGQSKRVDFCGKGYHLMSFPQSAPHGVVFLHVTYVPAQEKNFTTAPAICHDGKAHFPREGVFVSNGTHWFVTQRNFYEPQIITTDNTFVSGNCDVVIGIVNNTVYDPLQPELDSFKEELDKYFKNHTSPDVDLGDISGINASVVNIQKEIDRLNEVAKNLNESLIDLQELGKYEQYIKGGGSGGGQIYEGKLTAEGLRFGIVASRFNHALVDRLVEGAIDAIVRHGGREEDITLVRVPGSWEIPVAAGELARKEDIDAVIAIGVLIRGATPHFDYIASEVSKGLADLSLELRKPITFGVITADTLEQAIERAGTKHGNKGWEAALSAIEMANLFKSLR

SEQ ID NO: 3666 - protein, 1371 aa, Artificial Sequence
  SARS-CoV-2/Belgium/ULG-6939/2020__EPI_ISL_417020 spike protein (1-1211) LumSynth construct
MFVFLVLLPLVSSQCVNLTTRTQLPPAYTNSFTRGVYYPDKVFRSSVLHSTQDLFLPFFSNVTWFHAIHVSGTNGTKRFDNPVLPFNDGVYFASTEKSNIIRGWIFGTTLDSKTQSLLIVNNATNVVIKVCEFQFCNDPFLGVYYHKNNKSWMESEFRVYSSANNCTFEYVSQPFLMDLEGKQGNFKNLREFVFKNIDGYFKIYSKHTPINLVRDLPQGFSALEPLVDLPIGINITRFQTLLALHRSYLTPGDSSSGWTAGAAAYYVGYLQPRTFLLKYNENGTITDAVDCALDPLSETKCTLKSFTVEKGIYQTSNFRVQPTESIVRFPNITNLCPFGEVFNATRFASVYAWNRKRISNCVADYSVLYNSASFSTFKCYGVSPTKLNDLCFTNVYADSFVIRGDEVRQIAPGQTGKIADYNYKLPDDFTGCVIAWNSNNLDSKVGGNYNYLYRLFRKSNLKPFERDISTEIYQAGSTPCNGVEGFNCYFPLQSYGFQPTNGVGYQPYRVVVLSFELLHAPATVCGPKKSTNLVKNKCVNFNFNGLTGTGVLTESNKKFLPFQQFGRDIADTTDAVRDPQTLEILDITPCSFGGVSVITPGTNTSNQVAVLYQGVNCTEVPVAIHADQLTPTWRVYSTGSNVFQTRAGCLIGAEHVNNSYECDIPIGAGICASYQTQTNSPRRARSVASQSIIAYTMSLGAENSVVYSNNSIAIPTNFTISVTTEILPVSMTKTSVDCTMYICGDSTECSNLLLQYGSFCTQLNRALTGIAVEQDKNTQEVFAQVKQIYKTPPIKDFGGFNFSQILPDPSKPSKRSFIEDLLFNKVTLADAGFIKQYGDCLGDIAARDLICAQKFNGLTVLPPLLTDEMIAQYTSALLAGTITSGWTFGAGAALQIPFAMQMAYRFNGIGVTQNVLYENQKLIANQFNSAIGKIQDSLSSTASALGKLQDVVNQNAQALNTLVKQLSSNFGAISSVLNDILSRLDKVEAEVQIDRLITGRLQSLQTYVTQQLIRAAEIRASANLAATKMSECVLGQSKRVDFCGKGYHLMSFPQSAPHGVVFLHVTYVPAQEKNFTTAPAICHDGKAHFPREGVFVSNGTHWFVTQRNFYEPQIITTDNTFVSGNCDVVIGIVNNTVYDPLQPELDSFKEELDKYFKNHTSPDVDLGDISGINASVVNIQKEIDRLNEVAKNLNESLIDLQELGKYEQYIKGGGSGGGQIYEGKLTAEGLRFGIVASRFNHALVDRLVEGAIDAIVRHGGREEDITLVRVPGSWEIPVAAGELARKEDIDAVIAIGVLIRGATPHFDYIASEVSKGLADLSLELRKPITFGVITADTLEQAIERAGTKHGNKGWEAALSAIEMANLFKSLR

SEQ ID NO: 3667 - protein, 1371 aa, Artificial Sequence
  SARS-CoV-2/France/HF2496/2020__EPI_ISL_418231 spike protein (1-1211) LumSynth construct
MFVFLVLLPLVSSQCVNLTTRTQLPPAYTNSFTRGVYYPDKVFRSSVLHSTQDLFLPFFSNVTWFHAIHVSGTNGTKRFDNPVLPFNDGVYFASTEKSNIIRGWIFGTTLDSKTQSLLIVNNATNVVIKVCEFQFCNDPFLGVYYHKNNKSWMESEFRVYSSANNCTFEYVSQPFLMDLEGKQGNFKNLREFVFKNIDGYFKIYSKHTPINLVRDLPQGFSALEPLVDLPIGINITRFQTLLALHRSYLTPGDSSSGWTAGAAAYYVGYLQPRTFLLKYNENGTITDAVDCALDPLSETKCTLKSFTVEKGIYQTSNFRVQPTESIVRFPNITNLCPFGEVFNATRFASVYAWNRKRISNCVADYSVLYNSASFSTFKCYGVSPTKLNDLCFTNVYADSFVIRGDEVRQIAPGQTGKIADYNYKLPDDFTGCVIAWNSNNLDSKVGGNYNYLYRLFRKSNLKPFERDISTEIYQAGSTPCNGVEGFNCYFPLQSYGFQPTNGVGYQPYRVVVLSFELLHAPATVCGPKKSTNLVKNKCVNFNFNGLTGTGVLTESNKKFLPFQQFGRDIADTTDAVRDPQTLEILDITPCSFGGVSVITPGTNTSNQVAVLYQGVNCTEVPVAIHADQLTPTWRVYSTGSNVFQTRAGCLIGAEHVNNSYECDIPIGAGICASYQTQTNSPRRARSVASQSIIAYTMSLGAENSVAYSNNSIAIPTNFTISVTTEILPVSMTKTSVDCTMYICGDSTECSNLLLQYGSFCTQLNRALTGIAVEQDKNTQEVFAQVKQIYKTPPIKDFGGFNFSQILPDPSKPSKRSFIEDLLFNKVTLADAGFIKQYGDCLGDIVARDLICAQKFNGLTVLPPLLTDEMIAQYTSALLAGTITSGWTFGAGAALQIPFAMQMAYRFNGIGVTQNVLYENQKLIANQFNSAIGKIQDSLSSTASALGKLQDVVNQNAQALNTLVKQLSSNFGAISSVLNDILSRLDKVEAEVQIDRLITGRLQSLQTYVTQQLIRAAEIRASANLAATKMSECVLGQSKRVDFCGKGYHLMSFPQSAPHGVVFLHVTYVPAQEKNFTTAPAICHDGKAHFPREGVFVSNGTHWFVTQRNFYEPQIITTDNTFVSGNCDVVIGIVNNTVYDPLQPELDSFKEELDKYFKNHTSPDVDLGDISGINASVVNIQKEIDRLNEVAKNLNESLIDLQELGKYEQYIKGGGSGGGQIYEGKLTAEGLRFGIVASRFNHALVDRLVEGAIDAIVRHGGREEDITLVRVPGSWEIPVAAGELARKEDIDAVIAIGVLIRGATPHFDYIASEVSKGLADLSLELRKPITFGVITADTLEQAIERAGTKHGNKGWEAALSAIEMANLFKSLR

SEQ ID NO: 3668 - protein, 1371 aa, Artificial Sequence
  SARS-CoV-2/USA/WA-UW291/2020__EPI_ISL_418076 spike protein (1-1211) LumSynth construct
MFVFLVLLPLVSSQCVNLTTRTQLPPAYTNSFTRGVYYPDKVFRSSVLHSTQDLFLPFFSNVTWFHAIHVSGTNGTKRFDNPVLPFNDGVYFASTEKSNIIRGWIFGTTLDSKTQSLLIVNNATNVVIKVCEFQFCNDPFLGVYYHKNNKSWMESEFRVYSSANNCTFEYVSQPFLMDLEGKQGNFKNLREFVFKNIDGYFKIYSKHTPINLVRDLPQGFSALEPLVDLPIGINITRFQTLLALHRSYLTPGDSSSGWTAGAAAYYVGYLQPRTFLLKYNENGTITDAVDCALDPLSETKCTLKSFTVEKGIYQTSNFRVQPTESIVRFPNITNLCPFGEVFNATRFASVYAWNRKRISNCVADYSVLYNSASFSTFKCYGVSPTKLNDLCFTNVYADSFVIRGDEVRQIAPGQTGKIADYNYKLPDDFTGCVIAWNSNNLDSKVGGNYNYLYRLFRKSNLKPFERDISTEIYQAGSTPCNGVEGFNCYFPLQSYGFQPTNGVGYQPYRVVVLSFELLHAPATVCGPKKSTNLVKNKCVNFNFNGLTGTGVLTESNKKFLPFQQFGRDIADTTDAVRDPQTLEILDITPCSFGGVSVITPGTNTSNQVAVLYQGVNCTEVPVAIHADQLTPTWRVYSTGSNVFQTRAGCLIGAEHVNNSYECDIPIGAGICASYQTQTNSPRRARSVASQSIIAYTMSLGAENSVAYSNNSIAIPTNFTISVTTEILPVSMTKTSVDCTMYICGDSTECSNLLLQYGSFCTQLNRALTGIAVEQDKNTQEVFAQVKQIYKTPPIKDFGGFNFSQILPDPSKPSKRSFIEDLLFNKVTLADAGFIKQYGDCLGDIAARDLICAQKFNGLTVLPPLLTDEMIAQYTSALLAGTITSGWTFGAGAALQIPFAMQMAYRFNGIGVTQNVLYENQKLIANQFNSAIGKIQYSLSSTASALGKLQDVVNQNAQALNTLVKQLSSNFGAISSVLNDILSRLDKVEAEVQIDRLITGRLQSLQTYVTQQLIRAAEIRASANLAATKMSECVLGQSKRVDFCGKGYHLMSFPQSAPHGVVFLHVTYVPAQEKNFTTAPAICHDGKAHFPREGVFVSNGTHWFVTQRNFYEPQIITTDNTFVSGNCDVVIGIVNNTVYDPLQPELDSFKEELDKYFKNHTSPDVDLGDISGINASVVNIQKEIDRLNEVAKNLNESLIDLQELGKYEQYIKGGGSGGGQIYEGKLTAEGLRFGIVASRFNHALVDRLVEGAIDAIVRHGGREEDITLVRVPGSWEIPVAAGELARKEDIDAVIAIGVLIRGATPHFDYIASEVSKGLADLSLELRKPITFGVITADTLEQAIERAGTKHGNKGWEAALSAIEMANLFKSLR

SEQ ID NO: 3669 - protein, 1371 aa, Artificial Sequence; identical to SEQ ID NO: 66
  SARS-CoV-2/Portugal/PT0034/2020__EPI_ISL_418019 spike protein (1-1211) LumSynth construct

SEQ ID NO: 3670 - protein, 1371 aa, Artificial Sequence
  SARS-CoV-2/Iceland/202/2020__EPI_ISL_417750 spike protein (1-1211) LumSynth construct
MFVFLVLLPLVSSQCVNLTTRTQLPPAYTNSFTRGVYYPDKVFRSSVLHSTQDLFLPFFSNVTWFHAIHVSGTNGTKRFDNPVLPFNDGVYFASTEKSNIIRGWIFGTTLDSKTQSLLIVNNATNVVIKVCEFQFCNDPFLGVYYHKNNKSWMESEFRVYSSANNCTFEYVSQPFLMDLEGKQGNFKNLREFVFKNIDGYFKIYSKHTPINLVRDLPQGFSALEPLVDLPIGINITRFQTLLALHRSYLTPGDSSSGWTAGAAAYYVGYLQPRTFLLKYNENGTITDAVDCALDPLSETKCTLKSFTVEKGIYQTSNFRVQPTESIVRFPNITNLCPFGEVFNATRFASVYAWNRKRISNCVADYSVLYNSASFSTFKCYGVSPTKLNDLCFTNVYADSFVIRGDEVRQIAPGQTGKIADYNYKLPDDFTGCVIAWNSNNLDSKVGGNYNYLYRLFRKSNLKPFERDISTEIYQAGSTPCNGVEGFNCYFPLQSYGFQPTNGVGYQPYRVVVLSFELLHAPATVCGPKKSTNLVKNKCVNFNFNGLTGTGVLTESNKKFLPFQQFGRDIADTTDAVRDPQTLEILDITPCSFGGVSVITPGTNTSNQVAVLYQDVNCTEVPVAIHADQLTPTWRVYSTGSNVFQTRAGCLIGAEHVNNSYECDIPIGAGICASYQTQTNSPRRARSVASQSIIAYTMSLGAENSVAYSNNSIAIPTNFTISVTTEILPVSMTKTSVDCTMYICGDSTECSNLLLQYGSFCTQLNRALTGIAVEQDKNTQEVFAQVKQIYKTPPIKDFGGFNFSQILPDPSKPSKRSFIEDLLFNKVTLADAGFIKQYGDCLGDIAARDLICAQKFNGLTVLPPLLTDEMIAQYTSALLAGTITSGWTFGAGAALQIPFAMQMAYRFNGIGVTQNVLYENQKLIANQFNSAIGKIQDSLSSTASALGKLQDVVNQNAQALNTLVKQLSSNFGAISSVLNDILSRLDKVEAEVQIDRLITGRLQSLQTYVTQQLIRAAEIRASANLAATKMSECVLGQSKRVDFCGKGYHLMSFPQSAPHGVVFLHVTYVPAQEKNFTTAPAICHDGKAHFPREGVFVSNGTHWFVTQRNFYEPQIITTDNTFVSGNCDVVIGIVNNTVYDPLQPELDSFKEELDKYFKNHTSPDVDLGDIPGINASVVNIQKEIDRLNEVAKNLNESLIDLQELGKYEQYIKGGGSGGGQIYEGKLTAEGLRFGIVASRFNHALVDRLVEGAIDAIVRHGGREEDITLVRVPGSWEIPVAAGELARKEDIDAVIAIGVLIRGATPHFDYIASEVSKGLADLSLELRKPITFGVITADTLEQAIERAGTKHGNKGWEAALSAIEMANLFKSLR

SEQ ID NO: 3671 - protein, 1371 aa, Artificial Sequence
  SARS-CoV-2/USA/WA-UW261/2020__EPI_ISL_418046 spike protein (1-1211) LumSynth construct
MFVFLVLLPLVSSQCVNLTTRTQLPPAYTNSFTRGVYYPDKVFRSSVLHSTQDLFLPFFSNVTWFHAIHVSGTNGTKRFDNPVLPFNDGVYFASTEKSNIIRGWIFGTTLDSKTQSLLIVNNATNVVIKVCEFQFCNDPFLGVYYHKNNKSWMESEFRVYSSANNCTFEYVSQPFLMDLEGKQGNFKNLREFVFKNIDGYFKIYSKHTPINLVRDLPQGFSALEPLVDLPIGINITRFQTLLALHRSYLTPGDSSSGWTAGAAAYYVGYLQPRTFLLKYNENGTITDAVDCALDPLSETKCTLKSFTVEKGIYQTSNFRVQPTESIVRFPNITNLCPFGEVFNATRFTSVYAWNRKRISNCVADYSVLYNSASFSTFKCYGVSPTKLNDLCFTNVYADSFVIRGDEVRQIAPGQTGKIADYNYKLPDDFTGCVIAWNSNNLDSKVGGNYNYLYRLFRKSNLKPFERDISTEIYQAGSTPCNGVEGFNCYFPLQSYGFQPTNGVGYQPYRVVVLSFELLHAPATVCGPKKSTNLVKNKCVNFNFNGLTGTGVLTESNKKFLPFQQFGRDIADTTDAVRDPQTLEILDITPCSFGGVSVITPGTNTSNQVAVLYQDVNCTEVPVAIHADQLTPTWRVYSTGSNVFQTRAGCLIGAEHVNNSYECDIPIGAGICASYQTQTNSPRRARSVASQSIIAYTMSLGAENSVAYSNNSIAIPTNFTISVTTEILPVSMTKTSVDCTMYICGDSTECSNLLLQYGSFCTQLNRALTGIAVEQDKNTQEVFAQVKQIYKTPPIKDFGGFNFSQILPDPSKPSKRSFIEDLLFNKVTLADAGFIKQYGDCLGDIAARDLICAQKFNGLTVLPPLLTDEMIAQYTSALLAGTITSGWTFGAGAALQIPFAMQMAYRFNGIGVTQNVLYENQKLIANQFNSAIGKIQDSLSSTASALGKLQDVVNQNAQALNTLVKQLSSNFGAISSVLNDILSRLDKVEAEVQIDRLITGRLQSLQTYVTQQLIRAAEIRASANLAATKMSECVLGQSKRVDFCGKGYHLMSFPQSAPHGVVFLHVTYVPAQEKNFTTAPAICHDGKAHFPREGVFVSNGTHWFVTQRNFYEPQIITTDNTFVSGNCDVVIGIVNNTVYDPLQPELDSFKEELDKYFKNHTSPDVDLGDISGINASVVNIQKEIDRLNEVAKNLNESLIDLQELGKYEQYIKGGGSGGGQIYEGKLTAEGLRFGIVASRFNHALVDRLVEGAIDAIVRHGGREEDITLVRVPGSWEIPVAAGELARKEDIDAVIAIGVLIRGATPHFDYIASEVSKGLADLSLELRKPITFGVITADTLEQAIERAGTKHGNKGWEAALSAIEMANLFKSLR

SEQ ID NO: 3672 - protein, 1371 aa, Artificial Sequence
  SARS-CoV-2/Portugal/PT0035/2020__EPI_ISL_418020 spike protein (1-1211) LumSynth construct
MFVFLVLLPLVSSQCVNLTTRTQLPPAYTNSFTRGVYYPDKVFRSSVLHSTQDLFLPFFSNVTWFHAIHVSGTNGTKRFDNPVLPFNDGVYFASTEKSNIIRGWIFGTTLDSKTQSLLIVNNATNVVIKVCEFQFCNDPFLGVYYHKNNKSWMESEFRVYSSANNCTFEYVSQPFLMDLEGKQGNFKNLREFVFKNIDGYFKIYSKHTPINLVRDLPQGFSALEPLVDLPIGINITRFQTLLALHRSYLTPGDSSSGWTAGAAAYYVGYLQPRTFLLKYNENGTITDAVDCALDPLSETKCTLKSFTVEKGIYQTSNFRVQPTESIVRFPNITNLCPFGEVFNATRFASVYAWNRKRISNCVADYSVLYNSASFSTFKCYGVSPTKLNDLCFTNVYADSFVIRGDEVRQIAPGQTGKIADYNYKLPDDFTGCVIAWNSNNLDSKVGGNYNYLYRLFRKSNLKPFERDISTEIYQAGSTPCNGVEGFNCYFPLQSYGFQPTNGVGYQPYRVVVLSFELLHAPATVCGPKKSTNLVKNKCVNFNFNGLTGTGVLTESNKKFLPFQQFGRDIADTTDAVRDPQTLEILDITPCSFGGVSVITPGTNTSNQVAVLYQDVNCTEVPVAIHADQLTPTWRVYSTGSNVFQTRAGCLIGAEHVNNSYECDIPIGAGICASYQTQTNSPRRARSVASQSIIAYTMSLGAENSVAYSNNSIAIPTNFTISVTTEILPVSMTKTSVDCTMYICGDSTECSNLLLQYGSFCTQLNRALTGIAVEQDKNTQEVFAQVKQIYKTPPIKDFGGFNFSQILPDPSKPSKRSFIEDLLFNKVTLADAGFIKQYGDCLGDISARDLICAQKFNGLTVLPPLLTDEMIAQYTSALLAGTITSGWTFGAGAALQIPFAMQMAYRFNGIGVTQNVLYENQKLIANQFNSAIGKIQDSLSSTASALGKLQDVVNQNAQALNTLVKQLSSNFGAISSVLNDILSRLDKVEAEVQIDRLITGRLQSLQTYVTQQLIRAAEIRASANLAATKMSECVLGQSKRVDFCGKGYHLMSFPQSAPHGVVFLHVTYVPAQEKNFTTAPAICHDGKAHFPREGVFVSNGTHWFVTQRNFYEPQIITTDNTFVSGNCDVVIGIVNNTVYDPLQPELDSFKEELDKYFKNHTSPDVDLGDISGINASVVNIQKEIDRLNEVAKNLNESLIDLQELGKYEQYIKGGGSGGGQIYEGKLTAEGLRFGIVASRFNHALVDRLVEGAIDAIVRHGGREEDITLVRVPGSWEIPVAAGELARKEDIDAVIAIGVLIRGATPHFDYIASEVSKGLADLSLELRKPITFGVITADTLEQAIERAGTKHGNKGWEAALSAIEMANLFKSLR

SEQ ID NO: 3673 - protein, 1371 aa, Artificial Sequence
  SARS-CoV-2/USA/NY-NYUMC7/2020__EPI_ISL_418192 spike protein (1-1211) LumSynth construct
MFVFLVLLPLVSSQCVNLTTRTQLPPAYTNSFTRGVYYPDKVFRSSVLHSTQDLFLPFFSNVTWFHAIHVSGTNGTKRFDNPVLPFNDGVYFASTEKSNIIRGWIFGTTLDSKTQSLLIVNNATNVVIKVCEFQFCNDPFLGVYHHKNNKSWMESEFRVYSSANNCTFEYVSQPFLMDLEGKQGNFKNLREFVFKNIDGYFKIYSKHTPINLVRDLPQGFSALEPLVDLPIGINITRFQTLLALHRSYLTPGDSSSGWTAGAAAYYVGYLQPRTFLLKYNENGTITDAVDCALDPLSETKCTLKSFTVEKGIYQTSNFRVQPTESIVRFPNITNLCPFGEVFNATRFASVYAWNRKRISNCVADYSVLYNSASFSTFKCYGVSPTKLNDLCFTNVYADSFVIRGDEVRQIAPGQTGKIADYNYKLPDDFTGCVIAWNSNNLDSKVGGNYNYLYRLFRKSNLKPFERDISTEIYQAGSTPCNGVEGFNCYFPLQSYGFQPTNGVGYQPYRVVVLSFELLHAPATVCGPKKSTNLVKNKCVNFNFNGLTGTGVLTESNKKFLPFQQFGRDIADTTDAVRDPQTLEILDITPCSFGGVSVITPGTNTSNQVAVLYQGVNCTEVPVAIHADQLTPTWRVYSTGSNVFQTRAGCLIGAEHVNNSYECDIPIGAGICASYQTQTNSPRRARSVASQSIIAYTMSLGAENSVAYSNNSIAIPTNFTISVTTEILPVSMTKTSVDCTMYICGDSTECSNLLLQYGSFCTQLNRALTGIAVEQDKNTQEVFAQVKQIYKTPPIKDFGGFNFSQILPDPSKPSKRSFIEDLLFNKVTLADAGFIKQYGDCLGDIAARDLICAQKFNGLTVLPPLLTDEMIAQYTSALLAGTITSGWTFGAGAALQIPFAMQMAYRFNGIGVTQNVLYENQKLIANQFNSAIGKIQDSLSSTASALGKLQDVVNQNAQALNTLVKQLSSNFGAISSVLNDILSRLDKVEAEVQIDRLITGRLQSLQTYVTQQLIRAAEIRASANLAATKMSECVLGQSKRVDFCGKGYHLMSFPQSAPHGVVFLHVTYVPAQEKNFTTAPAICHDGKAHFPREGVFVSNGTHWFVTQRNFYEPQIITTDNTFVSGNCDVVIGIVNNTVYDPLQPELDSFKEELDKYFKNHTSPDVDLGDISGINASVVNIQKEIDRLNEVAKNLNESLIDLQELGKYEQYIKGGGSGGGQIYEGKLTAEGLRFGIVASRFNHALVDRLVEGAIDAIVRHGGREEDITLVRVPGSWEIPVAAGELARKEDIDAVIAIGVLIRGATPHFDYIASEVSKGLADLSLELRKPITFGVITADTLEQAIERAGTKHGNKGWEAALSAIEMANLFKSLR

SEQ ID NO: 3674 - protein, 1371 aa, Artificial Sequence
  SARS-CoV-2/Iceland/189/2020__EPI_ISL_417709 spike protein (1-1211) LumSynth construct
MFVFLVLLPLVSSQCVNLTTRTQLPPAYTNSFTRGVYYPDKVFRSSVLHSTQDLFLPFFSNVTWFHAIHVSGTNGTKRFDNPVLPFNDGVYFASTEKSNIIRGWIFGTTLDSKTQSLLIVNNATNVVIKVCEFQFCNDPFLGVYYHKNNKSWMESEFRVYSSANNCTFEYVSQPFLMDLEGKQGNFKNLREFVFKNIDGYFKIYSKHTPINLVRDLPQGFSALEPLVDLPIGINITRFQTLLALHRSYLTPGDSSSGWTAGAAAYYVGYLQPRTFLLKYNENGTITDAVDCALDPLSETKCTLKSFTVEKGIYQTSNFRVQPTESIVRFPNITNLCPFGEVFNATRFASVYAWNRKRISNCVADYSVLYNSASFSTFKCYGVSPTKLNDLCFTNVYADSFVIRGDEVRQIAPGQTGKIADYNYKLPDDFTGCVIAWNSNNLDSKVGGNYNYLYRLFRKSNLKPFERDISTEIYQAGSTPCNGVEGFNCYFPLQSYGFQPTNGVGYQPYRVVVLSFELLHAPATVCGPKKSTNLVKNKCVNFNFNGLTGTGVLTESNKKFLPFQQFGRDIADTTDAVRDPQTLEILDITPCSFGGVSVITPGTNTSNQVAVLYQGVNCTEVPVAIHADQLTPTWRVYSTGSNVFQTRAGCLIGAEHVNNSYECDIPIGAGICASYQTQTNSPRRARSVASQSIIAYTMSLGAENSVAYSNNSIAIPTNFTISVTTEILPVSMTKTSVDCTMYICGDSTECSNLLLQYGSFCTQLNRALTGIAVEQDKNTQEVFAQVKQIYKTPPIKDFGGFNFSQILPDPSKPSKRSFIEDLLFNKVTLADAGFTKQYGDCLGDIAARDLICAQKFNGLTVLPPLLTDEMIAQYTSALLAGTITSGWTFGAGAALQIPFAMQMAYRFNGIGVTQNVLYENQKLIANQFNSAIGKIQDSLSSTASALGKLQDVVNQNAQALNTLVKQLSSNFGAISSVLNDILSRLDKVEAEVQIDRLITGRLQSLQTYVTQQLIRAAEIRASANLAATKMSECVLGQSKRVDFCGKGYHLMSFPQSAPHGVVFLHVTYVPAQEKNFTTAPAICHDGKAHFPREGVFVSNGTHWFVTQRNFYEPQIITTDNTFVSGNCDVVIGIVNNTVYDPLQPELDSFKEELDKYFKNHTSPDVDLGDISGINASVVNIQKEIDRLNEVAKNLNESLIDLQELGKYEQYIKGGGSGGGQIYEGKLTAEGLRFGIVASRFNHALVDRLVEGAIDAIVRHGGREEDITLVRVPGSWEIPVAAGELARKEDIDAVIAIGVLIRGATPHFDYIASEVSKGLADLSLELRKPITFGVITADTLEQAIERAGTKHGNKGWEAALSAIEMANLFKSLR

SEQ ID NO: 3675 - protein, 1371 aa, Artificial Sequence
  SARS-CoV-2/Australia/NSW56/2020__EPI_ISL_417408 spike protein (1-1211) LumSynth construct
MFVFLVLLPLVSSQCVNLTTRTQLPPAYTNSFTRGVYYPDKVFRSSVLHSTQDLFLPFFSNVTWFHAIHVSGTNGTKRFDNPVLPFNDGVYFASTEKSNIIRGWIFGTTLDSKTQSLLIVNNATNVVIKVCEFQFCNDPFLGVYYHKNNKSWMESEFRVYSSANNCTFEYVSQPFLMDLEGKQGNFKNLREFVFKNIDGYFKIYSKHTPINLVRDLPQGFSALEPLVDLPIGINITRFQTLLALHRSYLTPGDSSSGWTAGAAAYYVGYLQPRTFLLKYNENGTITDAVDCALDPLSETKCTLKSFTVEKGIYQTSNFRVQPTESIVRFPNITNLCPFGEVFNATRFASVYAWNRKRISNCVADYSVLYNSASFSTFKCYGVSPTKLNDLCFTNVYADSFVIRGDEVRQIAPGQTGKIADYNYKLPDDFTGCVIAWNSNNLDSKVGGNYNYLYRLFRKSNLKPFERDISTEIYQAGSTPCNGVEGFNCYFPLQSYGFQPTNGVGYQPYRVVVLSFELLHAPATVCGPKKSTNLVKNKCVNFNFNGLTGTGVLTESNKKFLPFQQFGRDIADTTDAVRDPQTLEILDITPCSFGGVSVITPGTNTSNQVAVLYQDVNCTEVPVAIHADQLTPTWRVYSTGSNVFQTRAGCLIGAEHVNNSYECDIPIGAGICASYQTQTNSPRRARSVASQSIIAYTMSLGAENSVAYSNNSIAIPTNFTISVTTEILPVSMTKTSVDCTMYICGDSTECSNLLLQYGSFCTQLNRALTGIAVEQDKNTQEVFAQVKQIYKTPPIKDFGGFNFSQILPDSSKPSKRSFIEDLLFNKVTLADAGFIKQYGDCLGDIAARDLICAQKFNGLTVLPPLLTDEMIAQYTSALLAGTITSGWTFGAGAALQIPFAMQMAYRFNGIGVTQNVLYENQKLIANQFNSAIGKIQDSLSSTASALGKLQDVVNQNAQALNTLVKQLSSNFGAISSVLNDILSRLDKVEAEVQIDRLITGRLQSLQTYVTQQLIRAAEIRASANLAATKMSECVLGQSKRVDFCGKGYHLMSFPQSAPHGVVFLHVTYVPAQEKNFTTAPAICHDGKAHFPREGVFVSNGTHWFVTQRNFYEPQIITTDNTFVSGNCDVVIGIVNNTVYDPLQPELDSFKEELDKYFKNHTSPDVDLGDISGINASVVNIQKEIDRLNEVAKNLNESLIDLQELGKYEQYIKGGGSGGGQIYEGKLTAEGLRFGIVASRFNHALVDRLVEGAIDAIVRHGGREEDITLVRVPGSWEIPVAAGELARKEDIDAVIAIGVLIRGATPHFDYIASEVSKGLADLSLELRKPITFGVITADTLEQAIERAGTKHGNKGWEAALSAIEMANLFKSLR

SEQ ID NO: 3676 - protein, 1371 aa, Artificial Sequence
  SARS-CoV-2/Iceland/280/2020__EPI_ISL_417608 spike protein (1-1211) LumSynth construct
MFVFLVLLPLVSSQCVNLTTRTQLPPAYTNSFTRGVYYPDKVFRSSVLHSTQDLFLPFFSNVTWFHAIHVSGTNGTKRFDNPVLPFNDGVYFASTEKSNIIRGWIFGTTLDSKTQSLLIVNNATNVVIKVCEFQFCNDPFLGVYYHKNNKSWMESEFRVYSSANNCTFEYVSQPFLMDLEGKQGNFKNLREFVFKNIDGYFKIYSKHTPINLVRDLPQGFSALEPLVDLPIGINITRFQTLLALHRSYLTPGDSSSGWTAGAAAYYVGYLQPRTFLLKYNENGTITDAVDCALDPLSETKCTLKSFTVEKGIYQTSNFRVQPTESIVRFPNITNLCPFGEVFNATRFASVYAWNRKRISNCVADYSVLYNSASFSTFKCYGVSPTKLNDLCFTNVYADSFVIRGDEVRQIAPGQTGKIADYNYKLPDDFTGCVIAWNSNNLDSKVGGNYNYLYRLFRKSNLKPFERDISTEIYQAGSTPCNGVEGFNCYFPLQSYGFQPTNGVGYQPYRVVVLSFELLHAPATVCGPKKSTNLVKNKCVNFNFNGLTGTGVLTESNKKFLPFQQFGRDIADTTDAVRDPQTLEILDITPCSFGGVSVITPGTNTSNQVAVLYQGVNCTEVPVAIHADQLTPTWRVYSTGSNVFQTRAGCLIGAEHVNNSYECDIPIGAGICASYHTQTNSPRRARSVASQSIIAYTMSLGAENSVAYSNNSIAIPTNFTISVTTEILPVSMTKTSVDCTMYICGDSTECSNLLLQYGSFCTQLNRALTGIAVEQDKNTQEVFAQVKQIYKTPPIKDFGGFNFSQILPDPSKPSKRSFIEDLLFNKVTLADAGFIKQYGDCLGDIAARDLICAQKFNGLTVLPPLLTDEMIAQYTSALLAGTITSGWTFGAGAALQIPFAMQMAYRFNGIGVTQNVLYENQKLIANQFNSAIGKIQDSLSSTASALGKLQDVVNQNAQALNTLVKQLSSNFGAISSVLNDILSRLDKVEAEVQIDRLITGRLQSLQTYVTQQLIRAAEIRASANLAATKMSECVLGQSKRVDFCGKGYHLMSFPQSAPHGVVFLHVTYVPAQEKNFTTAPAICHDGKAHFPREGVFVSNGTHWFVTQRNFYEPQIITTDNTFVSGNCDVVIGIVNNTVYDPLQPELDSFKEELDKYFKNHTSPDVDLGDISGINASVVNIQKEIDRLNEVAKNLNESLIDLQELGKYEQYIKGGGSGGGQIYEGKLTAEGLRFGIVASRFNHALVDRLVEGAIDAIVRHGGREEDITLVRVPGSWEIPVAAGELARKEDIDAVIAIGVLIRGATPHFDYIASEVSKGLADLSLELRKPITFGVITADTLEQAIERAGTKHGNKGWEAALSAIEMANLFKSLR

SEQ ID NO: 3677 - protein, 1371 aa, Artificial Sequence; identical to SEQ ID NO: 66
  SARS-CoV-2/Iceland/247/2020__EPI_ISL_417575 spike protein (1-1211) LumSynth construct

SEQ ID NO: 3678 - protein, 1371 aa, Artificial Sequence
  SARS-CoV-2/Iceland/238/2020__EPI_ISL_417566 spike protein (1-1211) LumSynth construct
MFVFLVLLPLVSSQCVNLTTRTQLPPAYTNSFTRGVYYPDKVFRSSVLHSTQDLFLPFFSNVTWFHAIHVSGTNGTKRFDNPVLPFNDGVYFASTEKSNIIRGWIFGTTLDSKTQSLLIVNNATNVVIKVCEFQFCNDPFLGVYYHKNNKSWMESEFRVYSSANNCTFEYVSQPFLMDLEGKQGNFKNLREFVFKNIDGYFKIYSKHTPINLVRDLPQGFSALEPLVDLPIGINITRFQTLLALHRSYLTPGDSSSGWTAGAAAYYVGYLQPRTFLLKYNENGTITDAVDCALDPLSETKCTLKSFTVEKGIYQTSNFRVQPTESIVRFPNITNLCPFGEVFNATRFASVYAWNRKRISNCVADYSVLYNSASFSTFKCYGVSPTKLNDLCFTNVYADSFVIRGDEVRQIAPGQTGKIADYNYKLPDDFTGCVIAWNSNNLDSKVGGNYNYLYRLFRKSNLKPFERDISTEIYQAGSTPCNGVEGFNCYFPLQSYGFQPTNGVGYQPYRVVVLSFELLHAPATVCGPKKSTNLVKNKCVNFNFNGLTGTGVLTESNKKFLPFQQFGRDIADTTDAVRDPQTLEILDITPCSFGGVSVITPGTNTSNQVAVLYQGVNCTEVPVAIHADQLTPTWRVYSTGSNVFQTRAGCLIGAEHVNNSYECDIPIGAGICASYQTQTNSPRRARSVASQSIIAYTMSLGAENSVAYSNNSIAIPTNFTISVTTEILPVSMTKTSVDCTMYICGDSTECSNLLLQYGSFCTQLNRALTGIAVEQDKNTQEVFAQVKQIYKTPPIKDFGGFNFSQILPDPSKPSKRSFIEDLLFNKVTLADVGFIKQYGDCLGDIAARDLICAQKFNGLTVLPPLLTDEMIAQYTSALLAGTITSGWTFGAGAALQIPFAMQMAYRFNGIGVTQNVLYENQKLIANQFNSAIGKIQDSLSSTASALGKLQDVVNQNAQALNTLVKQLSSNFGAISSVLNDILSRLDKVEAEVQIDRLITGRLQSLQTYVTQQLIRAAEIRASANLAATKMSECVLGQSKRVDFCGKGYHLMSFPQSAPHGVVFLHVTYVPAQEKNFTTAPAICHDGKAHFPREGVFVSNGTHWFVTQRNFYEPQIITTDNTFVSGNCDVVIGIVNNTVYDPLQPELDSFKEELDKYFKNHTSPDVDLGDISGINASVVNIQKEIDRLNEVAKNLNESLIDLQELGKYEQYIKGGGSGGGQIYEGKLTAEGLRFGIVASRFNHALVDRLVEGAIDAIVRHGGREEDITLVRVPGSWEIPVAAGELARKEDIDAVIAIGVLIRGATPHFDYIASEVSKGLADLSLELRKPITFGVITADTLEQAIERAGTKHGNKGWEAALSAIEMANLFKSLR

SEQ ID NO: 3679 - protein, 1371 aa, Artificial Sequence
  SARS-CoV-2/Greece/16/2020__EPI_ISL_418265 spike protein (1-1211) LumSynth construct
MFVFLVLLPLVSSQCVNLTTRTQLPPAYTNSFTRGVYYPDKVFRSSVLHSTQDLFLPFFSNVTWFHAIHVSGTNGTKRFDNPVLPFNDGVYFASTEKSNIIRGWIFGTTLDSKTQSLLIVNNATNVVIKVCEFQFCNDPFLGVYYHKNNKSWMESEFRVYSSANNCTFEYVSQPFLMDLEGKQGNFKNLREFVFKNVDGYFKIYSKHTPINLVRDLPQGFSALEPLVDLPIGINITRFQTLLALHRSYLTPGDSSSGWTAGAAAYYVGYLQPRTFLLKYNENGTITDAVDCALDPLSETKCTLKSFTVEKGIYQTSNFRVQPTESIVRFPNITNLCPFGEVFNATRFASVYAWNRKRISNCVADYSVLYNSASFSTFKCYGVSPTKLNDLCFTNVYADSFVIRGDEVRQIAPGQTGKIADYNYKLPDDFTGCVIAWNSNNLDSKVGGNYNYLYRLFRKSNLKPFERDISTEIYQAGSTPCNGVEGFNCYFPLQSYGFQPTNGVGYQPYRVVVLSFELLHAPATVCGPKKSTNLVKNKCVNFNFNGLTGTGVLTESNKKFLPFQQFGRDIADTTDAVRDPQTLEILDITPCSFGGVSVITPGTNTSNQVAVLYQDVNCTEVPVAIHADQLTPTWRVYSTGSNVFQTRAGCLIGAEHVNNSYECDIPIGAGICASYQTQTNSPRRARSVASQSIIAYTMSLGAENSVAYSNNSIAIPTNFTISVTTEILPVSMTKTSVDCTMYICGDSTECSNLLLQYGSFCTQLNRALTGIAVEQDKNTQEVFAQVKQIYKTPPIKDFGGFNFSQILPDPSKPSKRSFIEDLLFNKVTLADAGFIKQYGDCLGDIAARDLICAQKFNGLTVLPPLLTDEMIAQYTSALLAGTITSGWTFGAGAALQIPFAMQMAYRFNGIGVTQNVLYENQKLIANQFNSAIGKIQDSLSSTASALGKLQDVVNQNAQALNTLVKQLSSNFGAISSVLNDILSRLDKVEAEVQIDRLITGRLQSLQTYVTQQLIRAAEIRASANLAATKMSECVLGQSKRVDFCGKGYHLMSFPQSAPHGVVFLHVTYVPAQEKNFTTAPAICHDGKAHFPREGVFVSNGTHWFVTQRNFYEPQIITTDNTFVSGNCDVVIGIVNNTVYDPLQPELDSFKEELDKYFKNHTSPDVDLGDISGINASVVNIQKEIDRLNEVAKNLNESLIDLQELGKYEQYIKGGGSGGGQIYEGKLTAEGLRFGIVASRFNHALVDRLVEGAIDAIVRHGGREEDITLVRVPGSWEIPVAAGELARKEDIDAVIAIGVLIRGATPHFDYIASEVSKGLADLSLELRKPITFGVITADTLEQAIERAGTKHGNKGWEAALSAIEMANLFKSLR

SEQ ID NO: 3680 - protein, 1371 aa, Artificial Sequence
  SARS-CoV-2/Iceland/319/2020__EPI_ISL_417648 spike protein (1-1211) LumSynth construct
MFVFLVLLPLVSSQCVNLTTRTQLPPAYTNSFTRGVYYPDKVFRSSVLHSTQDLFLPFFSNVTWFHAIHVSGTNGTKRFDNPVLPFNDGVYFASTEKSNIIRGWIFGTTLDSKTQSLLIVNNATNVVIKVCEFQFCNDPFLGVYYHKNNKSWMESEFRVYSSANNCTFEYVSQPFLIDLEGKQGNFKNLREFVFKNIDGYFKIYSKHTPINLVRDLPQGFSALEPLVDLPIGINITRFQTLLALHRSYLTPGDSSSGWTAGAAAYYVGYLQPRTFLLKYNENGTITDAVDCALDPLSETKCTLKSFTVEKGIYQTSNFRVQPTESIVRFPNITNLCPFGEVFNATRFASVYAWNRKRISNCVADYSVLYNSASFSTFKCYGVSPTKLNDLCFTNVYADSFVIRGDEVRQIAPGQTGKIADYNYKLPDDFTGCVIAWNSNNLDSKVGGNYNYLYRLFRKSNLKPFERDISTEIYQAGSTPCNGVEGFNCYFPLQSYGFQPTNGVGYQPYRVVVLSFELLHAPATVCGPKKSTNLVKNKCVNFNFNGLTGTGVLTESNKKFLPFQQFGRDIADTTDAVRDPQTLEILDITPCSFGGVSVITPGTNTSNQVAVLYQGVNCTEVPVAIHADQLTPTWRVYSTGSNVFQTRAGCLIGAEHVNNSYECDIPIGAGICASYQTQTNSPRRARSVASQSIIAYTMSLGAENSVAYSNNSIAIPTNFTISVTTEILPVSMTKTSVDCTMYICGDSTECSNLLLQYGSFCTQLNRALTGIAVEQDKNTQEVFAQVKQIYKTPPIKDFGGFNFSQILPDPSKPSKRSFIEDLLFNKVTLADAGFIKQYGDCLGDIAARDLICAQKFNGLTVLPPLLTDEMIAQYTSALLAGTITSGWTFGAGAALQIPFAMQMAYRFNGIGVTQNVLYENQKLIANQFNSAIGKIQDSLSSTASALGKLQDVVNQNAQALNTLVKQLSSNFGAISSVLNDILSRLDKVEAEVQIDRLITGRLQSLQTYVTQQLIRAAEIRASANLAATKMSECVLGQSKRVDFCGKGYHLMSFPQSAPHGVVFLHVTYVPAQEKNFTTAPAICHDGKAHFPREGVFVSNGTHWFVTQRNFYEPQIITTDNTFVSGNCDVVIGIVNNTVYDPLQPELDSFKEELDKYFKNHTSPDVDLGDISGINASVVNIQKEIDRLNEVAKNLNESLIDLQELGKYEQYIKGGGSGGGQIYEGKLTAEGLRFGIVASRFNHALVDRLVEGAIDAIVRHGGREEDITLVRVPGSWEIPVAAGELARKEDIDAVIAIGVLIRGATPHFDYIASEVSKGLADLSLELRKPITFGVITADTLEQAIERAGTKHGNKGWEAALSAIEMANLFKSLR

SEQ ID NO: 3681 - protein, 1371 aa, Artificial Sequence
  SARS-CoV-2/Congo/94/2020__EPI_ISL_417947 spike protein (1-1211) LumSynth construct
MFVFLVLLPLVSSQCVNLTTRTQLPPAYTNSFTRGVYYPDKVFRSSVLHSTQDLFLPFFSNVTWFHAIHVSGTNGTKRFDNPVLPFNDGVYFASTEKSNIIRGWIFGTTLDSKTQSLLIVNNATNVVIKVCEFQFCNDPFLGVYYHKNNKSWMESEFRVYSSANNCTFEYVSQPFLMDLEGKQGNFKNLREFVFKNIDGYFKIYSKHTPINLVRDLPQGFSALEPLVDLPIGINITRFQTLLALHRSYLTPGDSSSGWTAGAAAYYVGYLQPRTFLLKYNENGTITDAVDCALDPLSETKCTLKSFTVEKGIYQTSNFRVQPTESIVRFPNITNLCPFGEVFNATRFASVYAWNRKRISNCVADYSVLYNSASFSTFKCYGVSPTKLNDLCFTNVYADSFVIRGDEVRQIAPGQTGKIADYNYKLPDDFTGCVIAWNSNNLDSKVGGNYNYLYRLFRKSNLKPFERDISTEIYQAGSTPCNGVEGFNCYFPLQSYGFQPTNGVGYQPYRVVVLSFELLHAPATVCGPKKSTNLVKNKCVNFNFNGLTGTGVLTESNKKFLPFQQFGRDIADTTDAVRDPQTLEILDITPCSFGGVSVITPGTNTSNQVAVLYQGVNCTEVPVAIHADQLTPTWRVYSTGSNVFQTRAGCLIGAEHVNNSYECDIPIGAGICASYQTQTNSPRRARSVASQSIIAYTMSLGAENSVAYSNNSIAIPTNFTISVTTEILPVSMTKTSVDCTMYICGDSTECSNLLLQYGSFCTQLNRALTGIAVEQDKNTQEVFAQVKQIYKTPPIKDFGGFNFSQILPDPSKPSKRSFIEDILFNKVTLADAGFIKQYGDCLGDIAARDLICAQKFNGLTVLPPLLTDEMIAQYTSALLAGTITSGWTFGAGAALQIPFAMQMAYRFNGIGVTQNVLYENQKLIANQFNSAIGKIQDSLSSTASALGKLQDVVNQNAQALNTLVKQLSSNFGAISSVLNDILSRLDKVEAEVQIDRLITGRLQSLQTYVTQQLIRAAEIRASANLAATKMSECVLGQSKRVDFCGKGYHLMSFPQSAPHGVVFLHVTYVPAQEKNFTTAPAICHDGKAHFPREGVFVSNGTHWFVTQRNFYEPQIITTDNTFVSGNCDVVIGIVNNTVYDPLQPELDSFKEELDKYFKNHTSPDVDLGDISGINASVVNIQKEIDRLNEVAKNLNESLIDLQELGKYEQYIKGGGSGGGQIYEGKLTAEGLRFGIVASRFNHALVDRLVEGAIDAIVRHGGREEDITLVRVPGSWEIPVAAGELARKEDIDAVIAIGVLIRGATPHFDYIASEVSKGLADLSLELRKPITFGVITADTLEQAIERAGTKHGNKGWEAALSAIEMANLFKSLR

SEQ ID NO: 3682 - protein, 1371 aa, Artificial Sequence
  SARS-CoV-2/Congo/158/2020__EPI_ISL_417950 spike protein (1-1211) LumSynth construct
MFVFLVLLPLVSSQCVNLTTRTQLPPAYTNSFTRGVYYPDKVFRSSVLHSTQDLFLPFFSNVTWFHAIHVSGTNGTKRFDNPVLPFNDGVYFASTEKSNIIRGWIFGTTLDSKTQSLLIVNNATNVVIKVCEFQFCNDPFLGVYYHKNNKSWMESEFRVYSSANNCTFEYVSQPFLMDLEGKQGNFKNLREFVFKNIDGYFKIYSKHTPINLVRDLPQGFSALEPLVDLPIGINITRFQTLLALHRSYLTPGDSSSGWTAGAAAYYVGYLQPRTFLLKYNENGTITDAVDCALDPLSETKCTLKSFTVEKGIYQTSNFRVQPTESIVRFPNITNLCPFGEVFNATRFASVYAWNRKRISNCVADYSVLYNSASFSTFKCYGVSPTKLNDLCFTNVYADSFVIRGDEVRQIAPGQTGKIADYNYKLPDDFTGCVIAWNSNNLDSKVGGNYNYLYRLFRKSNLKPFERDISTEIYQAGSTPCNGVEGFNCYFPLQSYGFQPTNGVGYQPYRVVVLSFELLHAPATVCGPKKSTNLVKNKCVNFNFNGLTGTGVLTESNKKFLPFQQFGRDIADTTDAVRDPQTLEILDITPCSFGGVSVITPGTNTSNQVAVLYQDVNCTEVPVAIHADQLTPTWRVYSTGSNVFQTRAGCLIGAEHVNNSYECDIPIGAGICASYQTQTNSPRRARSVASQSIIAYTMSLGAENSVAYSNNSIAIPTNFTISVTTEILPVSMTKTSVDCTMYICGDSTECSNLLLQYGSFCTQLNRALTGIAVEQDKNTQEVFAQVKQIYKTPPIKDFGGFNFSQILPDPSKPSKRSFIEDLLFNKVTLADAGFIKQYGDCLGDIAARDLICAQKFNGLTVLPPLLTDEMIAQYTSALLAGTITSGWTFGAGAALQIPFAMQMAYRFNGIGVTQNVLYENQKLIANQFNSAIGKIQDSLSSTASALGKLQDVVNQNAQALNTLVKQLSSNFGAISSVLNDILSRLDKVEAEVQIDRLITGRLQSLQTYVTQQLIRAAEIRASANLAATKMSECVLGQSKRVDFCGKGYHLMSFPQSAPHGVVFLHVTYVPAQEKNFTTAPAICHDGKAHFPREGVFVSNGTHWFVTQRNFYEPQIITTDNTFLSGNCDVVIGIVNNTVYDPLQPELDSFKEELDKYFKNHTSPDVDLGDISGINASVVNIQKEIDRLNEVAKNLNESLIDLQELGKYEQYIKGGGSGGGQIYEGKLTAEGLRFGIVASRFNHALVDRLVEGAIDAIVRHGGREEDITLVRVPGSWEIPVAAGELARKEDIDAVIAIGVLIRGATPHFDYIASEVSKGLADLSLELRKPITFGVITADTLEQAIERAGTKHGNKGWEAALSAIEMANLFKSLR

SEQ ID NO: 3683 - protein, 1371 aa, Artificial Sequence
  SARS-CoV-2/USA/UT-00034/2020__EPI_ISL_417977 spike protein (1-1211) LumSynth construct
MFVFLVLLPLVSSQCVNLTTRTQLPPAYTNSFTRGVYYPDKVFRSSVLHSTQDLFLPFFSNVTWFHAIHVSGTNGTKRFDNPVLPFNDGVYFASTEKSNIIRGWIFGTTLDSKTQSLLIVNNATNVVIKVCEFQFCNDPFLGVYYYKNNKSWMESEFRVYSSANNCTFEYVSQPFLMDLEGKQGNFKNLREFVFKNIDGYFKIYSKHTPINLVRDLPQGFSALEPLVDLPIGINITRFQTLLALHRSYLTPGDSSSGWTAGAAAYYVGYLQPRTFLLKYNENGTITDAVDCALDPLSETKCTLKSFTVEKGIYQTSNFRVQPTESIVRFPNITNLCPFGEVFNATRFASVYAWNRKRISNCVADYSVLYNSASFSTFKCYGVSPTKLNDLCFTNVYADSFVIRGDEVRQIAPGQTGKIADYNYKLPDDFTGCVIAWNSNNLDSKVGGNYNYLYRLFRKSNLKPFERDISTEIYQAGSTPCNGVEGFNCYFPLQSYGFQPTNGVGYQPYRVVVLSFELLHAPATVCGPKKSTNLVKNKCVNFNFNGLTGTGVLTESNKKFLPFQQFGRDIADTTDAVRDPQTLEILDITPCSFGGVSVITPGTNTSNQVAVLYQGVNCTEVPVAIHADQLTPTWRVYSTGSNVFQTRAGCLIGAEHVNNSYECDIPIGAGICASYQTQTNSPRRARSVASQSIIAYTMSLGAENSVAYSNNSIAIPTNFTISVTTEILPVSMTKTSVDCTMYICGDSTECSNLLLQYGSFCTQLNRALTGIAVEQDKNTQEVFAQVKQIYKTPPIKDFGGFNFSQILPDPSKPSKRSFIEDLLFNKVTLADAGFIKQYGDCLGDIAARDLICAQKFNGLTVLPPLLTDEMIAQYTSALLAGTITSGWTFGAGAALQIPFAMQMAYRFNGIGVTQNVLYENQKLIANQFNSAIGKIQDSLSSTASALGKLQDVVNQNAQALNTLVKQLSSNFGAISSVLNDILSRLDKVEAEVQIDRLITGRLQSLQTYVTQQLIRAAEIRASANLAATKMSECVLGQSKRVDFCGKGYHLMSFPQSAPHGVVFLHVTYVPAQEKNFTTAPAICHDGKAHFPREGVFVSNGTHWFVTQRNFYEPQIITTDNTFVSGNCDVVIGIVNNTVYDPLQPELDSFKEELDKYFKNHTSPDVDLGDISGINASVVNIQKEIDRLNEVAKNLNESLIDLQELGKYEQYIKGGGSGGGQIYEGKLTAEGLRFGIVASRFNHALVDRLVEGAIDAIVRHGGREEDITLVRVPGSWEIPVAAGELARKEDIDAVIAIGVLIRGATPHFDYIASEVSKGLADLSLELRKPITFGVITADTLEQAIERAGTKHGNKGWEAALSAIEMANLFKSLR

SEQ ID NO: 3684 - protein, 1371 aa, Artificial Sequence
  SARS-CoV-2/USA/UT-00033/2020__EPI_ISL_417976 spike protein (1-1211) LumSynth construct
MFVFLVLLPLVSSQCVNLTTRTQLPPAYTNSFTRGVYYPDKVFRSSVLHSTQDLFLPFFSNVTWFHAIHVSGTNGTKRFDNPVLPFNDGVYFASTEKSNIIRGWIFGTTLDSKTQSLLIVNNATNVVIKVCEFQFCNDPFLGVYYHKNNKSWMESEFRVYSSANNCTFEYVSQPFLMDLEGKQGNFKNLREFVFKNIDGYFKIYSKHTPINLVRDLPQGFSALEPLVDLPIGINITRFQTLLALHRSYLTPGDSSSGLTAGAAAYYVGYLQPRTFLLKYNENGTITDAVDCALDPLSETKCTLKSFTVEKGIYQTSNFRVQPTESIVRFPNITNLCPFGEVFNATRFASVYAWNRKRISNCVADYSVLYNSASFSTFKCYGVSPTKLNDLCFTNVYADSFVIRGDEVRQIAPGQTGKIADYNYKLPDDFTGCVIAWNSNNLDSKVGGNYNYLYRLFRKSNLKPFERDISTEIYQAGSTPCNGVEGFNCYFPLQSYGFQPTNGVGYQPYRVVVLSFELLHAPATVCGPKKSTNLVKNKCVNFNFNGLTGTGVLTESNKKFLPFQQFGRDIADTTDAVRDPQTLEILDITPCSFGGVSVITPGTNTSNQVAVLYQGVNCTEVPVAIHADQLTPTWRVYSTGSNVFQTRAGCLIGAEHVNNSYECDIPIGAGICASYQTQTNSPRRARSVASQSIIAYTMSLGAENSVAYSNNSIAIPTNFTISVTTEILPVSMTKTSVDCTMYICGDSTECSNLLLQYGSFCTQLNRALTGIAVEQDKNTQEVFAQVKQIYKTPPIKDFGGFNFSQILPDPSKPSKRSFIEDLLFNKVTLADAGFIKQYGDCLGDIAARDLICAQKFNGLTVLPPLLTDEMIAQYTSALLAGTITSGWTFGAGAALQIPFAMQMAYRFNGIGVTQNVLYENQKLIANQFNSAIGKIQDSLSSTASALGKLQDVVNQNAQALNTLVKQLSSNFGAISSVLNDILSRLDKVEAEVQIDRLITGRLQSLQTYVTQQLIRAAEIRASANLAATKMSECVLGQSKRVDFCGKGYHLMSFPQSAPHGVVFLHVTYVPAQEKNFTTAPAICHDGKAHFPREGVFVSNGTHWFVTQRNFYEPQIITTDNTFVSGNCDVVIGIVNNTVYDPLQPELDSFKEELDKYFKNHTSPDVDLGDISGINASVVNIQKEIDRLNEVAKNLNESLIDLQELGKYEQYIKGGGSGGGQIYEGKLTAEGLRFGIVASRFNHALVDRLVEGAIDAIVRHGGREEDITLVRVPGSWEIPVAAGELARKEDIDAVIAIGVLIRGATPHFDYIASEVSKGLADLSLELRKPITFGVITADTLEQAIERAGTKHGNKGWEAALSAIEMANLFKSLR

SEQ ID NO: 3685 - protein, 1371 aa, Artificial Sequence
  SARS-CoV-2/USA/WI-13/2020__EPI_ISL_417516 spike protein (1-1211) LumSynth construct
MFVFLVLLPLVSSQCVNLTTRTQLPPAYTNSFTRGVYYPDKVFRSSVLHSTQDLFLPFFSNVTWFHAIHVSGTNGTKRFDNPVLPFNDGVYFASTEKSNIIRGWIFGTTLDSKTQSLLIVNNATNVVIKVCEFQFCNDPFLGVYYHKNNKSWMESEFRVYSSANNCTFEYVSQPFLMDLEGKQGNFKNLREFVFKNIDGYFKIYSKHTPINLVRDLPQGFSALEPLVDLPIGINITRFQTLLALHRSYLTPGDSSSGWTAGAAAYYVGYLQPRTFLLKYNENGTITDAVDCALDPLSETKCTLKSFTVEKGIYQTSNFRVLPTESIVRFPNITNLCPFGEVFNATRFASVYAWNRKRISNCVADYSVLYNSASFSTFKCYGVSPTKLNDLCFTNVYADSFVIRGDEVRQIAPGQTGKIADYNYKLPDDFTGCVIAWNSNNLDSKVGGNYNYLYRLFRKSNLKPFERDISTEIYQAGSTPCNGVEGFNCYFPLQSYGFQPTNGVGYQPYRVVVLSFELLHAPATVCGPKKSTNLVKNKCVNFNFNGLTGTGVLTESNKKFLPFQQFGRDIADTTDAVRDPQTLEILDITPCSFGGVSVITPGTNTSNQVAVLYQGVNCTEVPVAIHADQLTPTWRVYSTGSNVFQTRAGCLIGAEHVNNSYECDIPIGAGICASYQTQTNSPRRARSVASQSIIAYTMSLGAENSVAYSNNSIAIPTNFTISVTTEILPVSMTKTSVDCTMYICGDSTECSNLLLQYGSFCTQLNRALTGIAVEQDKNTQEVFAQVKQIYKTPPIKDFGGFNFSQILPDPSKPSKRSFIEDLLFNKVTLADAGFIKQYGDCLGDIAARDLICAQKFNGLTVLPPLLTDEMIAQYTSALLAGTITSGWTFGAGAALQIPFAMQMAYRFNGIGVTQNVLYENQKLIANQFNSAIGKIQDSLSSTASALGKLQDVVNQNAQALNTLVKQLSSNFGAISSVLNDILSRLDKVEAEVQIDRLITGRLQSLQTYVTQQLIRAAEIRASANLAATKMSECVLGQSKRVDFCGKGYHLMSFPQSAPHGVVFLHVTYVPAQEKNFTTAPAICHDGKAHFPREGVFVSNGTHWFVTQRNFYEPQIITTDNTFVSGNCDVVIGIVNNTVYDPLQPELDSFKEELDKYFKNHTSPDVDLGDISGINASVVNIQKEIDRLNEVAKNLNESLIDLQELGKYEQYIKGGGSGGGQIYEGKLTAEGLRFGIVASRFNHALVDRLVEGAIDAIVRHGGREEDITLVRVPGSWEIPVAAGELARKEDIDAVIAIGVLIRGATPHFDYIASEVSKGLADLSLELRKPITFGVITADTLEQAIERAGTKHGNKGWEAALSAIEMANLFKSLR

SEQ ID NO: 3686 - protein, 1370 aa, Artificial Sequence
  SARS-CoV-2/India/1-27/2020__EPI_ISL_413522 spike protein (1-1210) LumSynth construct
MFVFLVLLPLVSSQCVNLTTRTQLPPAYTNSFTRGVYYPDKVFRSSVLHSTQDLFLPFFSNVTWFHAIHVSGTNGTKRFDNPVLPFNDGVYFASTEKSNIIRGWIFGTTLDSKTQSLLIVNNATNVVIKVCEFQFCNDPFLGVYHKNNKSWMESEFRVYSSANNCTFEYVSQPFLMDLEGKQGNFKNLREFVFKNIDGYFKIYSKHTPINLVRDLPQGFSALEPLVDLPIGINITRFQTLLALHRSYLTPGDSSSGWTAGAAAYYVGYLQPRTFLLKYNENGTITDAVDCALDPLSETKCTLKSFTVEKGIYQTSNFRVQPTESIVRFPNITNLCPFGEVFNATRFASVYAWNRKRISNCVADYSVLYNSASFSTFKCYGVSPTKLNDLCFTNVYADSFVIRGDEVIQIAPGQTGKIADYNYKLPDDFTGCVIAWNSNNLDSKVGGNYNYLYRLFRKSNLKPFERDISTEIYQAGSTPCNGVEGFNCYFPLQSYGFQPTNGVGYQPYRVVVLSFELLHAPATVCGPKKSTNLVKNKCVNFNFNGLTGTGVLTESNKKFLPFQQFGRDIADTTDAVRDPQTLEILDITPCSFGGVSVITPGTNTSNQVAVLYQDVNCTEVPVAIHADQLTPTWRVYSTGSNVFQTRAGCLIGAEHVNNSYECDIPIGAGICASYQTQTNSPRRARSVASQSIIAYTMSLGAENSVAYSNNSIAIPTNFTISVTTEILPVSMTKTSVDCTMYICGDSTECSNLLLQYGSFCTQLNRALTGIAVEQDKNTQEVFAQVKQIYKTPPIKDFGGFNFSQILPDPSKPSKRSFIEDLLFNKVTLADAGFIKQYGDCLGDIAARDLICAQKFNGLTVLPPLLTDEMIAQYTSALLAGTITSGWTFGAGAALQIPFAMQMAYRFNGIGVTQNVLYENQKLIANQFNSAIGKIQDSLSSTASALGKLQDVVNQNAQALNTLVKQLSSNFGAISSVLNDILSRLDKVEAEVQIDRLITGRLQSLQTYVTQQLIRAAEIRASANLAATKMSECVLGQSKRVDFCGKGYHLMSFPQSAPHGVVFLHVTYVPAQEKNFTTAPAICHDGKAHFPREGVFVSNGTHWFVTQRNFYEPQIITTDNTFVSGNCDVVIGIVNNTVYDPLQPELDSFKEELDKYFKNHTSPDVDLGDISGINASVVNIQKEIDRLNEVAKNLNESLIDLQELGKYEQYIKGGGSGGGQIYEGKLTAEGLRFGIVASRFNHALVDRLVEGAIDAIVRHGGREEDITLVRVPGSWEIPVAAGELARKEDIDAVIAIGVLIRGATPHFDYIASEVSKGLADLSLELRKPITFGVITADTLEQAIERAGTKHGNKGWEAALSAIEMANLFKSLR

SEQ ID NO: 3687 - protein, 1365 aa, Artificial Sequence
  SARS-CoV-2/pangolin/Guangxi/P4L/2017__EPI_ISL_410538 spike protein (1-1205) LumSynth construct
MFVFLFVLPLVSSQCVNLTTRTGIPPGYTNSSTRGVYYPDKVFRSSILHLTQDLFLPFFSNVTWFNTINYQGGFKKFDNPVLPFNDGVYFASTEKSNIIRGWIFGTTLDARTQSLLIVNNATNVVIKVCEFQFCTDPFLGVYYHNNNKTWVENEFRVYSSANNCTFEYISQPFLMDLEGKQGNFKNLREFVFKNVDGYFKIYSKHTPIDLVRDLPRGFAALEPLVDLPIGINITRFQTLLALHRSYLTPGNLESGWTTGAAAYYVGYLQQRTFLLSYNQNGTITDAVDCSLDPLSETKCTLKSLTVEKGIYQTSNFRVQPTISIVRFPNITNLCPFGEVFNASKFASVYAWNRKRISNCVADYSVLYNSTSFSTFKCYGVSPTKLNDLCFTNVYADSFVVKGDEVRQIAPGQTGVIADYNYKLPDDFTGCVIAWNSVKQDALTGGNYGYLYRLFRKSKLKPFERDISTEIYQAGSTPCNGQVGLNCYYPLERYGFHPTTGVNYQPFRVVVLSFELLNGPATVCGPKLSTTLVKDKCVNFNFNGLTGTGVLTTSKKQFLPFQQFGRDISDTTDAVRDPQTLEILDITPCSFGGVSVITPGTNTSNQVAVLYQDVNCTEVPMAIHAEQLTPAWRVYSAGANVFQTRAGCLVGAEHVNNSYECDIPVGAGICASYHSMSSLRSVNQRSIIAYTMSLGAENSVAYSNNSIAIPTNFTISVTTEILPVSMTKTSVDCTMYICGDSIECSNLLLQYGSFCTQLNRALTGIAVEQDKNTQEVFAQVKQIYKTPPIKDFGGFNFSQILPDPSKPSKRSFIEDLLFNKVTLADAGFIKQYGDCLGDIAARDLICAQKFNGLTVLPPLLTDEMIAQYTSALLAGTITSGWTFGAGAALQIPFAMQMAYRFNGIGVTQNVLYENQKLIANQFNSAIGKIQDSLSSTASALGKLQDVVNQNAQALNTLVKQLSSNFGAISSVLNDILSRLDKVEAEVQIDRLITGRLQSLQTYVTQQLIRAAEIRASANLAATKMSECVLGQSKRVDFCGKGYHLMSFPQSAPHGVVFLHVTYVPAQEKNFTTAPAICHEGKAHFPREGVFVSNGTHWFITQRNFYEPQIITTDNTFVSGSCDVVIGIVNNTVYDPLQPELDSFKEELDKYFKNHTSPDVDLGDISGINASVVNIQKEIDRLNEVAKNLNESPIDLQELGKYEQYIKGGGSGGGQIYEGKLTAEGLRFGIVASRFNHALVDRLVEGAIDAIVRHGGREEDITLVRVPGSWEIPVAAGELARKEDIDAVIAIGVLIRGATPHFDYIASEVSKGLADLSLELRKPITFGVITADTLEQAIERAGTKHGNKGWEAALSAIEMANLFKSLR

SEQ ID NO: 3688 - protein, 1365 aa, Artificial Sequence
  SARS-CoV-2/pangolin/Guangxi/P5L/2017__EPI_ISL_410540 spike protein (1-1205) LumSynth construct
MFVFLFVLPLVSSQCVNLTTRTGIPPGYTNSSTRGVYYPDKVFRSSILHLTQDLFLPFFSNVTWFNTINYQGGFKKFDNPVLPFNDGVYFASTEKSNIIRGWIFGTTLDARTQSLLIVNNATNVVIKVCEFQFCTDPFLGVYYHNNNKTWVENEFRVYSSANNCTFEYISQPFLMDLEGKQGNFKNLREFVFKNVDGYFKIYSKHTPIDLVRDLPRGFAALEPLVDLPIGINITRFQTLLALHRSYLTPGKLESGWTTGAAAYYVGYLQQRTFLLSYNQNGTITDAVDCSLDPLSETKCTLKSLTVEKGIYQTSNFRVQPTISIVRFPNITNLCPFGEVFNASKFASVYAWNRKRISNCVADYSVLYNSTSFSTFKCYGVSPTKLNDLCFTNVYADSFVVKGDEVRQIAPGQTGVIADYNYKLPDDFTGCVIAWNSVKQDALTGGNYGYLYRLFRKSKLKPFERDISTEIYQAGSTPCNGQVGLNCYYPLERYGFHPTTGVNYQPFRVVVLSFELLNGPATVCGPKLSTTLVKDKCVNFNFNGLTGTGVLTTSKKQFLPFQQFGRDISDTTDAVRDPQTLEILDITPCSFGGVSVITPGTNTSNQVAVLYQDVNCTEVPMAIHAEQLTPAWRVYSAGANVFQTRAGCLVGAEHVNNSYECDIPVGAGICASYHSMSSFRSVNQRSIIAYTMSLGAENSVAYSNNSIAIPTNFTISVTTEILPVSMTKTSVDCTMYICGDSIECSNLLLQYGSFCTQLNRALTGIAVEQDKNTQEVFAQVKQIYKTPPIKDFGGFNFSQILPDPSKPSKRSFIEDLLFNKVTLADAGFIKQYGDCLGDIAARDLICAQKFNGLTVLPPLLTDEMIAQYTSALLAGTITSGWTFGAGAALQIPFAMQMAYRFNGIGVTQNVLYENQKLIANQFNSAIGKIQDSLSSTASALGKLQDVVNQNAQALNTLVKQLSSNFGAISSVLNDILSRLDKVEAEVQIDRLITGRLQSLQTYVTQQLIRAAEIRASANLAATKMSECVLGQSKRVDFCGKGYHLMSFPQSAPHGVVFLHVTYVPAQEKNFTTAPAICHEGKAHFPREGVFVSNGTHWFITQRNFYEPQIITTDNTFVSGSCDVVIGIVNNTVYDPLQPELDSFKEELDKYFKNHTSPDVDLGDISGINASVVNIQKEIDRLNEVAKNLNESLIDLQELGKYEQYIKGGGSGGGQIYEGKLTAEGLRFGIVASRFNHALVDRLVEGAIDAIVRHGGREEDITLVRVPGSWEIPVAAGELARKEDIDAVIAIGVLIRGATPHFDYIASEVSKGLADLSLELRKPITFGVITADTLEQAIERAGTKHGNKGWEAALSAIEMANLFKSLR

SEQ ID NO: 3689 - protein, 1365 aa, Artificial Sequence
  SARS-CoV-2/pangolin/Guangxi/P5E/2017__EPI_ISL_410541 spike protein (1-1205) LumSynth construct
MFVFLFVLPLVSSQCVNLTTRTGIPPGYTNSSTRGVYYPDKVFRSSILHLTQDLFLPFFSNVTWFNTITYQGGSKKFDNPVLPFNDGVYFASTEKSNIIRGWIFGTTLDARTQSLLIVNNATNVVIKVCEFQFCTDPFLGVYYHNNNKTWVENEFRVYSSANNCTFEYISQPFLMDLEGKQGNFKNLREFVFKNVDGYFKIYSKHTPIDLVRDLPRGFAALEPLVDLPIGINITRFQTLLALHRSYLTPGKLESGWTTGAAAYYVGYLQQRTFLLSYNQNGTITDAVDCSLDPLSETKCTLKSLTVEKGIYQTSNFRVQPTISIVRFPNITNLCPFGEVFNASKFASVYAWNRKRISNCVADYSVLYNSTSFSTFKCYGVSPTKLNDLCFTNVYADSFVVKGDEVRQIAPGQTGVIADYNYKLPDDFTGCVIAWNSVKQDALTGDNYGYLYRLFRKSKLKPFERDISTEIYQAGSTPCNGQVGLNCYYPLERYGFHPTTGVNYQPFRVVVLSFELLNGPATVCGPKLSTTLVKDKCVNFNFNGLTGTGVLTTSKKQFLPFQQFGRDISDTTDAVRDPQTLEILDITPCSFGGVSVITPGTNTSNQVAVLYQDVNCTEVPMAIHAEQLTPAWRVYSAGANVFQTRAGCLVGAEHVNNSYECDIPVGAGICASYHSMSSFRSVNQRSIIAYTMSLGAENSVAYSNNSIAIPTNFTISVTTEILPVSMTKTSVDCTMYICGDSIECSNLLLQYGSFCTQLNRALTGIAVEQDKNTQEVFAQVKQIYKTPPIKDFGGFNFSQILPDPSKPSKRSFIEDLLFNKVTLADAGFIKQYGDCLGDIAARDLICAQKFNGLTVLPPLLTDEMIAQYTSALLAGTITSGWTFGAGAALQIPFAMQMAYRFNGIGVTQNVLYENQKLIANQFNSAIGKIQDSLSSTASALGKLQDVVNQNAQALNTLVKQLSSNFGAISSVLNDILSRLDKVEAEVQIDRLITGRLQSLQTYVTQQLIRAAEIRASANLAATKMSECVLGQSKRVDFCGKGYHLMSFPQSAPHGVVFLHVTYVPAQEKNFTTAPAICHEGKAHFPREGVFVSNGTHWFITQRNFYEPQIITTDNTFVSGSCDVVIGIVNNTVYDPLQPELDSFKEELDKYFKNHTSPDVDLGDISGINASVVNIQKEIDRLNEVAKNLNESLIDLQELGKYEQYIKGGGSGGGQIYEGKLTAEGLRFGIVASRFNHALVDRLVEGAIDAIVRHGGREEDITLVRVPGSWEIPVAAGELARKEDIDAVIAIGVLIRGATPHFDYIASEVSKGLADLSLELRKPITFGVITADTLEQAIERAGTKHGNKGWEAALSAIEMANLFKSLR

SEQ ID NO: 3690 - protein, 1363 aa, Artificial Sequence
  SARS-CoV-2/pangolin/Guangxi/P1E/2017__EPI_ISL_410539 spike protein (1-1203) LumSynth construct
MFVFLFVLPLVSSQCVNLTTRTGIQPGYTNSSTRGVYYPDKVFRSSILHLTQDLFLPFFSNVTWFNTINYQGGFKKFDNPVLPFNDGVYFASTEKSNIIRGWIFGTTLDARTQSLLIVNNATNVVIKVCEFQFCTDPFLGVYYHNNNKTWVENEFRVYSSANNCTFEYISQPFLMDLEGKQGNFKNLREFVFKNVDGYFKIYSKHTPIDLVRDLPRGFAALEPLVDLPIGINITRFQTLLALHRSYLTPGKLESGWTTGAAAYYVGYLQQRTFLLSYNQNGTITDAVDCSLDPLSETKCTLKSLTVEKGIYQTSNFRVQPTISIVRFPNITNLCPFGEVFNASKFASVYAWNRKRISNCVADYSVLYNSTSFSTFKCYGVSPTKLNDLCFTNVYADSFVVKGDEVRQIAPGQTGVIADYNYKLPDDFTGCVIAWNSVKQDALTGGNYLYRLFRKSKLKPFERDISTEIYQAGSTPCNGQVGLNCYYPLERYGFHPTTGVNYQPFRVVVLSFELLNGPATVCGPKLSTTLVKDKCVNFNFNGLTGTGVLTTSKKQFLPFQQFGRDISDTTDAVRDPQTLEILDITPCSFGGVSVITPGTNTSNQVAVLYQDVNCTEVPMAIHAEQLTPAWRVYSAGANVFQTRAGCLVGAEHVNNSYECDIPVGAGICASYHSMSSLRSVNQRSIIAYTMSLGAENSVAYSNNSIAIPTNFTISVTTEILPVSMTKTSVDCTMYICGDSIECSNLLLQYGSFCTQLNRALTGIAVEQDKNTQEVFAQVKQIYKTPPIKDFGGFNFSQILPDPSKPSKRSFIEDLLFNKVTLADAGFIKQYGDCLGDIAARDLICAQKFNGLTVLPPLLTDEMIAQYTSALLAGTITSGWTFGAGAALQIPFAMQMAYRFNGIGVTQNVLYENQKLIANQFNSAIGKIQDSLSSTASALGKLQDVVNQNAQALNTLVKQLSSNFGAISSVLNDILSRLDKVEAEVQIDRLITGRLQSLQTYVTQQLIRAAEIRASANLAATKMSECVLGQSKRVDFCGKGYHLMSFPQSAPHGVVFLHVTYVPAQEKNFTTAPAICHEGKAHFPREGVFVSNGTHWFITQRNFYEPQIITTDNTFVSGSCDVVIGIVNNTVYDPLQPELDSFKEELDKYFKNHTSPDVDLGDISGINASVVNIQKEIDRLNEVAKNLNESLIDLQELGKYEQYIKGGGSGGGQIYEGKLTAEGLRFGIVASRFNHALVDRLVEGAIDAIVRHGGREEDITLVRVPGSWEIPVAAGELARKEDIDAVIAIGVLIRGATPHFDYIASEVSKGLADLSLELRKPITFGVITADTLEQAIERAGTKHGNKGWEAALSAIEMANLFKSLR

SEQ ID NO: 3691 - protein, 1371 aa, Artificial Sequence; identical to SEQ ID NO: 85
  SARS-CoV-2/Wuhan/WIV05/2019__EPI_ISL_402128 spike protein (1-1211)(K986P_V987P) LumSynth construct

SEQ ID NO: 3692 - protein, 1367 aa, Artificial Sequence; identical to SEQ ID NO: 86
  SARS-CoV-2/bat/Yunnan/RaTG13/2013__EPI_ISL_402131 spike protein (1-1207)(K982P_V983P) LumSynth construct

SEQ ID NO: 3693 - protein, 1371 aa, Artificial Sequence; identical to SEQ ID NO: 87
  SARS-CoV-2/Wuhan/HBCDC-HB-01/2019__EPI_ISL_402132 spike protein (1-1211)(K986P_V987P) LumSynth construct

SEQ ID NO: 3694 - protein, 1371 aa, Artificial Sequence; identical to SEQ ID NO: 88
  SARS-CoV-2/Guangdong/20SF028/2020__EPI_ISL_403936 spike protein (1-1211)(K986P_V987P) LumSynth construct

SEQ ID NO: 3695 - protein, 1371 aa, Artificial Sequence; identical to SEQ ID NO: 89
  SARS-CoV-2/Shenzhen/SZTH-001/2020__EPI_ISL_406592 spike protein (1-1211)(K986P_V987P) LumSynth construct

SEQ ID NO: 3696 - protein, 1371 aa, Artificial Sequence; identical to SEQ ID NO: 90
  SARS-CoV-2/Shenzhen/SZTH-004/2020__EPI_ISL_406595 spike protein (1-1211)(K986P_V987P) LumSynth construct

SEQ ID NO: 3697 - protein, 1371 aa, Artificial Sequence; identical to SEQ ID NO: 91
  SARS-CoV-2/France/IDF0372/2020__EPI_ISL_406596 spike protein (1-1211)(K986P_V987P) LumSynth construct

SEQ ID NO: 3698 - protein, 1371 aa, Artificial Sequence; identical to SEQ ID NO: 92
  SARS-CoV-2/Australia/VIC01/2020__EPI_ISL_406844 spike protein (1-1211)(K986P_V987P) LumSynth construct

SEQ ID NO: 3699 - protein, 1371 aa, Artificial Sequence; identical to SEQ ID NO: 93
  SARS-CoV-2/Germany/BavPat1/2020__EPI_ISL_406862 spike protein (1-1211)(K986P_V987P) LumSynth construct

SEQ ID NO: 3700 - protein, 1371 aa, Artificial Sequence
  SARS-CoV-2/Wuhan/HBCDC-HB-02/2020__EPI_ISL_412978 spike protein (1-1211)(K986P_V987P) LumSynth construct
MFVFLVLLPLVSSQCVNLTTRTQLPPAYTNSFTRGVYYPDKVFRSSVLHSTQDLFLPFFSNVTWFHAIHVSGTNGTKRFDNPVLPFNDGVYFASTEKSNIIRGWIFGTTLDSKTQSLLIVNNATNVVIKVCEFQFCNDPFLGVYYHKNNKSWMESEFRVYSSANNCTFEYVSQPFLMDLEGKQGNFKNLREFVFKNIDGYFKIYSKHTPINLVRDLPQGFSALEPLVDLPIGINITRFQTLLALHRSYLTPGDSSSGWTAGAAAYYVGYLQPRTFLLKYNENGTITDAVDCALDPLSETKCTLKSFTVEKGIYQTSNFRVQPTESIVRFPNITNLCPFGEVFNATRFASVYAWNRKRISNCVADYSVLYNSASFSTFKCYGVSPTKLNDLCFTNVYADSFVIRGDEVRQIAPGQTGKIADYNYKLPDDFTGCVIAWNSNNLDSKVGGNYNYLYRLFRKSNLKPFERDISTEIYQAGSTPCNGVEGFNCYFPLQSYGFQPTNGVGYQPYRVVVLSFELLHAPATVCGPKKSTNLVKNKCVNFNFNGLTGTGVLTESNKKFLPFQQFGRDIADTTDAVRDPQTLEILDITPCSFGGVSVITPGTNTSNQVAVLYQDVNCTEVPVAIHADQLTPTWRVYSTGSNVFQTRAGCLIGAEHVNNSYECDIPIGAGICASYQTQTNSPRRARSVASQSIIAYTMSLGAENSVAYSNNSIAIPTNFTISVTTEILPVSMTKTSVDCTMYICGDSTECSNFLLQYGSFCTQLNRALTGIAVEQDKNTQEVFAQVKQIYKTPPIKDFGGFNFSQILPDPSKPSKRSFIEDLLFNKVTLADAGFIKQYGDCLGDIAARDLICAQKFNGLTVLPPLLTDEMIAQYTSALLAGTITSGWTFGAGAALQIPFAMQMAYRFNGIGVTQNVLYENQKLIANQFNSAIGKIQDSLSSTASALGKLQDVVNQNAQALNTLVKQLSSNFGAISSVLNDILSRLDPPEAEVQIDRLITGRLQSLQTYVTQQLIRAAEIRASANLAATKMSECVLGQSKRVDFCGKGYHLMSFPQSAPHGVVFLHVTYVPAQEKNFTTAPAICHDGKAHFPREGVFVSNGTHWFVTQRNFYEPQIITTDNTFVSGNCDVVIGIVNNTVYDPLQPELDSFKEELDKYFKNHTSPDVDLGDISGINASVVNIQKEIDRLNEVAKNLNESLIDLQELGKYEQYIKGGGSGGGQIYEGKLTAEGLRFGIVASRFNHALVDRLVEGAIDAIVRHGGREEDITLVRVPGSWEIPVAAGELARKEDIDAVIAIGVLIRGATPHFDYIASEVSKGLADLSLELRKPITFGVITADTLEQAIERAGTKHGNKGWEAALSAIEMANLFKSLR

SEQ ID NO: 3701 - protein, 1371 aa, Artificial Sequence
  SARS-CoV-2/Australia/QLD02/2020__EPI_ISL_407896 spike protein (1-1211)(K986P_V987P) LumSynth construct
MFVFLVLLPLVSSQCVNLTTRTQLPPAYTNSFTRGVYYPDKVFRSSVLHSTQDLFLPFFSNVTWFHAIHVSGTNGTKRFDNPVLPFNDGVYFASTEKSNIIRGWIFGTTLDSKTQSLLIVNNATNVVIKVCEFQFCNDPFLGVYYHKNNKSWMESEFRVYSSANNCTFEYVSQPFLMDLEGKQGNFKNLREFVFKNIDGYFKIYSKHTPINLVRDLPQGFSALEPLVDLPIGINITRFQTLLALHRSYLTPGDSSSGWTAGAAAYYVGYLQPRTFLLKYNENGTITDAVDCALDPLSETKCTLKSFTVEKGIYQTSNFRVQPTESIVRFPNITNLCPFGEVFNATRFASVYAWNRKRISNCVADYSVLYNSASFSTFKCYGVSPTKLNDLCFTNVYADSFVIRGDEVRQIAPGQTGKIADYNYKLPDDFTGCVIAWNSNNLDSKVGGNYNYLYRLFRKSNLKPFERDISTEIYQAGSTPCNGVEGFNCYFPLQSYGFQPTNGVGYQPYRVVVLSFELLHAPATVCGPKKSTNLVKNKCVNFNFNGLTGTGVLTESNKKFLPFQQFGRDIADTTDAVRDPQTLEILDITPCSFGGVSVITPGTNTSNQVAVLYQDVNCTEVPVAIHADQLTPTWRVYSTGSNVFQTRAGCLIGAEHVNNSYECDIPIGAGICASYQTQTNSPRRARSVASQSIIAYTMSLGAENSVAYSNNSIAIPTNFTISVTTEILPVSMTKTSVDCTMYICGDSTECSNLLLQYGSFCTQLNRALTGIAVEQDKNTQEVFAQVKQIYKTPPIKDFGGFNFSQILPDPSKPSKRSFIEDLLFNKVTLADAGFIKQYGDCLGDIAARDLICAQKFNGLTVLPPLLTDEMIAQYTSALLAGTITSGWTFGAGAALQIPFAMQMAYRFNGIGVTQNVLYENQKLIANQFNSAIGKIQDSLSSTASALGKLQDVVNQNAQALNTLVKQLSSNFGAISSVLNDILSRLDPPEAEVQIDRLITGRLQSLQTYVTQQLIRAAEIRASANLAATKMSECVLGQSKRVDFCGKGYHLMSFPQSAPHGVVFLHVTYVPAQEKNFTTAPAICHDGKAHFPREGVFVSNGTHWFVTQRNFYEPQIITTDNTFVSGNCDVVIGIVNNTVYDPLQLELDSFKEELDKYFKNHTSPDVDLGDISGINASVVNIQKEIDRLNEVAKNLNESLIDLQELGKYEQYIKGGGSGGGQIYEGKLTAEGLRFGIVASRFNHALVDRLVEGAIDAIVRHGGREEDITLVRVPGSWEIPVAAGELARKEDIDAVIAIGVLIRGATPHFDYIASEVSKGLADLSLELRKPITFGVITADTLEQAIERAGTKHGNKGWEAALSAIEMANLFKSLR

SEQ ID NO: 3702 - protein, 1371 aa, Artificial Sequence
  SARS-CoV-2/India/1-31/2020__EPI_ISL_413523 spike protein (1-1211)(K986P_V987P) LumSynth construct
MFVFLVLLPLVSSQCVNLTTRTQLPPAYTNSFTRGVYYPDKVFRSSVLHSTQDLFLPFFSNVTWFHAIHVSGTNGTKRFDNPVLPFNDGVYFASTEKSNIIRGWIFGTTLDSKTQSLLIVNNATNVVIKVCEFQFCNDPFLGVYYHKNNKSWMESEFRVYSSANNCTFEYVSQPFLMDLEGKQGNFKNLREFVFKNIDGYFKIYSKHTPINLVRDLPQGFSALEPLVDLPIGINITRFQTLLALHRSYLTPGDSSSGWTAGAAAYYVGYLQPRTFLLKYNENGTITDAVDCALDPLSETKCTLKSFTVEKGIYQTSNFRVQPTESIVRFPNITNLCPFGEVFNATRFASVYAWNRKRISNCVADYSVLYNSASFSTFKCYGVSPTKLNDLCFTNVYADSFVIRGDEVRQIAPGQTGKIADYNYKLPDDFTGCVIAWNSNNLDSKVGGNYNYLYRLFRKSNLKPFERDISTEIYQAGSTPCNGVEGFNCYFPLQSYGFQPTNGVGYQPYRVVVLSFELLHAPATVCGPKKSTNLVKNKCVNFNFNGLTGTGVLTESNKKFLPFQQFGRDIADTTDAVRDPQTLEILDITPCSFGGVSVITPGTNTSNQVAVLYQDVNCTEVPVAIHADQLTPTWRVYSTGSNVFQTRAGCLIGAEHVNNSYECDIPIGAGICASYQTQTNSPRRARSVASQSIIAYTMSLGAENSVAYSNNSIAIPTNFTISVTTEILPVSMTKTSVDCTMYICGDSTECSNLLLQYGSFCTQLNRALTGIAVEQDKNTQEVFAQVKQIYKTPPIKDFGGFNFSQILPDPSKPSKRSFIEDLLFNKVTLADAGFIKQYGDCLGDIAARDLICAQKFNGLTVLPPLLTDEMIAQYTSALLAGTITSGWTFGAGAALQIPFAMQMAYRFNGIGVTQNVLYENQKLIANQFNSVIGKIQDSLSSTASALGKLQDVVNQNAQALNTLVKQLSSNFGAISSVLNDILSRLDPPEAEVQIDRLITGRLQSLQTYVTQQLIRAAEIRASANLAATKMSECVLGQSKRVDFCGKGYHLMSFPQSAPHGVVFLHVTYVPAQEKNFTTAPAICHDGKAHFPREGVFVSNGTHWFVTQRNFYEPQIITTDNTFVSGNCDVVIGIVNNTVYDPLQPELDSFKEELDKYFKNHTSPDVDLGDISGINASVVNIQKEIDRLNEVAKNLNESLIDLQELGKYEQYIKGGGSGGGQIYEGKLTAEGLRFGIVASRFNHALVDRLVEGAIDAIVRHGGREEDITLVRVPGSWEIPVAAGELARKEDIDAVIAIGVLIRGATPHFDYIASEVSKGLADLSLELRKPITFGVITADTLEQAIERAGTKHGNKGWEAALSAIEMANLFKSLR

SEQ ID NO: 3703 - protein, 1371 aa, Artificial Sequence
  SARS-CoV-2/Guangdong/GD2020087-P0008/2020__EPI_ISL_413863 spike protein (1-1211)(K986P_V987P) LumSynth construct
MFVFLVLLPLVSSQCVNLTTRTQLPPAYTNSFTRGVYYPDKVFRSSVLHSTQDLFLPFFSNVTWFHAIHVSGTNGTKRFDNPVLPFNDGVYFASTEKSNIIRGWIFGTTLDSKTQSLLIVNNATNVVIKVCEFQFCNDPFLGVYYHKNNKSWMESEFRVYSSANNCTFEYVSQPFLMDLEGKQGNFKNLREFVFKNIDGYFKIYSKHTPINLVRDLPQGFSALEPLVDLPIGINITRFQTLLALHRSYLTPGDSSSGWTAGAAAYYVGYLQPRTFLLKYNENGTITDAVDCALDPLSETKCTLKSFTVEKGIYQTSNFRVQPTESIVRFPNITNLCPFGEVFNATRFASVYAWNRKRISNCVADYSVLYNSASFSTFKCYGVSPTKLNDLCFTNVYADSFVIRGDEVREIAPGQTGKIADYNYKLPDDFTGCVIAWNSNNLDSKVGGNYNYLYRLFRKSNLKPFERDISTEIYQAGSTPCNGVEGFNCYFPLQSYGFQPTNGVGYQPYRVVVLSFELLHAPATVCGPKKSTNLVKNKCVNFNFNGLTGTGVLTESNKKFLPFQQFGRDIADTTDAVRDPQTLEILDITPCSFGGVSVITPGTNTSNQVAVLYQDVNCTEVPVAIHADQLTPTWRVYSTGSNVFQTRAGCLIGAEHVNNSYECDIPIGAGICASYQTQTNSPRRARSVASQSIIAYTMSLGAENSVAYSNNSIAIPTNFTISVTTEILPVSMTKTSVDCTMYICGDSTECSNLLLQYGSFCTQLNRALTGIAVEQDKNTQEVFAQVKQIYKTPPIKDFGGFNFSQILPDPSKPSKRSFIEDLLFNKVTLADAGFIKQYGDCLGDIAARDLICAQKFNGLTVLPPLLTDEMIAQYTSALLAGTITSGWTFGAGAALQIPFAMQMAYRFNGIGVTQNVLYENQKLIANQFNSAIGKIQDSLSSTASALGKLQDVVNQNAQALNTLVKQLSSNFGAISSVLNDILSRLDPPEAEVQIDRLITGRLQSLQTYVTQQLIRAAEIRASANLAATKMSECVLGQSKRVDFCGKGYHLMSFPQSAPHGVVFLHVTYVPAQEKNFTTAPAICHDGKAHFPREGVFVSNGTHWFVTQRNFYEPQIITTDNTFVSGNCDVVIGIVNNTVYDPLQPELDSFKEELDKYFKNHTSPDVDLGDISGINASVVNIQKEIDRLNEVAKNLNESLIDLQELGKYEQYIKGGGSGGGQIYEGKLTAEGLRFGIVASRFNHALVDRLVEGAIDAIVRHGGREEDITLVRVPGSWEIPVAAGELARKEDIDAVIAIGVLIRGATPHFDYIASEVSKGLADLSLELRKPITFGVITADTLEQAIERAGTKHGNKGWEAALSAIEMANLFKSLR

SEQ ID NO: 3704 - protein, 1371 aa, Artificial Sequence
  SARS-CoV-2/Sweden/01/2020__EPI_ISL_411951 spike protein (1-1211)(K986P_V987P) LumSynth construct
MFVFLVLLPLVSSQCVNLTTRTQLPPAYTNSFTRGVYYPDKVFRSSVLHSTQDLFLPFFSNVTWFHAIHVSGTNGTKRFDNPVLPFNDGVYFASTEKSNIIRGWIFGTTLDSKTQSLLIVNNATNVVIKVCEFQFCNDPFLGVYYHKNNKSWMESEFRVYSSANNCTFEYVSQPFLMDLEGKQGNFKNLREFVFKNIDGYFKIYSKHTPINLVRDLPQGFSALEPLVDLPIGINITRFQTLLALHRSYLTPGDSSSGWTAGAAAYYVGYLQPRTFLLKYNENGTITDAVDCALDPLSETKCTLKSFTVEKGIYQTSNFRVQPTESIVRFPNITNLCPFGEVFNATRFASVYAWNRKRISNCVADYSVLYNSASFSTFKCYGVSPTKLNDLCFTNVYADSFVIRGDEVRQIAPGQTGKIADYNYKLPDDFTGCVIAWNSNNLDSKVGGNYNYLYRLFRKSNLKPFERDISTEIYQAGSTPCNGVEGFNCYFPLQSYGFQPTNGVGYQPYRVVVLSFELLHAPATVCGPKKSTNLVKNKCVNFNFNGLTGTGVLTESNKKFLPFQQFGRDIADTTDAVRDPQTLEILDITPCSFGGVSVITPGTNTSNQVAVLYQDVNCTEVPVAIHADQLTPTWRVYSTGSNVFQTRAGCLIGAEHVNNSYECDIPIGAGICASYQTQTNSPRRARSVASQSIIAYTMSLGAENSVAYSNNSIAIPTNFTISVTTEILPVSMTKTSVDCTMYICGDSTECSNLLLQYGSFCTQLNRALTGIAVEQDKNTQEVFAQVKQIYKTPPIKDCGGFNFSQILPDPSKPSKRSFIEDLLFNKVTLADAGFIKQYGDCLGDIAARDLICAQKFNGLTVLPPLLTDEMIAQYTSALLAGTITSGWTFGAGAALQIPFAMQMAYRFNGIGVTQNVLYENQKLIANQFNSAIGKIQDSLSSTASALGKLQDVVNQNAQALNTLVKQLSSNFGAISSVLNDILSRLDPPEAEVQIDRLITGRLQSLQTYVTQQLIRAAEIRASANLAATKMSECVLGQSKRVDFCGKGYHLMSFPQSAPHGVVFLHVTYVPAQEKNFTTAPAICHDGKAHFPREGVFVSNGTHWFVTQRNFYEPQIITTDNTFVSGNCDVVIGIVNNTVYDPLQPELDSFKEELDKYFKNHTSPDVDLGDISGINASVVNIQKEIDRLNEVAKNLNESLIDLQELGKYEQYIKGGGSGGGQIYEGKLTAEGLRFGIVASRFNHALVDRLVEGAIDAIVRHGGREEDITLVRVPGSWEIPVAAGELARKEDIDAVIAIGVLIRGATPHFDYIASEVSKGLADLSLELRKPITFGVITADTLEQAIERAGTKHGNKGWEAALSAIEMANLFKSLR

SEQ ID NO: 3705 - protein, 1371 aa, Artificial Sequence
  SARS-CoV-2/Tianmen/HBCDC-HB-07/2020__EPI_ISL_412983 spike protein (1-1211)(K986P_V987P) LumSynth construct
MFVFLVLLPLVSSQCVNLTTRTQLPPAYTNSFTRGVYYPDKVFRSSVLHSTQDLFLPFFSNVTWFHAIHVSGTNGTKRFDNPVLPFNDGVYFASTEKSNIIRGWIFGTTLDSKTQSLLIVNNATNVVIKVCEFQFCNDPFLGVYYHKNNKSWMESEFRVYSSANNCTFEYVSQPFLMDLEGKQGNFKNLREFVFKNIDGYFKIYSKHTPINLVRDLPQGFSALEPLVDLPIGINITRFQTLLALHRSYLTPGDSSSGWTAGAAAYYVGYLQPRTFLLKYNENGTITDAVDCALDPLSETKCTLKSFTVEKGIYQTSNFRVQPTESIVRFPNITNLCPFGEVFNATRFASVYAWNRKRISNCVADYSVLYNSASFSTFKCYGVSPTKLNDLCFTNVYADSFVIRGDEVRQIAPGQTGKIADYNYKLPDDFTGCVIAWNSNNLDSKVGGNYNYLYRLFRKSNLKPFERDISTEIYQAGSTPCNGVEGFNCYFPLQSYGFQPTNGVGYQPYRVVVLSFELLHAPATVCGPKKSTNLVKNKCVNFNFNGLTGTGVLTESNKKFLPFQQFGRDIADTTDAVRDPQTLEILDITPCSFGGVSVITPGTNTSNQVAVLYQDLNCTEVPVAIHADQLTPTWRVYSTGSNVFQTRAGCLIGAEHVNNSYECDIPIGAGICASYQTQTNSPRRARSVASQSIIAYTMSLGAENSVAYSNNSIAIPTNFTISVTTEILPVSMTKTSVDCTMYICGDSTECSNLLLQYGSFCTQLNRALTGIAVEQDKNTQEVFAQVKQIYKTPPIKDFGGFNFSQILPDPSKPSKRSFIEDLLFNKVTLADAGFIKQYGDCLGDIAARDLICAQKFNGLTVLPPLLTDEMIAQYTSALLAGTITSGWTFGAGAALQIPFAMQMAYRFNGIGVTQNVLYENQKLIANQFNSAIGKIQDSLSSTASALGKLQDVVNQNAQALNTLVKQLSSNFGAISSVLNDILSRLDPPEAEVQIDRLITGRLQSLQTYVTQQLIRAAEIRASANLAATKMSECVLGQSKRVDFCGKGYHLMSFPQSAPHGVVFLHVTYVPAQEKNFTTAPAICHDGKAHFPREGVFVSNGTHWFVTQRNFYEPQIITTDNTFVSGNCDVVIGIVNNTVYDPLQPELDSFKEELDKYFKNHTSPDVDLGDISGINASVVNIQKEIDRLNEVAKNLNESLIDLQELGKYEQYIKGGGSGGGQIYEGKLTAEGLRFGIVASRFNHALVDRLVEGAIDAIVRHGGREEDITLVRVPGSWEIPVAAGELARKEDIDAVIAIGVLIRGATPHFDYIASEVSKGLADLSLELRKPITFGVITADTLEQAIERAGTKHGNKGWEAALSAIEMANLFKSLR

SEQ ID NO: 3706 - protein, 1371 aa, Artificial Sequence
  SARS-CoV-2/Hong Kong/case42_VM20002493/2020__EPI_ISL_414527 spike protein (1-1211)(K986P_V987P) LumSynth construct
MFVFLVLLPLVSSQCVNLTTRTQLPPAYTNSFTRGVYYPDKVFRSSVLHSTQDLFLPFFSNVTWFHAIHVSGTNGTKRFDNPVLPFNDGVYFASTEKSNIIRGWIFGTTLDSKTQSLLIVNNATNVVIKVCEFQFCNDPFLGVYYHKNNKSWMESEFRVYSSANNCTFEYVSQPFLMDLEGKQGNFKNLREFVFKNIDGYFKIYSKHTPINLVRDLPQGFSALEPLVDLPIGINITRFQTLLALHRSYLTPGDSSSGWTAGAAAYYVGYLQPRTFLLKYNENGTITDAVDCALDPLSETKCTLKSFTVEKGIYQTSNFRVQPTESIVRFPNITNLCPFGEVFNATRFASVYAWNRKRISNCVADYSVLYNSASFSTFKCYGVSPTKLNDLCFTNVYADSFVIRGDEVRQIAPGQTGKIADYNYKLPDDFTGCVIAWNSNNLDSKVGGNYNYLYRLFRKSNLKPFERDISTEIYQAGSTPCNGVEGFNCYFPLQSYGFQPTNGVGYQPYRVVVLSFELLHAPATVCGPKKSTNLVKNKCVNFNFNGLTGTGVLTESNKKFLPFQQFGRDIADTTDAVRDPQTLEILDITPCSFGGVSVITPGTNTSNQVAVLYQDVNCTEVPVAIHADQLTPTWRVYSTGSNVFQTRAGCLIGAEHVNNSYECDIPIGAGICASYQTQTNSPRRARSVASQSIIAYTMSLGAENSVAYSNNSIAIPTNFAISVTTEILPVSMTKTSVDCTMYICGDSTECSNLLLQYGSFCTQLNRALTGIAVEQDKNTQEVFAQVKQIYKTPPIKDFGGFNFSQILPDPSKPSKRSFIEDLLFNKVTLADAGFIKQYGDCLGDIAARDLICAQKFNGLTVLPPLLTDEMIAQYTSALLAGTITSGWTFGAGAALQIPFAMQMAYRFNGIGVTQNVLYENQKLIANQFNSAIGKIQDSLSSTASALGKLQDVVNQNAQALNTLVKQLSSNFGAISSVLNDILSRLDPPEAEVQIDRLITGRLQSLQTYVTQQLIRAAEIRASANLAATKMSECVLGQSKRVDFCGKGYHLMSFPQSAPHGVVFLHVTYVPAQEKNFTTAPAICHDGKAHFPREGVFVSNGTHWFVTQRNFYEPQIITTDNTFVSGNCDVVIGIVNNTVYDPLQPELDSFKEELDKYFKNHTSPDVDLGDISGINASVVNIQKEIDRLNEVAKNLNESLIDLQELGKYEQYIKGGGSGGGQIYEGKLTAEGLRFGIVASRFNHALVDRLVEGAIDAIVRHGGREEDITLVRVPGSWEIPVAAGELARKEDIDAVIAIGVLIRGATPHFDYIASEVSKGLADLSLELRKPITFGVITADTLEQAIERAGTKHGNKGWEAALSAIEMANLFKSLR

SEQ ID NO: 3707 - protein, 1371 aa, Artificial Sequence
  SARS-CoV-2/USA/CruiseA-23/2020__EPI_ISL_414482 spike protein (1-1211)(K986P_V987P) LumSynth construct
MFVFLVLLPLVSSQCVNLTTRTQLPPAYTNSFTRGVYYPDKVFRSSVLHSTQDLFLPFFSNVTWFHAIHVSGTNGTKRFDNPVLPFNDGVYFASTEKSNIIRGWIFGTTLDSKTQSLLIVNNATNVVIKVCEFQFCNDPFLGVYYHKNNKSWMESEFRVYSSANNCTFEYVSQPFLMDLEVKQGNFKNLREFVFKNIDGYFKIYSKHTPINLVRDLPQGFSALEPLVDLPIGINITRFQTLLALHRSYLTPGDSSSGWTAGAAAYYVGYLQPRTFLLKYNENGTITDAVDCALDPLSETKCTLKSFTVEKGIYQTSNFRVQPTESIVRFPNITNLCPFGEVFNATRFASVYAWNRKRISNCVADYSVLYNSASFSTFKCYGVSPTKLNDLCFTNVYADSFVIRGDEVRQIAPGQTGKIADYNYKLPDDFTGCVIAWNSNNLDSKVGGNYNYLYRLFRKSNLKPFERDISTEIYQAGSTPCNGVEGFNCYFPLQSYGFQPTNGVGYQPYRVVVLSFELLHAPATVCGPKKSTNLVKNKCVNFNFNGLTGTGVLTESNKKFLPFQQFGRDIADTTDAVRDPQTLEILDITPCSFGGVSVITPGTNTSNQVAVLYQDVNCTEVPVAIHADQLTPTWRVYSTGSNVFQTRAGCLIGAEHVNNSYECDIPIGAGICASYQTQTNSPRRARSVASQSIIAYTMSLGAENSVAYSNNSIAIPTNFTISVTTEILPVSMTKTSVDCTMYICGDSTECSNLLLQYGSFCTQLNRALTGIAVEQDKNTQEVFAQVKQIYKTPPIKDFGGFNFSQILPDPSKPSKRSFIEDLLFNKVTLADAGFIKQYGDCLGDIAARDLICAQKFNGLTVLPPLLTDEMIAQYTSALLAGTITSGWTFGAGAALQIPFAMQMAYRFNGIGVTQNVLYENQKLIANQFNSAIGKIQDSLSSTASALGKLQDVVNQNAQALNTLVKQLSSNFGAISSVLNDILSRLDPPEAEVQIDRLITGRLQSLQTYVTQQLIRAAEIRASANLAATKMSECVLGQSKRVDFCGKGYHLMSFPQSAPHGVVFLHVTYVPAQEKNFTTAPAICHDGKAHFPREGVFVSNGTHWFVTQRNFYEPQIITTDNTFVSGNCDVVIGIVNNTVYDPLQPELDSFKEELDKYFKNHTSPDVDLGDISGINASVVNIQKEIDRLNEVAKNLNESLIDLQELGKYEQYIKGGGSGGGQIYEGKLTAEGLRFGIVASRFNHALVDRLVEGAIDAIVRHGGREEDITLVRVPGSWEIPVAAGELARKEDIDAVIAIGVLIRGATPHFDYIASEVSKGLADLSLELRKPITFGVITADTLEQAIERAGTKHGNKGWEAALSAIEMANLFKSLR

SEQ ID NO: 3708 - protein, 1371 aa, Artificial Sequence
  SARS-CoV-2/Hong Kong/case85_VM20002868/2020__EPI_ISL_414519 spike protein (1-1211)(K986P_V987P) LumSynth construct
MFVFLVLVPLVSSQCVNLTTRTQLPPAYTNSFTRGVYYPDKVFRSSVLHSTQDLFLPFFSNVTWFHAIHVSGTNGTKRFDNPVLPFNDGVYFASTEKSNIIRGWIFGTTLDSKTQSLLIVNNATNVVIKVCEFQFCNDPFLGVYYHKNNKSWMESEFRVYSSANNCTFEYVSQPFLMDLEGKQGNFKNLREFVFKNIDGYFKIYSKHTPINLVRDLPQGFSALEPLVDLPIGINITRFQTLLALHRSYLTPGDSSSGWTAGAAAYYVGYLQPRTFLLKYNENGTITDAVDCALDPLSETKCTLKSFTVEKGIYQTSNFRVQPTESIVRFPNITNLCPFGEVFNATRFASVYAWNRKRISNCVADYSVLYNSASFSTFKCYGVSPTKLNDLCFTNVYADSFVIRGDEVRQIAPGQTGKIADYNYKLPDDFTGCVIAWNSNNLDSKVGGNYNYLYRLFRKSNLKPFERDISTEIYQAGSTPCNGVEGFNCYFPLQSYGFQPTNGVGYQPYRVVVLSFELLHAPATVCGPKKSTNLVKNKCVNFNFNGLTGTGVLTESNKKFLPFQQFGRDIADTTDAVRDPQTLEILDITPCSFGGVSVITPGTNTSNQVAVLYQDVNCTEVPVAIHADQLTPTWRVYSTGSNVFQTRAGCLIGAEHVNNSYECDIPIGAGICASYQTQTNSPRRARSVASQSIIAYTMSLGAENSVAYSNNSIAIPTNFTISVTTEILPVSMTKTSVDCTMYICGDSTECSNLLLQYGSFCTQLNRALTGIAVEQDKNTQEVFAQVKQIYKTPPIKDFGGFNFSQILPDPSKPSKRSFIEDLLFNKVTLADAGFIKQYGDCLGDIAARDLICAQKFNGLTVLPPLLTDEMIAQYTSALLAGTITSGWTFGAGAALQIPFAMQMAYRFNGIGVTQNVLYENQKLIANQFNSAIGKIQDSLSSTASALGKLQDVVNQNAQALNTLVKQLSSNFGAISSVLNDILSRLDPPEAEVQIDRLITGRLQSLQTYVTQQLIRAAEIRASANLAATKMSECVLGQSKRVDFCGKGYHLMSFPQSAPHGVVFLHVTYVPAQEKNFTTAPAICHDGKAHFPREGVFVSNGTHWFVTQRNFYEPQIITTDNTFVSGNCDVVIGIVNNTVYDPLQPELDSFKEELDKYFKNHTSPDVDLGDISGINASVVNIQKEIDRLNEVAKNLNESLIDLQELGKYEQYIKGGGSGGGQIYEGKLTAEGLRFGIVASRFNHALVDRLVEGAIDAIVRHGGREEDITLVRVPGSWEIPVAAGELARKEDIDAVIAIGVLIRGATPHFDYIASEVSKGLADLSLELRKPITFGVITADTLEQAIERAGTKHGNKGWEAALSAIEMANLFKSLR

SEQ ID NO: 3709 - protein, 1371 aa, Artificial Sequence; identical to SEQ ID NO: 93
  SARS-CoV-2/England/200990660/2020__EPI_ISL_414523 spike protein (1-1211)(K986P_V987P) LumSynth construct

SEQ ID NO: 3710 - protein, 1371 aa, Artificial Sequence
  SARS-CoV-2/Australia/NSW09/2020__EPI_ISL_413595 spike protein (1-1211)(K986P_V987P) LumSynth construct
MFVFLVLLPLVSSQCVNLTTRTQLPPAYTNSFTRGVYYPDKVFRSSVLHSTQDLFLPFFSNVTWFHAIHVSGTNGTKRFDNPVLPFNDGVYFASTEKSNIIRGWIFGTTLDSKTQSLLIVNNATNVVIKVCEFQFCNDPFLGVYYHKNNKSWMESEFRVYSSANNCTFEYVSQPFLMDLEGKQGNFKNLREFVFKNIDGYFKIYSKHTPINLVRDLPQGFSALEPLVDLPIGINITRFQTLLALHRSYLTPGDSSSGWTAGAAAYYVGYLQPRTFLLKYNENGTITDAVDCALDPLSETKCTLKSFTVEKGIYQTSNFRVQPTESIVRFPNITNLCPFGEVFNATRFASVYAWNRKRISNCVADYSVLYNSASFSTFKCYGVSPTKLNDLCFTNVYADSFVIRGDEVRQIAPGQTGKIADYNYKLPDDFTGCVIAWNSNNLDSKVGGNYNYLYRLFRKSNLKPFERDISTEIYQAGSTPCNGVEGFNCYFPLQSYGFQPTNGVGYQPYRVVVLSFELLHAPATVCGPKKSTNLVKNKCVNFNFNGLTGTGVLTESNKKFLPFQQFGRDIADTTDAVRDPQTLEILDITPCSFGGVSVITPGTNTSNQVAVLYQDVNCTEVPVAIHADQLTPTWRVYSTGSNVFQTRAGCLIGAEHVNNSYECDIPIGAGICASYQTQTNSPRRARSVASQSIIAYTMSLGAENSVAYSNNSIAIPTNFTISVTTEILPVSMTKTSVDCTMYICGDSTECSNLLLQYGSFCTQLNRALTGIAVEQDKNTQEVFAQVKQIYKTPPIKDFGGFNFSQILPDPSKPSKRSFIEDLLFNKVTLADAGFIKQYGDCLGDIAARDLICAQKFNGLTVLPPLLTDEMIAQYTSALLAGTITSGWTFGAGAALQIPFAMQMAYRFNGIGVTQNVLYENQKLIANQFNSAIGKIQDSLSFTASALGKLQDVVNQNAQALNTLVKQLSSNFGAISSVLNDILSRLDPPEAEVQIDRLITGRLQSLQTYVTQQLIRAAEIRASANLAATKMSECVLGQSKRVDFCGKGYHLMSFPQSAPHGVVFLHVTYVPAQEKNFTTAPAICHDGKAHFPREGVFVSNGTHWFVTQRNFYEPQIITTDNTFVSGNCDVVIGIVNNTVYDPLQPELDSFKEELDKYFKNHTSPDVDLGDISGINASVVNIQKEIDRLNEVAKNLNESLIDLQELGKYEQYIKGGGSGGGQIYEGKLTAEGLRFGIVASRFNHALVDRLVEGAIDAIVRHGGREEDITLVRVPGSWEIPVAAGELARKEDIDAVIAIGVLIRGATPHFDYIASEVSKGLADLSLELRKPITFGVITADTLEQAIERAGTKHGNKGWEAALSAIEMANLFKSLR

SEQ ID NO: 3711 - protein, 1371 aa, Artificial Sequence; identical to SEQ ID NO: 85
  SARS-CoV-2/Australia/NSW10/2020__EPI_ISL_413596 spike protein (1-1211)(K986P_V987P) LumSynth construct

SEQ ID NO: 3712 - protein, 1371 aa, Artificial Sequence
  SARS-CoV-2/Switzerland/1000477797/2020__EPI_ISL_413023 spike protein (1-1211)(K986P_V987P) LumSynth construct
MFVFLVLLPLVSSQCVNLTTRTQLPPAYTNSFTRGVYYPDKVFRSSVLHSTQDLFLPFFSNVTWFHAIHVSGTNGTKRFDNPVLPFNDGVYFASTEKSNIIRGWIFGTTLDSKTQSLLIVNNATNVVIKVCEFQFCNDPFLGVYYHKNNKSWMESEFRVYSSANNCTFEYVSQPFLMDLEGKQGNFKNLREFVFKNIDGYFNIYSKHTPINLVRDLPQGFSALEPLVDLPIGINITRFQTLLALHRSYLTPGDSSSGWTAGAAAYYVGYLQPRTFLLKYNENGTITDAVDCALDPLSETKCTLKSFTVEKGIYQTSNFRVQPTESIVRFPNITNLCPFGEVFNATRFASVYAWNRKRISNCVADYSVLYNSASFSTFKCYGVSPTKLNDLCFTNVYADSFVIRGDEVRQIAPGQTGKIADYNYKLPDDFTGCVIAWNSNNLDSKVGGNYNYLYRLFRKSNLKPFERDISTEIYQAGSTPCNGVEGFNCYFPLQSYGFQPTNGVGYQPYRVVVLSFELLHAPATVCGPKKSTNLVKNKCVNFNFNGLTGTGVLTESNKKFLPFQQFGRDIADTTDAVRDPQTLEILDITPCSFGGVSVITPGTNTSNQVAVLYQGVNCTEVPVAIHADQLTPTWRVYSTGSNVFQTRAGCLIGAEHVNNSYECDIPIGAGICASYQTQTNSPRRARSVASQSIIAYTMSLGAENSVAYSNNSIAIPTNFTISVTTEILPVSMTKTSVDCTMYICGDSTECSNLLLQYGSFCTQLNRALTGIAVEQDKNTQEVFAQVKQIYKTPPIKDFGGFNFSQILPDPSKPSKRSFIEDLLFNKVTLADAGFIKQYGDCLGDIAARDLICAQKFNGLTVLPPLLTDEMIAQYTSALLAGTITSGWTFGAGAALQIPFAMQMAYRFNGIGVTQNVLYENQKLIANQFNSAIGKIQDSLSSTASALGKLQDVVNQNAQALNTLVKQLSSNFGAISSVLNDILSRLDPPEAEVQIDRLITGRLQSLQTYVTQQLIRAAEIRASANLAATKMSECVLGQSKRVDFCGKGYHLMSFPQSAPHGVVFLHVTYVPAQEKNFTTAPAICHDGKAHFPREGVFVSNGTHWFVTQRNFYEPQIITTDNTFVSGNCDVVIGIVNNTVYDPLQPELDSFKEELDKYFKNHTSPDVDLGDISGINASVVNIQKEIDRLNEVAKNLNESLIDLQELGKYEQYIKGGGSGGGQIYEGKLTAEGLRFGIVASRFNHALVDRLVEGAIDAIVRHGGREEDITLVRVPGSWEIPVAAGELARKEDIDAVIAIGVLIRGATPHFDYIASEVSKGLADLSLELRKPITFGVITADTLEQAIERAGTKHGNKGWEAALSAIEMANLFKSLR

SEQ ID NO: 3713 - protein, 1371 aa, Artificial Sequence
  SARS-CoV-2/Belgium/BA-02291/2020__EPI_ISL_415159 spike protein (1-1211)(K986P_V987P) LumSynth construct
MFVFLVLLPLVSSQCVNLTTRTQLPPAYTNSFTRGVYYPDKVFRSSVLHSTQDLFLPFFSNVTWFHAIHVSGTNGTKRFDNPVLPFNDGVYFASTEKSNIIRGWIFGTTLDSKTQSLLIVNNATNVVIKVCEFQFCNDPFLGVYYHKNNKSWMESEFRVYSSANNCTFEYVSQPFLMDLEGKQGNFKNLREFVFKNIDGYFKIYSKHTPINLVRDLPQGFSALEPLVDLPIGINITRFQTLLALHRSYLTPGDSSSGWTAGAAAYYVGYLQPRTFLLKYNENGTITDAVDCALDPLSETKCTLKSFTVEKGIYQTSNFRVQPTESIVRFPNITNLCPFGEVFNATRFASVYAWNRKRISNCVADYSVLYNSASFSTFKCYGVSPTKLNDLCFTNVYADSFVIRGDEVRQIAPGQTGKIADYNYKLPDDFTGCVIAWNSNNLDSKVGGNYNYLYRLFRRSNLKPFERDISTEIYQAGSTPCNGVEGFNCYFPLQSYGFQPTNGVGYQPYRVVVLSFELLPAPATVCGPKKSTNLVKNKCVNFNFNGLTGTGVLTESNKKFLPFQQFGRDIADTTDAVRDPQTLEILDITPCSFGGVSVITPGTNTSNQVAVLYQGVNCTEVPVAIHADQLTPTWRVYSTGSNVFQTRAGCLIGAEHVNNSYECDIPIGAGICASYQTQTNSPRRARSVASQSIIAYTMSLGAENSVAYSNNSIAIPTNFTISVTTEILPVSMTKTSVDCTMYICGDSTECSNLLLQYGSFCTQLNRALTGIAVEQDKNTQEVFAQVKQIYKTPPIKDFGGFNFSQILPDPSKPSKRSFIEDLLFNKVTLADAGFIKQYGDCLGDIAARDLICAQKFNGLTVLPPLLTDEMIAQYTSALLAGTITSGWTFGAGAALQIPFAMQMAYRFNGIGVTQNVLYENQKLIANQFNSAIGKIQDSLSSAAPALGKLQDVVNQNAQALNTLVKQLSSNFGAISSVLNDILSRLDPPEAEVQIDRLITGRLQSLQTYVTQQLIRAAEIRASANLAATKMSECVLGQSKRVDFCGKGYHLMSFPQSAPHGVVFLHVTYVPAQEKNFTTAPAICHDGKAHFPREGVFVSNGTHWFVTQRNFYEPQIITTDNTFVSGNCDVVIGIVNNTVYDPLQPELDSFKEELDKYFKNHTSPDVDLGDISGINASVVNIQKEIDRLNEVAKNLNESLIDLQELGKYEQYIKGGGSGGGQIYEGKLTAEGLRFGIVASRFNHALVDRLVEGAIDAIVRHGGREEDITLVRVPGSWEIPVAAGELARKEDIDAVIAIGVLIRGATPHFDYIASEVSKGLADLSLELRKPITFGVITADTLEQAIERAGTKHGNKGWEAALSAIEMANLFKSLR

SEQ ID NO: 3714 - protein, 1371 aa, Artificial Sequence
  SARS-CoV-2/USA/WA8-UW5/2020__EPI_ISL_413486 spike protein (1-1211)(K986P_V987P) LumSynth construct
MFVFLVLLPLVSSQCVNLTTRTQLPPAYTNSFTRGVYYPDKVFRSSVLHSTQDLFLPFFSNVTWFHAIHVSGTNGTKRFDNPVLPFNDGVYFASTEKSNIIRGWIFGTTLDSKTQSLLIVNNATNVVIKVCEFQFCNDPFLGVYYHKNNKSWMESEFRVYSSANNCTFEYVSQPFLMDLEGKQGNFKNLREFVFKNIDGYFKIYSKHTPINLVRDLPQGFSALEPLVDLPIGINITRFQTLLALHRSYLTPGDSSSGWTAGAAAYYVGYLQPRTFLLKYNENGTITDAVDCALDPLSETKCTLKSFTVEKGIYQTSNFRVQPTESIVRFPNITNLCPFGEVFNATRFASVYAWNRKRISNCVADYSVLYNSASFSTFKCYGVSPTKLNDLCFTNVYADSFVIRGDEVRQIAPGQTGKIADYNYKLPDDFTGCVIAWNSNNLDSKVGGNYNYLYRLFRKSNLKPFERDISTEIYQAGSTPCNGVEGFNCYFPLQSYGFQPTNGVGYQPYRVVVLSFELLHAPATVCGPKKSTNLVKNKCVNFNFNGLTGTGVLTESNKKFLPFQQFGRDIADTTDAVRDPQTLEILDITPCSFGGVSVITPGTNTSNQVAVLYQDVNCTEVPVAIHADQLTPTWRVYSTGSNVFQTRAGCLIGAEYVNNSYECDIPIGAGICASYQTQTNSPRRARSVASQSIIAYTMSLGAENSVAYSNNSIAIPTNFTISVTTEILPVSMTKTSVDCTMYICGDSTECSNLLLQYGSFCTQLNRALTGIAVEQDKNTQEVFAQVKQIYKTPPIKDFGGFNFSQILPDPSKPSKRSFIEDLLFNKVTLADAGFIKQYGDCLGDIAARDLICAQKFNGLTVLPPLLTDEMIAQYTSALLAGTITSGWTFGAGAALQIPFAMQMAYRFNGIGVTQNVLYENQKLIANQFNSAIGKIQDSLSSTASALGKLQDVVNQNAQALNTLVKQLSSNFGAISSVLNDILSRLDPPEAEVQIDRLITGRLQSLQTYVTQQLIRAAEIRASANLAATKMSECVLGQSKRVDFCGKGYHLMSFPQSAPHGVVFLHVTYVPAQEKNFTTAPAICHDGKAHFPREGVFVSNGTHWFVTQRNFYEPQIITTDNTFVSGNCDVVIGIVNNTVYDPLQPELDSFKEELDKYFKNHTSPDVDLGDISGINASVVNIQKEIDRLNEVAKNLNESLIDLQELGKYEQYIKGGGSGGGQIYEGKLTAEGLRFGIVASRFNHALVDRLVEGAIDAIVRHGGREEDITLVRVPGSWEIPVAAGELARKEDIDAVIAIGVLIRGATPHFDYIASEVSKGLADLSLELRKPITFGVITADTLEQAIERAGTKHGNKGWEAALSAIEMANLFKSLR

SEQ ID NO: 3715 - protein, 1371 aa, Artificial Sequence
  SARS-CoV-2/England/20102000506/2020__EPI_ISL_415147 spike protein (1-1211)(K986P_V987P) LumSynth construct
MFVFLVLLPLVSSQCVNLTTRTQLPPAYTNSFTRGVYYPDKVFRSSVLHSTQDLFLPFFSNVTWFHAIHVSGTNGTKRFDNPVLPFNDGVYFASTEKSNIIRGWIFGTTLDSKTQSLLIVNNATNVVIKVCEFQFCNDPFLGVYYHKNNKSWMESEFRVYSSANNCTFEYVSQPFLMDLEGKQGNFKNLREFVFKNIDGYFKIYSKHTPINLVRDLPQGFSALEPLVDLPIGINITRFQTLLALHRSYLTPGDSSSGWTAGAAAYYVGYLQPRTFLLKYNENGTITDAVDCALDPLSETKCTLKSFTVEKGIYQTSNFRVQPTESIVRFPNITNLCPFGEVFNATRFASVYAWNRKRISNCVADYSVLYNSASFSTFKCYGVSPTKLNDLCFTNVYADSFVIRGDEVRQIAPGQTGKIADYNYKLPDDFTGCVIAWNSNNLDSKVGGNYNYLYRLFRKSNLKPFERDISTEIYQAGSTPCNGVEGFNCYFPLQSYGFQPTNGVGYQPYRVVVLSFELLHAPATVCGPKKSTNLVKNKCVNFNFNGLTGTGVLTESNKKFLPFQQFGRDIADTTDAVRDPQTLEILDITPCSFGGVSVITPGTNTSNQVAVLYQGVNCTEVPVAIHADQLTPTWRVYSTGSNVFQTRAGCLIGAEHVNNSYECDIPIGAGICASYQTQTNSPRRARSVASQSIIAYTMSLGAENSVAYSNNSIAIPTNFTISVTTEILPVSMTKTSVDCTMYICGDSTECSNLLLQYGSFCTQLNRALTGIAVEQDKNTQEVFAQVKQIYKTPPIKDFGGFNFSQILPDPSKPSKRSFIEDLLFNKVTLADAGFIKQYGYCLGDIAARDLICAQKFNGLTVLPPLLTDEMIAQYTSALLAGTITSGWTFGAGAALQIPFAMQMAYRFNGIGVTQNVLYENQKLIANQFNSAIGKIQDSLSSTASALGKLQDVVNQNAQALNTLVKQLSSNFGAISSVLNDILSRLDPPEAEVQIDRLITGRLQSLQTYVTQQLIRAAEIRASANLAATKMSECVLGQSKRVDFCGKGYHLMSFPQSAPHGVVFLHVTYVPAQEKNFTTAPAICHDGKAHFPREGVFVSNGTHWFVTQRNFYEPQIITTDNTFVSGNCDVVIGIVNNTVYDPLQPELDSFKEELDKYFKNHTSPDVDLGDISGINASVVNIQKEIDRLNEVAKNLNESLIDLQELGKYEQYIKGGGSGGGQIYEGKLTAEGLRFGIVASRFNHALVDRLVEGAIDAIVRHGGREEDITLVRVPGSWEIPVAAGELARKEDIDAVIAIGVLIRGATPHFDYIASEVSKGLADLSLELRKPITFGVITADTLEQAIERAGTKHGNKGWEAALSAIEMANLFKSLR

SEQ ID NO: 3716 - protein, 1371 aa, Artificial Sequence
  SARS-CoV-2/Belgium/VAG-03013/2020__EPI_ISL_415155 spike protein (1-1211)(K986P_V987P) LumSynth construct
MFVFLVLLPLVSSQCVNLTTRTQLPPAYTNSFTRGVYYPDKVFRSSVLHSTQDLFLPFFSNVTWFHAIHVSGTNGTKRFDNPVLPFNDGVYFASTEKSNIIRGWIFGTTLDSKTQSLLIVNNATNVVIKVCEFQFCNDPFLGVYYHKNNKSWMESEFRVYSSANNCTFEYVSQPFLMDLEGKQGNFKNLREFVFKNIDGYFKIYSKHTPINLVRDLPQGFSALEPLVDLPIGINITRFQTLLALHRSYLTPGDSSSGWTAGAAAYYVGYLQPRTFLLKYNENGTITDAVDCALDPLSETKCTLKSFTVEKGIYQTSNFRVQPTESIVRFPNITNLCPFGEVFNATRFASVYAWNRKRISNCVADYSVLYNSASFSTFKCYGVSPTKLNDLCFTNVYADSFVIRGDEVRQIAPGQTGKIADYNYKLPDDFTGCVIAWNSNNLDSKVGGNYNYLYRLFRKSNLKPFERDISTEIYQAGSTPCNGVEGFNCYFPLQSYGFQPTNGVGYQPYRVVVLSFELLHAPATVCGPKKSTNLVKNKCVNFNFNGLTGTGVLTESNKKFLPFQQFGRDIADTTDAVRDPQTLEILDITPCSFGGVSVITPGTNTSNQVAVLYQGVNCTEVPVAIHADQLTPTWRVYSTGSNVFQTRAGCLIGAEHVNNSYECDIPIGAGICASYQTQTNSPRRARSVASQSIIAYTMSLGAENSVAYSNNSIAIPTNFTISVTTEILPVSMTKTSVDCTMYICGDSTECSNLLLQYGSFCTQLNRALTGIAVEQDKNTQEVFAQVKQIYKTPPIKDFGGFNFSQILPDPSKPSKRSFIEDLLFNKVTLADAGFIKQYGDCLGDIAARDLICAQKFNGLTVLPPLLTDEMIAQYTSALLAGTITSGWTFGAGAALQIPFAMQMAYRFNGIGVTQNVLYENQKLIANQFNSAIGKIQDSLSSTATALGKLQDVVNQNAQALNTLVKQLSSNFGAISSVLNDILSRLDPPEAEVQIDRLITGRLQSLQTYVTQQLIRAAEIRASANLAATKMSECVLGQSKRVDFCGKGYHLMSFPQSAPHGVVFLHVTYVPAQEKNFTTAPAICHDGKAHFPREGVFVSNGTHWFVTQRNFYEPQIITTDNTFVSGNCDVVIGIVNNTVYDPLQPELDSFKEELDKYFKNHTSPDVDLGDISGINASVVNIQKEIDRLNEVAKNLNESLIDLQELGKYEQYIKGGGSGGGQIYEGKLTAEGLRFGIVASRFNHALVDRLVEGAIDAIVRHGGREEDITLVRVPGSWEIPVAAGELARKEDIDAVIAIGVLIRGATPHFDYIASEVSKGLADLSLELRKPITFGVITADTLEQAIERAGTKHGNKGWEAALSAIEMANLFKSLR

SEQ ID NO: 3717 - protein, 1371 aa, Artificial Sequence
  SARS-CoV-2/Belgium/BC-03016/2020__EPI_ISL_415157 spike protein (1-1211)(K986P_V987P) LumSynth construct
MFVFLVLLPLVSSQCVNLTTRTQLPPAYTNSFTRGVYYPDKVFRSSVLHSTQDLFLPFFSNVTWFHAIHVSGTNGTKRFDNPVLPFNDGVYFASTEKSNIIRGWIFGTTLDSKTQSLLIVNNATNVVIKVCEFQFCNDPFLGVYYHKNNKSWMESEFRVYSSANNCTFEYVSQPFLMDLEGKQGNFKNLREFVFKNIDGYFKIYSKHTPINLVRDLPQGFSALEPLVDLPIGINITRFQTLLALHRSYLTPGDSSSGWTAGAAAYYVGYLQPRTFLLKYNENGTITDAVDCALDPLSETKCTLKSFTVEKGIYQTSNFRVQPTESIVRFPNITNLCPFGEVFNATRFASVYAWNRKRISNCVADYSVLYNSASFSTFKCYGVSPTKLNDLCFTNVYADSFVIRGDEVRQIAPGQTGKIADYNYKLPDDFTGCVIAWNSNNLDSKVGGNYNYLYRLFRKSNLKPFERDISTEIYQAGSTPCNGVEGFNCYFPLQSYGFQPTNGVGYQPYRVVVLSFELLHAPATVCGPKKSTNLVKNKCVNFNFNGLTGTGVLTESNKKFLPFQQFGRDIADTTDAVRDPQTLEILDITPCSFGGVSVITPGTNTSNQVAVLYQGVNCTEVPVAIHADQLTPTWRVYSTGSNVFQTRAGCLIGAEHVNNSYECDIPIGAGICASYQTQTNSPRRARSVASQSIIAYTMSLGAENSVAYSNNSIAIPTNFTISVTTEILPVSMTKTSVDCTMYICGDSTECSNLLLQYGSFCTQLNRALTGIAVEQDKNTQEVFAQVKQIYKTPPIKDFGGFNFSQILPDPSKPSKRSFIEDLLFNKVTLADAGFIKQYGDCLGDIAARDLICAQKFNGLTVLPPLLTDEMIAQYTSALLAGTITSGWTFGAGAALQIPFAMQMAYRFNGIGVTQNVLYENQKLIANQFNSAIGKIQDSLSSTAPALGKLQDVVNQNAQALNTLVKQLSSNFGAISSVLNDILSRLDPPEAEVQIDRLITGRLQSLQTYVTQQLIRAAEIRASANLAATKMSECVLGQSKRVDFCGKGYHLMSFPQSAPHGVVFLHVTYVPAQEKNFTTAPAICHDGKAHFPREGVFVSNGTHWFVTQRNFYEPQIITTDNTFVSGNCDVVIGIVNNTVYDPLQPELDSFKEELDKYFKNHTSPDVDLGDISGINASVVNIQKEIDRLNEVAKNLNESLIDLQELGKYEQYIKGGGSGGGQIYEGKLTAEGLRFGIVASRFNHALVDRLVEGAIDAIVRHGGREEDITLVRVPGSWEIPVAAGELARKEDIDAVIAIGVLIRGATPHFDYIASEVSKGLADLSLELRKPITFGVITADTLEQAIERAGTKHGNKGWEAALSAIEMANLFKSLR

SEQ ID NO: 3718 - protein, 1371 aa, Artificial Sequence
  SARS-CoV-2/Germany/BavPat3/2020__EPI_ISL_414521 spike protein (1-1211)(K986P_V987P) LumSynth construct
MFVFLVLLPLVSSQCVNLTTRTQLPPAYTNSFTRGVYYPDKVFRSSVLHSTQDLFLPFFSNVTWFHAIHVSGTNGTKRFDNPVLPFNDGVYFASTEKSNIIRGWIFGTTLDSKTQSLLIVNNATNVVIKVCEFQFCNDPFLGVYYHKNNKSWMESEFRVYSSANNCTFEYVSQPFLMDLEGKQGNFKNLREFVFKNIDGYFKIYSKHTPINLVRDLPQGFSALEPLVDLPIGINITRFQTLLALHRSYLTPGDSSSGWTAGAAAYYVGYLQPRTFLLKYNENGTITDAVDCALDPLSETKCTLKSFTVEKGIYQTSNFRVQPTESIVRFPNITNLCPFGEVFNATRFASVYAWNRKRISNCVADYSVLYNSASFSTFKCYGVSPTKLNDLCFTNVYADSFVIRGDEVRQIAPGQTGKIADYNYKLPDDFTGCVIAWNSNNLDSKVGGNYNYLYRLFRKSNLKPFERDISTEIYQAGSTPCNGVEGFNCYFPLQSYGFQPTNGVGYQPYRVVVLSFELLHAPATVCGPKKSTNLVKNKCVNFNFNGLTGTGVLTESNKKFLPFQQFGRDIADTTDAVRDPQTLEILDITPCSFGGVSVITPGTNTSNQVAVLYQDVNCTEVPVAIHADQLTPTWRVYSTGSNVFQTRAGCLIGAEHVNNSYECDIPIGAGICASYQTQTNSPRRARSVASQSIIAYTMSLGAENSVAYSNNSIAIPTNFTISVTTEILPVSMTKTSVDCTMYICGDSTECSNLLLQYGSFCTQLNRALTGIAVEQDKNTQQVFAQVKQIYKTPPIKDFGGFNFSQILPDPSKPSKRSFIEDLLFNKVTLADAGFIKQYGDCLGDIAARDLICAQKFNGLTVLPPLLTDEMIAQYTSALLAGTITSGWTFGAGAALQIPFAMQMAYRFNGIGVTQNVLYENQKLIANQFNSAIGKIQDSLSSTASALGKLQDVVNQNAQALNTLVKQLSSNFGAISSVLNDILSRLDPPEAEVQIDRLITGRLQSLQTYVTQQLIRAAEIRASANLAATKMSECVLGQSKRVDFCGKGYHLMSFPQSAPHGVVFLHVTYVPAQEKNFTTAPAICHDGKAHFPREGVFVSNGTHWFVTQRNFYEPQIITTDNTFVSGNCDVVIGIVNNTVYDPLQPELDSFKEELDKYFKNHTSPDVDLGDISGINASVVNIQKEIDRLNEVAKNLNESLIDLQELGKYEQYIKGGGSGGGQIYEGKLTAEGLRFGIVASRFNHALVDRLVEGAIDAIVRHGGREEDITLVRVPGSWEIPVAAGELARKEDIDAVIAIGVLIRGATPHFDYIASEVSKGLADLSLELRKPITFGVITADTLEQAIERAGTKHGNKGWEAALSAIEMANLFKSLR

SEQ ID NO: 3719 - protein, 1371 aa, Artificial Sequence
  SARS-CoV-2/France/HF1805/2020__EPI_ISL_414628 spike protein (1-1211)(K986P_V987P) LumSynth construct
MFVFLVLLPLVSSQCVNLTTRTQLPPAYTNSFTRGVYYPDKVFRSSVLHSTQDLFLPFFSNVTWFHAIHVSGTNGTKRFDNPVLPFNDGVYFASTEKSNIIRGWIFGTTLDSKTQSLLIVNNATNVVIKVCEFQFCNDPFLGVYYHKNNKSWMESEFRVYSSANNCTFEYVSQPFLMDLEGKQGNFKNLREFVFKNIDGYFKIYSKHTPINLVRDLPQGFSALEPLVDLPIGINITRFQTLLALHRSYLTPGDSSSGWTAGAAAYYVGYLQPRTFLLKYNENGTITDAVDCALDPLSETKCTLKSFTVEKGIYQTSNFRVQPTESIVRFPNITNLCPFGEVFNATRFASVYAWNRKRISNCVADYSVLYNSASFSTFKCYGVSPTKLNDLCFTNVYADSFVIRGDEVRQIAPGQTGKIADYNYKLPDDFTGCVIAWNSNNLDSKVGGNYNYLYRLFRKSNLKPFERDISTEIYQAGSTPCNGVEGFNCYFPLQSYGFQPTNGVGYQPYRVVVLSFELLHAPATVCGPKKSTNLVKNKCVNFNFNGLTGTGVLTESNKKFLPFQQFGRDIADTTDAVRDPQTLEILDITPCSFGGVSVITPGTNTSNQVAVLYQGVNCTEVPVAIHADQLTPTWRVYSTGSNVFQTRAGCLIGAEHVNNSYECDIPIGAGICASYQTQTNSPRRARSVASQSIIAYTMSLGAENSVAYSNNSIAIPTNFTISVTTEILPVSMTKTSVDCTMYICGDSTECSNLLLQYGSFCTQLNRALTGIAVEQDKNTQEVFAQVKQIYKTPPIKDFGGFNFSQILPDPSKPSKRSFIEDLLFNKVTLADAGFIKQYGDCLGDIAARDLICAQKFNGLTVLPPLLTDEMIAQYTSALLAGTITSGWTFGAGAALQIPFAMQMAYRFNGIGVTQNVLYENQKLIANQFNSAIGKIQDSLSSTASALGKLQDVVNQNAQALNTLVKQLSSNFGAISSVLNDILSRLDPPEAEVQIDRLITGRLQSLQTYVTQQLIRAAEIRASANLAATKMSECVLGQSKRVDFCGKGYHLMSFPQSAPHGVVFLHVTYVPAQEKNFTTAPAICHDGKAHFPREGVFVSNGTHWFVTQRNFYEPQIITTDNTFVSGNCDVVIGVVNNTVYDPLQPELDSFKEELDKYFKNHTSPDVDLGDISGINASVVNIQKEIDRLNEVAKNLNESLIDLQELGKYEQYIKGGGSGGGQIYEGKLTAEGLRFGIVASRFNHALVDRLVEGAIDAIVRHGGREEDITLVRVPGSWEIPVAAGELARKEDIDAVIAIGVLIRGATPHFDYIASEVSKGLADLSLELRKPITFGVITADTLEQAIERAGTKHGNKGWEAALSAIEMANLFKSLR

SEQ ID NO: 3720 - protein, 1371 aa, Artificial Sequence
  SARS-CoV-2/Netherlands/ZuidHolland_9/2020__EPI_ISL_414445 spike protein (1-1211)(K986P_V987P) LumSynth construct
MFVFLVLLPLVSSQCVNLTTRTQLPPAYTNSFTRGVYYPDKVFRSSVLHSTQDLFLPFFSNVTWFHAIHVSGTNGTKRFDNPVLPFNDGVYFASTEKSNIIRGWIFGTTLDSKTQSLLIVNNATNVVIKVCEFQFCNDPFLGVYYHKNNKSWMESEFRVYSSANNCTFEYVSQPFLMDLEGKQGNFKNLREFVFKNIDGYFKIYSKHTPINLVRDLPQGFSALEPLVDLPIGINITRFQTLLALHRSYLTPGDSSSGWTAGAAAYYVGYLQPRTFLLKYNENGTITDAVDCALDPLSETKCTLKSFTVEKGIYQTSNFRVQPTESIVRFPNITNLCPFGEVFNATRFASVYAWNRKRISNCVADYSVLYNSASFSTFKCYGVSPTKLNDLCFTNVYADSFVIRGDEVRQIAPGQTGKIADYNYKLPDDFTGCVIAWNSNNLDSKVGGNYNYLYRLFRKSNLKPFERDISTEIYQAGSTPCNGVEGFNCYFPLQSYGFQPTNGVGYQPYRVVVLSFELLHAPATVCGPKKSTNLVKNKCVNFNFNGLTGTGVLTESNKKFLPFQQFGRDIADTTDAVRDPQTLEILDITPCSFGGVSVITPGTNTSNQVAVLYQGVNCTEVPVAIHADQLTPTWRVYSTGSNVFQTRAGCLIGAEHVNNSYECDIPIGAGICASYQTQTNSPRRARSVASQSIIAYTMSLGAENSVAYSNNSIAIPTNFTISVTTEILPVSMTKTSVDCTMYICGDSTECSNLLLQYGSFCTQLNRALTGIAVEQDKNTQEVFAQVKQIYKTPPIKDFGGFNFSQILPDPSKPSKRSFIEDLLFNKVTLADAGFIKQYGDCLGDIAARDLICVQKFNGLTVLPPLLTDEMIAQYTSALLAGTITSGWTFGAGAALQIPFAMQMAYRFNGIGVTQNVLYENQKLIANQFNSAIGKIQDSLSSTASALGKLQDVVNQNAQALNTLVKQLSSNFGAISSVLNDILSRLDPPEAEVQIDRLITGRLQSLQTYVTQQLIRAAEIRASANLAATKMSECVLGQSKRVDFCGKGYHLMSFPQSAPHGVVFLHVTYVPAQEKNFTTAPAICHDGKAHFPREGVFVSNGTHWFVTQRNFYEPQIITTDNTFVSGNCDVVIGIVNNTVYDPLQPELDSFKEELDKYFKNHTSPDVDLGDISGINASVVNIQKEIDRLNEVAKNLNESLIDLQELGKYEQYIKGGGSGGGQIYEGKLTAEGLRFGIVASRFNHALVDRLVEGAIDAIVRHGGREEDITLVRVPGSWEIPVAAGELARKEDIDAVIAIGVLIRGATPHFDYIASEVSKGLADLSLELRKPITFGVITADTLEQAIERAGTKHGNKGWEAALSAIEMANLFKSLR

SEQ ID NO: 3721 - protein, 1371 aa, Artificial Sequence
  SARS-CoV-2/Finland/FIN03032020A/2020__EPI_ISL_413602 spike protein (1-1211)(K986P_V987P) LumSynth construct
MFVFLVLLPLVSSQCVNLTTRTQLPPAYTNSFTRGVYYPDKVFRSSVLHSTQDLFLPFFSNVTWFHAIHVSGTNGTKRFDNPVLPFNDGVYFASTEKSNIIRGWIFGTTLDSKTQSLLIVNNATNVVIKVCEFQFCNDPFLGVYYHKNNKSWMESEFRVYSSANNCTFEYVSQPFLMDLEGKQGNFKNLREFVFKNIDGYFKIYSKHTPINLVRDLPQGFSALEPLVDLPIGINITRFQTLLALHRSYLTPGDSSSGWTAGAAAYYVGYLQPRTFLLKYNENGTITDAVDCALDPLSETKCTLKSFTVEKGIYQTSNFRVQPTESIVRFPNITNLCPFGEVFNATRFASVYAWNRKRISNCVADYSVLYNSASFSTFKCYGVSPTKLNDLCFTNVYADSFVIRGDEVRQIAPGQTGKIADYNYKLPDDFTGCVISWNSNNLDSKVGGNYNYLYRLFRKSNLKPFERDISTEIYQAGSTPCNGVEGFNCYFPLQSYGFQPTNGVGYQPYRVVVLSFELLHAPATVCGPKKSTNLVKNKCVNFNFNGLTGTGVLTESNKKFLPFQQFGRDIADTTDAVRDPQTLEILDITPCSFGGVSVITPGTNTSNQVAVLYQGVNCTEVPVAIHADQLTPTWRVYSTGSNVFQTRAGCLIGAEHVNNSYECDIPIGAGICASYQTQTNSPRRARSVASQSIIAYTMSLGAENSVAYSNNSIAIPTNFTISVTTEILPVSMTKTSVDCTMYICGDSTECSNLLLQYGSFCTQLNRALTGIAVEQDKNTQEVFAQVKQIYKTPPIKDFGGFNFSQILPDPSKPSKRSFIEDLLFNKVTLADAGFIKQYGDCLGDIAARDLICAQKFNGLTVLPPLLTDEMIAQYTSALLAGTITSGWTFGAGAALQIPFAMQMAYRFNGIGVTQNVLYENQKLIANQFNSAIGKIQDSLSSTASALGKLQDVVNQNAQALNTLVKQLSSNFGAISSVLNDILSRLDPPEAEVQIDRLITGRLQSLQTYVTQQLIRAAEIRASANLAATKMSECVLGQSKRVDFCGKGYHLMSFPQSAPHGVVFLHVTYVPAQEKNFTTAPAICHDGKAHFPREGVFVSNGTHWFVTQRNFYEPQIITTDNTFVSGNCDVVIGIVNNTVYDPLQPELDSFKEELDKYFKNHTSPDVDLGDISGINASVVNIQKEIDRLNEVAKNLNESLIDLQELGKYEQYIKGGGSGGGQIYEGKLTAEGLRFGIVASRFNHALVDRLVEGAIDAIVRHGGREEDITLVRVPGSWEIPVAAGELARKEDIDAVIAIGVLIRGATPHFDYIASEVSKGLADLSLELRKPITFGVITADTLEQAIERAGTKHGNKGWEAALSAIEMANLFKSLR

SEQ ID NO: 3722 - protein, 1371 aa, Artificial Sequence
  SARS-CoV-2/France/GE1977/2020__EPI_ISL_414632 spike protein (1-1211)(K986P_V987P) LumSynth construct
MFVFLVLLPLVSSQCVNLTTRTQLPPAYTNSFTRGVYYPDKVFRSSVLHSTQDLFLPFFSNVTWFHAIHVSGTNGTKRFDNPVLPFNDGVYFASTEKSNIIRGWIFGTTLDSKTQSLLIVNNATNVVIKVCEFQFCNDPFLGVYYHKNNKSWMESEFRVYSSANNCTFEYVSQPFLMDLEGKQGNFKNLREFVFKNIDGYFKIYSKHTPINLVRDLPQGFSALEPLVDLPIGINITRFQTLLALHRSYLTPGDSSSGWTAGAAAYYVGYLQPRTFLLKYNENGTITDAVDCALDPLSETKCTLKSFTVEKGIYQTSNFRVQPTESIVRFPNITNLCPFGEVFNATRFASVYAWNRKRISNCVADYSVLYNSASFSTFKCYGVSPTKLNDLCFTNVYADSFVIRGDEVRQIAPGQTGKIADYNYKLPDDFTGCVIAWNSNNLDSKVGGNYNYLYRLFRKSNLKPFERDISTEIYQAGSTPCNGVEGFNCYFPLQSYGFQPTNGVGYQPYRVVVLSFELLHAPATVCGPKKSTNLVKNKCVNFNFNGLTGTGVLTESNKKFLPFQQFGRDIADTTDAVRDPQTLEILDITPCSFGGVSVITPGTNTSNQVAVLYQGVNCTEVPVAIHADQLTPTWRVYSTGSNVFQTRAGCLIGAEHVNNSYECDIPIGAGICASYQTQTNSPRRARSVASQSIIAYTMSLGAENSVAYSNNSIAIPTNFTISVTTEILPVSMTKTSVDCTMYICGDSTECSNLLLQYGSFCTQLNRALTGIAVEQDKNTQEVFAQVKQIYKTPPIKDFGGFNFSQILPDPSKPSKRSFIEDLLFNKVTLADAGFIKQYGDCLGDIAARDLICAQKFNGLTVLPPLLTDEMIAQYTSALLAGTITSGWTFGAGAALQIPFAMQMAYRFNGIGVTQNVLYENQKLIANQFNSAIGKIQDSLFSTASALGKLQDVVNQNAQALNTLVKQLSSNFGAISSVLNDILSRLDPPEAEVQIDRLITGRLQSLQTYVTQQLIRAAEIRASANLAATKMSECVLGQSKRVDFCGKGYHLMSFPQSAPHGVVFLHVTYVPAQEKNFTTAPAICHDGKAHFPREGVFVSNGTHWFVTQRNFYEPQIITTDNTFVSGNCDVVIGIVNNTVYDPLQPELDSFKEELDKYFKNHTSPDVDLGDISGINASVVNIQKEIDRLNEVAKNLNESLIDLQELGKYEQYIKGGGSGGGQIYEGKLTAEGLRFGIVASRFNHALVDRLVEGAIDAIVRHGGREEDITLVRVPGSWEIPVAAGELARKEDIDAVIAIGVLIRGATPHFDYIASEVSKGLADLSLELRKPITFGVITADTLEQAIERAGTKHGNKGWEAALSAIEMANLFKSLR

SEQ ID NO: 3723 - protein, 1371 aa, Artificial Sequence
  SARS-CoV-2/Finland/FIN-313/2020__EPI_ISL_414641 spike protein (1-1211)(K986P_V987P) LumSynth construct
MFVFLVLLPLVSSQCVNLTTRTQLPPAYTNSFTRGVYYPDKVFRSSVLHSTQDLFLPFFSNVTWFHAIHVSGTNGTKRFDNPVLPFNDGVYFASTEKSNIIRGWIFGTTLDSKTQSLLIVNNATNVVIKVCEFQFCNDPFLGVYYHKNNKSWMESEFRVYSSANNCTFEYVSQPFLMDLEGKQGNFKNLREFVFKNIDGYFKIYSKHTPINLVRDLPQGFSALEPLVDLPIGINITRFKTLLALHRSYLTPGDSSSGWTAGAAAYYVGYLQPRTFLLKYNENGTITDAVDCALDPLSETKCTLKSFTVEKGIYQTSNFRVQPTESIVRFPNITNLCPFGEVFNATRFASVYAWNRKRISNCVADYSVLYNSASFSTFKCYGVSPTKLNDLCFTNVYADSFVIRGDEVRQIAPGQTGKIADYNYKLPDDFTGCVIAWNSNNLDSKVGGNYNYLYRLFRKSNLKPFERDISTEIYQAGSTPCNGVEGFNCYFPLQSYGFQPTNGVGYQPYRVVVLSFELLHAPATVCGPKKSTNLVKNKCVNFNFNGLTGTGVLTESNKKFLPFQQFGRDIADTTDAVRDPQTLEILDITPCSFGGVSVITPGTNTSNQVAVLYQGVNCTEVPVAIHADQLTPTWRVYSTGSNVFQTRAGCLIGAEHVNNSYECDIPIGAGICASYQTQTNSPRRARSVASQSIIAYTMSLGAENSVAYSNNSIAIPTNFTISVTTEILPVSMTKTSVDCTMYICGDSTECSNLLLQYGSFCTQLNRALTGIAVEQDKNTQEVFAQVKQIYKTPPIKDFGGFNFSQILPDPSKPSKRSFIEDLLFNKVTLADAGFIKQYGDCLGDIAARDLICAQKFNGLTVLPPLLTDEMIAQYTSALLAGTITSGWTFGAGAALQIPFAMQMAYRFNGIGVTQNVLYENQKLIANQFNSAIGKIQDSLSSTASALGKLQDVVNQNAQALNTLVKQLSSNFGAISSVLNDILSRLDPPEAEVQIDRLITGRLQSLQTYVTQQLIRAAEIRASANLAATKMSECVLGQSKRVDFCGKGYHLMSFPQSAPHGVVFLHVTYVPAQEKNFTTAPAICHDGKAHFPREGVFVSNGTHWFVTQRNFYEPQIITTDNTFVSGNCDVVIGIVNNTVYDPLQPELDSFKEELDKYFKNHTSPDVDLGDISGINASVVNIQKEIDRLNEVAKNLNESLIDLQELGKYEQYIKGGGSGGGQIYEGKLTAEGLRFGIVASRFNHALVDRLVEGAIDAIVRHGGREEDITLVRVPGSWEIPVAAGELARKEDIDAVIAIGVLIRGATPHFDYIASEVSKGLADLSLELRKPITFGVITADTLEQAIERAGTKHGNKGWEAALSAIEMANLFKSLR

SEQ ID NO: 3724 - protein, 1371 aa, Artificial Sequence
  SARS-CoV-2/Netherlands/ZuidHolland_2/2020__EPI_ISL_414556 spike protein (1-1211)(K986P_V987P) LumSynth construct
MFVFLVLLPLVSSQCVNLTTRTQLPPAYTNSFTRGVYYPDKVFRSSVLHSTQDLFLPFFSNVTWFHAIHVSGTNGTKRFDNPVLPFNDGVYFASTEKSNIIRGWIFGTTLDSKTQSLLIVNNATNVVIKVCEFQFCNDPFLGVYYHKNNKSWMESEFRVYSSANNCTFEYVSQPFLMDLEGKQGNFKNLREFVFKNIDGYFKIYSKHTPINLVRDLPQGFSALEPLVDLPIGINITRFQTLLALHRSYLTPGDSSSGWTAGAAAYYVGYLQPRTFLLKYNENGTITDAVDCALDPLSETKCTLKSFTVEKGIYQTSNFRVQPTESIVRFPNITNLCPFGEVFNATRFASVYAWNRKRISNCVADYSVLYNSASFSTFKCYGVSPTKLNDLCFTNVYADSFVIRGDEVRQIAPGQTGKIADYNYKLPDDFTGCVIAWNSNNLDSKVGGNYNYLYRLFRKSNLKPFERDISTEIYQAGSTPCNGVEGFNCYFPLQSYGFQPTNGVGYQPYRVVVLSFELLHAPATVCGPKKSTNLVKNKCVNFNFNGLTGTGVLTESNKKFLPFQQFGRDIADTTDAVRDPQTLEILDITPCSFGGVSVITPGTNTSNQVAVLYQGVNCTEVPVAIHADQLTPTWRVYSTGSNVFQTRAGCLIGAEHVNNSYECDIPIGAGICASYQTQTNSPRRARSVASQSIIAYTMSLGAENSVAYSNNSIAIPTNFTISVTTEILPVSMTKTSVDCTMYICGDSTECSNLLLQYGSFCTQLNRALTGIALEQDKNTQEVFAQVKQIYKTPPIKDFGGFNFSQILPDPSKPSKRSFIEDLLFNKVTLADAGFIKQYGDCLGDIAARDLICAQKFNGLTVLPPLLTDEMIAQYTSALLAGTITSGWTFGAGAALQIPFAMQMAYRFNGIGVTQNVLYENQKLIANQFNSAIGKIQDSLSSTASALGKLQDVVNQNAQALNTLVKQLSSNFGAISSVLNDILSRLDPPEAEVQIDRLITGRLQSLQTYVTQQLIRAAEIRASANLAATKMSECVLGQSKRVDFCGKGYHLMSFPQSAPHGVVFLHVTYVPAQEKNFTTAPAICHDGKAHFPREGVFVSNGTHWFVTQRNFYEPQIITTDNTFVSGNCDVVIGIVNNTVYDPLQPELDSFKEELDKYFKNHTSPDVDLGDISGINASVVNIQKEIDRLNEVAKNLNESLIDLQELGKYEQYIKGGGSGGGQIYEGKLTAEGLRFGIVASRFNHALVDRLVEGAIDAIVRHGGREEDITLVRVPGSWEIPVAAGELARKEDIDAVIAIGVLIRGATPHFDYIASEVSKGLADLSLELRKPITFGVITADTLEQAIERAGTKHGNKGWEAALSAIEMANLFKSLR

SEQ ID NO: 3725 - protein, 1371 aa, Artificial Sequence
  SARS-CoV-2/USA/WA-UW31/2020__EPI_ISL_414618 spike protein (1-1211)(K986P_V987P) LumSynth construct
MFVFLVLLPLVSSQCVNLTTRTQLPPAYTNSFTRGVYYPDKVFRSSVLHSTQDLFLPFFSNVTWFHAIHVSGTNGTKRFDNPVLPFNDGVYFASTEKSNIIRGWIFGTTLDSKTQSLLIVNNATNVVIKVCEFQFCNDPFLGVYYHKNNKSWMESEFRVYSSANNCTFEYVSQPFLMDLEGKQGNFKNLREFVFKNIDGYFKIYSKHTPINLVRDLPQGFSALEPLVDLPIGINITRFQTLLALHRSYLTPGDSSSGWTAGAAAYYVGYLQPRTFLLKYNENGTITDAVDCALDPLSETKCTLKSFTVEKGIYQTSNFRVQPTESIVRFPNITNLCPFGEVFNATRFASVYAWNRKRISNCVADYSVLYNSASFSTFKCYGVSPTKLNDLCFTNVYADSFVIRGDEVRQIAPGQTGKIADYNYKLPDDFTGCVIAWNSNNLDSKVGGNYNYLYRLFRKSNLKPFERDISTEIYQAGSTPCNGAEGFNCYFPLQSYGFQPTNGVGYQPYRVVVLSFELLHAPATVCGPKKSTNLVKNKCVNFNFNGLTGTGVLTESNKKFLPFQQFGRDIADTTDAVRDPQTLEILDITPCSFGGVSVITPGTNTSNQVAVLYQDVNCTEVPVAIHADQLTPTWRVYSTGSNVFQTRAGCLIGAEHVNNSYECDIPIGAGICASYQTQTNSPRRARSVASQSIIAYTMSLGAENSVAYSNNSIAIPTNFTISVTTEILPVSMTKTSVDCTMYICGDSTECSNLLLQYGSFCTQLNRALTGIAVEQDKNTQEVFAQVKQIYKTPPIKDFGGFNFSQILPDPSKPSKRSFIEDLLFNKVTLADAGFIKQYGDCLGDIAARDLICAQKFNGLTVLPPLLTDEMIAQYTSALLAGTITSGWTFGAGAALQIPFAMQMAYRFNGIGVTQNVLYENQKLIANQFNSAIGKIQDSLSSTASALGKLQDVVNQNAQALNTLVKQLSSNFGAISSVLNDILSRLDPPEAEVQIDRLITGRLQSLQTYVTQQLIRAAEIRASANLAATKMSECVLGQSKRVDFCGKGYHLMSFPQSAPHGVVFLHVTYVPAQEKNFTTAPAICHDGKAHFPREGVFVSNGTHWFVTQRNFYEPQIITTDNTFVSGNCDVVIGIVNNTVYDPLQPELDSFKEELDKYFKNHTSPDVDLGDISGINASVVNIQKEIDRLNEVAKNLNESLIDLQELGKYEQYIKGGGSGGGQIYEGKLTAEGLRFGIVASRFNHALVDRLVEGAIDAIVRHGGREEDITLVRVPGSWEIPVAAGELARKEDIDAVIAIGVLIRGATPHFDYIASEVSKGLADLSLELRKPITFGVITADTLEQAIERAGTKHGNKGWEAALSAIEMANLFKSLR

SEQ ID NO: 3726 - protein, 1371 aa, Artificial Sequence
  SARS-CoV-2/South Korea/SNU01/2020__EPI_ISL_411929 spike protein (1-1211)(K986P_V987P) LumSynth construct
MFVFLVLLPLVSSQCVNLTTRTQLPPAYTNSFTRGVYYPDKVFRSSVLHSTQDLFLPFFSNVTWFHAIHVSGTNGTKRFDNPVLPFNDGVYFASTEKSNIIRGWIFGTTLDSKTQSLLIVNNATNVVIKVCEFQFCNDPFLGVYYHKNNKSWMESEFRVYSSANNCTFEYVSQPFLMDLEGKQGNFKNLREFVFKNIDGYFKIYSKHTPINLVRDLPQGFWALEPLVDLPIGINITRFQTLLALHRSYLTPGDSSSGWTAGAAAYYVGYLQPRTFLLKYNENGTITDAVDCALDPLSETKCTLKSFTVEKGIYQTSNFRVQPTESIVRFPNITNLCPFGEVFNATRFASVYAWNRKRISNCVADYSVLYNSASFSTFKCYGVSPTKLNDLCFTNVYADSFVIRGDEVRQIAPGQTGKIADYNYKLPDDFTGCVIAWNSNNLDSKVGGNYNYLYRLFRKSNLKPFERDISTEIYQAGSTPCNGVEGFNCYFPLQSYGFQPTNGVGYQPYRVVVLSFELLHAPATVCGPKKSTNLVKNKCVNFNFNGLTGTGVLTESNKKFLPFQQFGRDIADTTDAVRDPQTLEILDITPCSFGGVSVITPGTNTSNQVAVLYQDVNCTEVPVAIHADQLTPTWRVYSTGSNVFQTRAGCLIGAEHVNNSYECDIPIGAGICASYQTQTNSPRRARSVASQSIIAYTMSLGAENSVAYSNNSIAIPTNFTISVTTEILPVSMTKTSVDCTMYICGDSTECSNLLLQYGSFCTQLNRALTGIAVEQDKNTQEVFAQVKQIYKTPPIKDFGGFNFSQILPDPSKPSKRSFIEDLLFNKVTLADAGFIKQYGDCLGDIAARDLICAQKFNGLTVLPPLLTDEMIAQYTSALLAGTITSGWTFGAGAALQIPFAMQMAYRFNGIGVTQNVLYENQKLIANQFNSAIGKIQDSLSSTASALGKLQDVVNQNAQALNTLVKQLSSNFGAISSVLNDILSRLDPPEAEVQIDRLITGRLQSLQTYVTQQLIRAAEIRASANLAATKMSECVLGQSKRVDFCGKGYHLMSFPQSAPHGVVFLHVTYVPAQEKNFTTAPAICHDGKAHFPREGVFVSNGTHWFVTQRNFYEPQIITTDNTFVSGNCDVVIGIVNNTVYDPLQPELDSFKEELDKYFKNHTSPDVDLGDISGINASVVNIQKEIDRLNEVAKNLNESLIDLQELGKYEQYIKGGGSGGGQIYEGKLTAEGLRFGIVASRFNHALVDRLVEGAIDAIVRHGGREEDITLVRVPGSWEIPVAAGELARKEDIDAVIAIGVLIRGATPHFDYIASEVSKGLADLSLELRKPITFGVITADTLEQAIERAGTKHGNKGWEAALSAIEMANLFKSLR

SEQ ID NO: 3727 - protein, 1371 aa, Artificial Sequence
  SARS-CoV-2/China/WF0004/2020__EPI_ISL_413694 spike protein (1-1211)(K986P_V987P) LumSynth construct
MFVFLVLLPLVSSQCVNLTTRTQLPPAYTNSFTRGVYYPDKVFRSSVLHSTQDLFLPFFSNVTWFHAIHVSGTNGTKRFDNPVLPFNDGVYFASTEKSNIIRGWIFGTTLDSKTQSLLIVNNATNVVIKVCEFQFCNDPFLGVYYHKNNKSWTESEFRVYSSANNCTFEYVSQPFLMDLEGKQGNFKNLREFVFKNIDGYFKIYSKHTPINLVRDLPQGFSALEPLVDLPIGINITRFQTLLALHRSYLTPGDSSSGWTAGAAAYYVGYLQPRTFLLKYNENGTITDAVDCALDPLSETKCTLKSFTVEKGIYQTSNFRVQPTESIVRFPNITNLCPFGEVFNATRFASVYAWNRKRISNCVADYSVLYNSASFSTFKCYGVSPTKLNDLCFTNVYADSFVIRGDEVRQIAPGQTGKIADYNYKLPDDFTGCVIAWNSNNLDSKVGGNYNYLYRLFRKSNLKPFERDISTEIYQAGSTPCNGVEGFNCYFPLQSYGFQPTNGVGYQPYRVVVLSFELLHAPATVCGPKKSTNLVKNKCVNFNFNGLTGTGVLTESNKKFLPFQQFGRDIADTTDAVRDPQTLEILDITPCSFGGVSVITPGTNTSNQVAVLYQDVNCTEVPVAIHADQLTPTWRVYSTGSNVFQTRAGCLIGAEHVNNSYECDIPIGAGICASYQTQTNSPRRARSVASQSIIAYTMSLGAENSVAYSNNSIAIPTNFTISVTTEILPVSMTKTSVDCTMYICGDSTECSNLLLQYGSFCTQLNRALTGIAVEQDKNTQEVFAQVKQIYKTPPIKDFGGFNFSQILPDPSKPSKRSFIEDLLFNKVTLADAGFIKQYGDCLGDIAARDLICAQKFNGLTVLPPLLTDEMIAQYTSALLAGTITSGWTFGAGAALQIPFAMQMAYRFNGIGVTQNVLYENQKLIANQFNSAIGKIQDSLSSTASALGKLQDVVNQNAQALNTLVKQLSSNFGAISSVLNDILSRLDPPEAEVQIDRLITGRLQSLQTYVTQQLIRAAEIRASANLAATKMSECVLGQSKRFDFCGKGYHLMSFPQSAPHGVVFLHVTYVPAQEKNFTTAPAICHDGKAHFPREGVFVSNGTHWFVTQRNFYEPQIITTDNTFVSGNCDVVIGIVNNTVYDPLQPELDSFKEELDKYFKNHTSPDVDLGDISGINASVVNIQKEIDRLNEVAKNLNESLIDLQELGKYEQYIKGGGSGGGQIYEGKLTAEGLRFGIVASRFNHALVDRLVEGAIDAIVRHGGREEDITLVRVPGSWEIPVAAGELARKEDIDAVIAIGVLIRGATPHFDYIASEVSKGLADLSLELRKPITFGVITADTLEQAIERAGTKHGNKGWEAALSAIEMANLFKSLR

SEQ ID NO: 3728 - protein, 1371 aa, Artificial Sequence
  SARS-CoV-2/China/WF0028/2020__EPI_ISL_413791 spike protein (1-1211)(K986P_V987P) LumSynth construct
MFVFLVLLPLVSSQCVNLTTRTQLPPAYTNSFTRGVYYPDKVFRSSVLHSTQDLFLPFFSNVTWFHAIHVSGTNGTKRFDNPVLPFNDGVYFASTEKSNIIRGWIFGTTLDSKTQSLLIVNNATNVVIKVCEFQFCNDPFLGVYYHKNNKSWMESEFRVYSSANNCTFEYVSQPFLMDLEGKQGNFKNLREFVFKNIDGYFKIYSKHTPINLVRDLPQGFSALEPLVDLPIGINITRFQTLLALHRSYLTPGDSSSGWTAGAAAYYVGYLQPRTFLLKYNENGTITDAVDCALDPLSETKCTLKSFTVEKGIYQTSNFRVQPTESIVRFPNITNLCPFGEVFNATRFASVYAWNRKRISNCVADYSVLYNSASFSTFKCYGVSPTKLNDLCFTNVYADSFVIRGDEVRQIAPGQTGKIADYNYKLPDDFTGCVIAWNSNNLDSKVGGNYNYLYRLFRKSNLKPFERDISTEIYQAGSTPCNGVEGFNCYFPLQSYGFQPTNGVGYQPYRVVVLSFELLHAPATVCGPKKSTNLVKNKCVNFNFNGLTGTGVLTESNKKFLPFQQFGRDIADTTDAVRDPQTLEILDITPCSFGGVSVITPGTNTSNQVAVLYQDVNCTEVPVAIHADQLTPTWRVYSTGSNVFQTRAGCLIGAEHVNNSYECDIPIGAGICASYQTQTNSPRRARSVASQSIIAYTMSLGAENSVAYSNNSIAIPTNFTISVTTEILPVSMTKTSVDCTMYICGDSTECSNLLLQYGSFCTQLNRALTGIAVEQDKNTQEVFAQVKQIYKTPPIKDFGGFNFSQILPDPSKPSKRSFIEDLLFNKVTLADAGFIKQYGDCLGDIAARDLICAQKFNGLTVLPPLLTDEMIAQYTSALLAGTITSGWTFGAGAALQIPFAMQMAYRFNGIGVTQNVLYENQKLIANQFNSAIGKIQDSLSSTASALGKLQDVVNQNAQALNTLVKQLSSNFGAISSVLNDILSRLDPPEAEVQIDRLITGRLQSLQTYVTQQLIRAAEIRASANLAATKMSECVLGQSKRVDFCGKGYHLMSFPQSAPHGVVFLHVTYVPAQEKNFTTAPAICHDGKAHFPREGVFVSNGTHWFVTQRNFYEPQIITTDNTFVSGNCDVVIGIVNNTVYDPLQPELESFKEELDKYFKNHTSPDVDLGDISGINASVVNIQKEIDRLNEVAKNLNESLIDLQELGKYEQYIKGGGSGGGQIYEGKLTAEGLRFGIVASRFNHALVDRLVEGAIDAIVRHGGREEDITLVRVPGSWEIPVAAGELARKEDIDAVIAIGVLIRGATPHFDYIASEVSKGLADLSLELRKPITFGVITADTLEQAIERAGTKHGNKGWEAALSAIEMANLFKSLR

SEQ ID NO: 3729 - protein, 1371 aa, Artificial Sequence
  SARS-CoV-2/2019-nCoV/USA-CruiseA-18/2020__MT159716.1 spike protein (1-1211)(K986P_V987P) LumSynth construct
MFVFLVLLPLVSSQCVNLTTRTQLPPAYTNSFTRGVYYPDKVFRSSVLHSTQDLFLPFFSNVTWFHAIHVSGTNGTKRFDNPVLPFNDGVYFASTEKSNIIRGWIFGTTLDSKTQSLLIVNNATNVVIKVCEFQFCNDPFLGVYYHKNNKSWMESELRVYSSANNCTFEYVSQPFLMDLEGKQGNFKNLREFVFKNIDGYFKIYSKHTPINLVRDLPQGFSALEPLVDLPIGINITRFQTLLALHRSYLTPGDSSSGWTAGAAAYYVGYLQPRTFLLKYNENGTITDAVDCALDPLSETKCTLKSFTVEKGIYQTSNFRVQPTESIVRFPNITNLCPFGEVFNATRFASVYAWNRKRISNCVADYSVLYNSASFSTFKCYGVSPTKLNDLCFTNVYADSFVIRGDEVRQIAPGQTGKIADYNYKLPDDFTGCVIAWNSNNLDSKVGGNYNYLYRLFRKSNLKPFERDISTEIYQAGSTPCNGVEGFNCYFPLQSYGFQPTNGVGYQPYRVVVLSFELLHAPATVCGPKKSTNLVKNKCVNFNFNGLTGTGVLTESNKKFLPFQQFGRDIADTTDAVRDPQTLEILDITPCSFGGVSVITPGTNTSNQVAVLYQDVNCTEVPVAIHADQLTPTWRVYSTGSNVFQTRAGCLIGAEHVNNSYECDIPIGAGICASYQTQTNSPRRARSVASQSIIAYTMSLGAENSVAYSNNSIAIPTNFTISVTTEILPVSMTKTSVDCTMYICGDSTECSNLLLQYGSFCTQLNRALTGIAVEQDKNTQEVFAQVKQIYKTPPIKDFGGFNFSQILPDPSKPSKRSFIEDLLFNKVTLADAGFIKQYGDCLGDIAARDLICAQKFNGLTVLPPLLTDEMIAQYTSALLAGTITSGWTFGAGAALQIPFAMQMAYRFNGIGVTQNVLYENQKLIANQFNSAIGKIQDSLSSTASALGKLQDVVNQNAQALNTLVKQLSSNFGAISSVLNDILSRLDPPEAEVQIDRLITGRLQSLQTYVTQQLIRAAEIRASANLAATKMSECVLGQSKRVDFCGKGYHLMSFPQSAPHGVVFLHVTYVPAQEKNFTTAPAICHDGKAHFPREGVFVSNGTHWFVTQRNFYEPQIITTDNTFVSGNCDVVIGIVNNTVYDPLQPELDSFKEELDKYFKNHTSPDVDLGDISGINASVVNIQKEIDRLNEVAKNLNESLIDLQELGKYEQYIKGGGSGGGQIYEGKLTAEGLRFGIVASRFNHALVDRLVEGAIDAIVRHGGREEDITLVRVPGSWEIPVAAGELARKEDIDAVIAIGVLIRGATPHFDYIASEVSKGLADLSLELRKPITFGVITADTLEQAIERAGTKHGNKGWEAALSAIEMANLFKSLR

SEQ ID NO: 3730 - protein, 1371 aa, Artificial Sequence
  SARS-CoV-2/SARS-CoV-2/Yunnan-01/human/2020/CHN__MT049951.1 spike protein (1-1211)(K986P_V987P) LumSynth construct
MFVFLVLLPLVSSQCVNLTTRTQLPPANTNSFTRGVYYPDKVFRSSVLHSTQDLFLPFFSNVTWFHAIHVSGTNGTKRFDNPVLPFNDGVYFASTEKSNIIRGWIFGTTLDSKTQSLLIVNNATNVVIKVCEFQFCNDPFLGVYYHKNNKSWMESEFRVYSSANNCTFEYVSQPFLMDLEGKQGNFKNLREFVFKNIDGYFKIYSKHTPINLVRDLPQGFSALEPLVDLPIGINITRFQTLLALHRSYLTPGDSSSGWTAGAAAYYVGYLQPRTFLLKYNENGTITDAVDCALDPLSETKCTLKSFTVEKGIYQTSNFRVQPTESIVRFPNITNLCPFGEVFNATRFASVYAWNRKRISNCVADYSVLYNSASFSTFKCYGVSPTKLNDLCFTNVYADSFVIRGDEVRQIAPGQTGKIADYNYKLPDDFTGCVIAWNSNNLDSKVGGNYNYLYRLFRKSNLKPFERDISTEIYQAGSTPCNGVEGFNCYFPLQSYGFQPTNGVGYQPYRVVVLSFELLHAPATVCGPKKSTNLVKNKCVNFNFNGLTGTGVLTESNKKFLPFQQFGRDIADTTDAVRDPQTLEILDITPCSFGGVSVITPGTNTSNQVAVLYQDVNCTEVPVAIHADQLTPTWRVYSTGSNVFQTRAGCLIGAEHVNNSYECDIPIGAGICASYQTQTNSPRRARSVASQSIIAYTMSLGAENSVAYSNNSIAIPTNFTISVTTEILPVSMTKTSVDCTMYICGDSTECSNLLLQYGSFCTQLNRALTGIAVEQDKNTQEVFAQVKQIYKTPPIKDFGGFNFSQILPDPSKPSKRSFIEDLLFNKVTLADAGFIKQYGDCLGDIAARDLICAQKFNGLTVLPPLLTDEMIAQYTSALLAGTITSGWTFGAGAALQIPFAMQMAYRFNGIGVTQNVLYENQKLIANQFNSAIGKIQDSLSSTASALGKLQDVVNQNAQALNTLVKQLSSNFGAISSVLNDILSRLDPPEAEVQIDRLITGRLQSLQTYVTQQLIRAAEIRASANLAATKMSECVLGQSKRVDFCGKGYHLMSFPQSAPHGVVFLHVTYVPAQEKNFTTAPAICHDGKAHFPREGVFVSNGTHWFVTQRNFYEPQIITTDNTFVSGNCDVVIGIVNNTVYDPLQPELDSFKEELDKYFKNHTSPDVDLGDISGINASVVNIQKEIDRLNEVAKNLNESLIDLQELGKYEQYIKGGGSGGGQIYEGKLTAEGLRFGIVASRFNHALVDRLVEGAIDAIVRHGGREEDITLVRVPGSWEIPVAAGELARKEDIDAVIAIGVLIRGATPHFDYIASEVSKGLADLSLELRKPITFGVITADTLEQAIERAGTKHGNKGWEAALSAIEMANLFKSLR

SEQ ID NO: 3731 - protein, 1371 aa, Artificial Sequence
  SARS-CoV-2/USA/WA-UW292/2020__EPI_ISL_418077 spike protein (1-1211)(K986P_V987P) LumSynth construct
MFVFLVLLPLVSSQCVNLTTRTQLPPAYTNSFTRGVYYPDKVFRSSVLHSTQDLFLPFFSNVTWFHAIHVSGTNGTKRFDNPVLPFNDGVYFASTEKSNIIRGWIFGTTLDSKTQSLLIVNNATNVVIKVCEFQFCNDPFLGVYYHKNNKSWMESEFRVYSSANNCTFEYVSQPFLMDLEGKQGNFKNLREFVFKNIDGYFKIYSKHTPINLVRDLPQGFSALEPLVDLPIGINITRFQTLLALHRSYLTPGDSSSGWTAGAAAYYVGYLQPRTFLLKYNENGTITDAVDCALDPLSETKCTLKSFTVEKGIYQTSNFRVQPTESIVRFPNITNLCPFGEVFNATRFASVYAWNRKRISNCVADYSVLYNSASFSTFKCYGVSPTKLNDLCFTNVYADSFVIRGDEVRQIAPGQTGKIADYNYKLPDDFTGCVIAWNSNNLDSKVGGNYNYLYRLFRKSNLKPFERDISTEIYQASSTPCNGVEGFNCYFPLQSYGFQPTNGVGYQPYRVVVLSFELLHAPATVCGPKKSTNLVKNKCVNFNFNGLTGTGVLTESNKKFLPFQQFGRDIADTTDAVRDPQTLEILDITPCSFGGVSVITPGTNTSNQVAVLYQDVNCTEVPVAIHADQLTPTWRVYSTGSNVFQTRAGCLIGAEHVNNSYECDIPIGAGICASYQTQTNSPRRARSVASQSIIAYTMSLGAENSVAYSNNSIAIPTNFTISVTTEILPVSMTKTSVDCTMYICGDSTECSNLLLQYGSFCTQLNRALTGIAVEQDKNTQEVFAQVKQIYKTPPIKDFGGFNFSQILPDPSKPSKRSFIEDLLFNKVTLADAGFIKQYGDCLGDIAARDLICAQKFNGLTVLPPLLTDEMIAQYTSALLAGTITSGWTFGAGAALQIPFAMQMAYRFNGIGVTQNVLYENQKLIANQFNSAIGKIQDSLSSTASALGKLQDVVNQNAQALNTLVKQLSSNFGAISSVLNDILSRLDPPEAEVQIDRLITGRLQSLQTYVTQQLIRAAEIRASANLAATKMSECVLGQSKRVDFCGKGYHLMSFPQSAPHGVVFLHVTYVPAQEKNFTTAPAICHDGKAHFPREGVFVSNGTHWFVTQRNFYEPQIITTDNTFVSGNCDVVIGIVNNTVYDPLQPELDSFKEELDKYFKNHTSPDVDLGDISGINASVVNIQKEIDRLNEVAKNLNESLIDLQELGKYEQYIKGGGSGGGQIYEGKLTAEGLRFGIVASRFNHALVDRLVEGAIDAIVRHGGREEDITLVRVPGSWEIPVAAGELARKEDIDAVIAIGVLIRGATPHFDYIASEVSKGLADLSLELRKPITFGVITADTLEQAIERAGTKHGNKGWEAALSAIEMANLFKSLR

SEQ ID NO: 3732 - protein, 1371 aa, Artificial Sequence
  SARS-CoV-2/Iceland/192/2020__EPI_ISL_417819 spike protein (1-1211)(K986P_V987P) LumSynth construct
MFVFFVLLPLVSSQCVNLTTRTQLPPAYTNSFTRGVYYPDKVFRSSVLHSTQDLFLPFFSNVTWFHAIHVSGTNGTKRFDNPVLPFNDGVYFASTEKSNIIRGWIFGTTLDSKTQSLLIVNNATNVVIKVCEFQFCNDPFLGVYYHKNNKSWMESEFRVYSSANNCTFEYVSQPFLMDLEGKQGNFKNLREFVFKNIDGYFKIYSKHTPINLVRDLPQGFSALEPLVDLPIGINITRFQTLLALHRSYLTPGDSSSGWTAGAAAYYVGYLQPRTFLLKYNENGTITDAVDCALDPLSETKCTLKSFTVEKGIYQTSNFRVQPTESIVRFPNITNLCPFGEVFNATRFASVYAWNRKRISNCVADYSVLYNSASFSTFKCYGVSPTKLNDLCFTNVYADSFVIRGDEVRQIAPGQTGKIADYNYKLPDDFTGCVIAWNSNNLDSKVGGNYNYLYRLFRKSNLKPFERDISTEIYQAGSTPCNGVEGFNCYFPLQSYGFQPTNGVGYQPYRVVVLSFELLHAPATVCGPKKSTNLVKNKCVNFNFNGLTGTGVLTESNKKFLPFQQFGRDIADTTDAVRDPQTLEILDITPCSFGGVSVITPGTNTSNQVAVLYQGVNCTEVPVAIHADQLTPTWRVYSTGSNVFQTRAGCLIGAEHVNNSYECDIPIGAGICASYQTQTNSPRRARSVASQSIIAYTMSLGAENSVAYSNNSIAIPTNFTISVTTEILPVSMTKTSVDCTMYICGDSTECSNLLLQYGSFCTQLNRALTGIAVEQDKNTQEVFAQVKQIYKTPPIKDFGGFNFSQILPDPSKPSKRSFIEDLLFNKVTLADAGFIKQYGDCLGDIAARDLICAQKFNGLTVLPPLLTDEMIAQYTSALLAGTITSGWTFGAGAALQIPFAMQMAYRFNGIGVTQNVLYENQKLIANQFNSAIGKIQDSLSSTASALGKLQDVVNQNAQALNTLVKQLSSNFGAISSVLNDILSRLDPPEAEVQIDRLITGRLQSLQTYVTQQLIRAAEIRASANLAATKMSECVLGQSKRVDFCGKGYHLMSFPQSAPHGVVFLHVTYVPAQEKNFTTAPAICHDGKAHFPREGVFVSNGTHWFVTQRNFYEPQIITTDNTFVSGNCDVVIGIVNNTVYDPLQPELDSFKEELDKYFKNHTSPDVDLGDISGINASVVNIQKEIDRLNEVAKNLNESLIDLQELGKYEQYIKGGGSGGGQIYEGKLTAEGLRFGIVASRFNHALVDRLVEGAIDAIVRHGGREEDITLVRVPGSWEIPVAAGELARKEDIDAVIAIGVLIRGATPHFDYIASEVSKGLADLSLELRKPITFGVITADTLEQAIERAGTKHGNKGWEAALSAIEMANLFKSLR

SEQ ID NO: 3733 - protein, 1371 aa, Artificial Sequence
  SARS-CoV-2/Belgium/ULG-6939/2020__EPI_ISL_417020 spike protein (1-1211)(K986P_V987P) LumSynth construct
MFVFLVLLPLVSSQCVNLTTRTQLPPAYTNSFTRGVYYPDKVFRSSVLHSTQDLFLPFFSNVTWFHAIHVSGTNGTKRFDNPVLPFNDGVYFASTEKSNIIRGWIFGTTLDSKTQSLLIVNNATNVVIKVCEFQFCNDPFLGVYYHKNNKSWMESEFRVYSSANNCTFEYVSQPFLMDLEGKQGNFKNLREFVFKNIDGYFKIYSKHTPINLVRDLPQGFSALEPLVDLPIGINITRFQTLLALHRSYLTPGDSSSGWTAGAAAYYVGYLQPRTFLLKYNENGTITDAVDCALDPLSETKCTLKSFTVEKGIYQTSNFRVQPTESIVRFPNITNLCPFGEVFNATRFASVYAWNRKRISNCVADYSVLYNSASFSTFKCYGVSPTKLNDLCFTNVYADSFVIRGDEVRQIAPGQTGKIADYNYKLPDDFTGCVIAWNSNNLDSKVGGNYNYLYRLFRKSNLKPFERDISTEIYQAGSTPCNGVEGFNCYFPLQSYGFQPTNGVGYQPYRVVVLSFELLHAPATVCGPKKSTNLVKNKCVNFNFNGLTGTGVLTESNKKFLPFQQFGRDIADTTDAVRDPQTLEILDITPCSFGGVSVITPGTNTSNQVAVLYQGVNCTEVPVAIHADQLTPTWRVYSTGSNVFQTRAGCLIGAEHVNNSYECDIPIGAGICASYQTQTNSPRRARSVASQSIIAYTMSLGAENSVVYSNNSIAIPTNFTISVTTEILPVSMTKTSVDCTMYICGDSTECSNLLLQYGSFCTQLNRALTGIAVEQDKNTQEVFAQVKQIYKTPPIKDFGGFNFSQILPDPSKPSKRSFIEDLLFNKVTLADAGFIKQYGDCLGDIAARDLICAQKFNGLTVLPPLLTDEMIAQYTSALLAGTITSGWTFGAGAALQIPFAMQMAYRFNGIGVTQNVLYENQKLIANQFNSAIGKIQDSLSSTASALGKLQDVVNQNAQALNTLVKQLSSNFGAISSVLNDILSRLDPPEAEVQIDRLITGRLQSLQTYVTQQLIRAAEIRASANLAATKMSECVLGQSKRVDFCGKGYHLMSFPQSAPHGVVFLHVTYVPAQEKNFTTAPAICHDGKAHFPREGVFVSNGTHWFVTQRNFYEPQIITTDNTFVSGNCDVVIGIVNNTVYDPLQPELDSFKEELDKYFKNHTSPDVDLGDISGINASVVNIQKEIDRLNEVAKNLNESLIDLQELGKYEQYIKGGGSGGGQIYEGKLTAEGLRFGIVASRFNHALVDRLVEGAIDAIVRHGGREEDITLVRVPGSWEIPVAAGELARKEDIDAVIAIGVLIRGATPHFDYIASEVSKGLADLSLELRKPITFGVITADTLEQAIERAGTKHGNKGWEAALSAIEMANLFKSLR

SEQ ID NO: 3734 - protein, 1371 aa, Artificial Sequence
  SARS-CoV-2/France/HF2496/2020__EPI_ISL_418231 spike protein (1-1211)(K986P_V987P) LumSynth construct
MFVFLVLLPLVSSQCVNLTTRTQLPPAYTNSFTRGVYYPDKVFRSSVLHSTQDLFLPFFSNVTWFHAIHVSGTNGTKRFDNPVLPFNDGVYFASTEKSNIIRGWIFGTTLDSKTQSLLIVNNATNVVIKVCEFQFCNDPFLGVYYHKNNKSWMESEFRVYSSANNCTFEYVSQPFLMDLEGKQGNFKNLREFVFKNIDGYFKIYSKHTPINLVRDLPQGFSALEPLVDLPIGINITRFQTLLALHRSYLTPGDSSSGWTAGAAAYYVGYLQPRTFLLKYNENGTITDAVDCALDPLSETKCTLKSFTVEKGIYQTSNFRVQPTESIVRFPNITNLCPFGEVFNATRFASVYAWNRKRISNCVADYSVLYNSASFSTFKCYGVSPTKLNDLCFTNVYADSFVIRGDEVRQIAPGQTGKIADYNYKLPDDFTGCVIAWNSNNLDSKVGGNYNYLYRLFRKSNLKPFERDISTEIYQAGSTPCNGVEGFNCYFPLQSYGFQPTNGVGYQPYRVVVLSFELLHAPATVCGPKKSTNLVKNKCVNFNFNGLTGTGVLTESNKKFLPFQQFGRDIADTTDAVRDPQTLEILDITPCSFGGVSVITPGTNTSNQVAVLYQGVNCTEVPVAIHADQLTPTWRVYSTGSNVFQTRAGCLIGAEHVNNSYECDIPIGAGICASYQTQTNSPRRARSVASQSIIAYTMSLGAENSVAYSNNSIAIPTNFTISVTTEILPVSMTKTSVDCTMYICGDSTECSNLLLQYGSFCTQLNRALTGIAVEQDKNTQEVFAQVKQIYKTPPIKDFGGFNFSQILPDPSKPSKRSFIEDLLFNKVTLADAGFIKQYGDCLGDIVARDLICAQKFNGLTVLPPLLTDEMIAQYTSALLAGTITSGWTFGAGAALQIPFAMQMAYRFNGIGVTQNVLYENQKLIANQFNSAIGKIQDSLSSTASALGKLQDVVNQNAQALNTLVKQLSSNFGAISSVLNDILSRLDPPEAEVQIDRLITGRLQSLQTYVTQQLIRAAEIRASANLAATKMSECVLGQSKRVDFCGKGYHLMSFPQSAPHGVVFLHVTYVPAQEKNFTTAPAICHDGKAHFPREGVFVSNGTHWFVTQRNFYEPQIITTDNTFVSGNCDVVIGIVNNTVYDPLQPELDSFKEELDKYFKNHTSPDVDLGDISGINASVVNIQKEIDRLNEVAKNLNESLIDLQELGKYEQYIKGGGSGGGQIYEGKLTAEGLRFGIVASRFNHALVDRLVEGAIDAIVRHGGREEDITLVRVPGSWEIPVAAGELARKEDIDAVIAIGVLIRGATPHFDYIASEVSKGLADLSLELRKPITFGVITADTLEQAIERAGTKHGNKGWEAALSAIEMANLFKSLR

SEQ ID NO: 3735 - protein, 1371 aa, Artificial Sequence
  SARS-CoV-2/USA/WA-UW291/2020__EPI_ISL_418076 spike protein (1-1211)(K986P_V987P) LumSynth construct
MFVFLVLLPLVSSQCVNLTTRTQLPPAYTNSFTRGVYYPDKVFRSSVLHSTQDLFLPFFSNVTWFHAIHVSGTNGTKRFDNPVLPFNDGVYFASTEKSNIIRGWIFGTTLDSKTQSLLIVNNATNVVIKVCEFQFCNDPFLGVYYHKNNKSWMESEFRVYSSANNCTFEYVSQPFLMDLEGKQGNFKNLREFVFKNIDGYFKIYSKHTPINLVRDLPQGFSALEPLVDLPIGINITRFQTLLALHRSYLTPGDSSSGWTAGAAAYYVGYLQPRTFLLKYNENGTITDAVDCALDPLSETKCTLKSFTVEKGIYQTSNFRVQPTESIVRFPNITNLCPFGEVFNATRFASVYAWNRKRISNCVADYSVLYNSASFSTFKCYGVSPTKLNDLCFTNVYADSFVIRGDEVRQIAPGQTGKIADYNYKLPDDFTGCVIAWNSNNLDSKVGGNYNYLYRLFRKSNLKPFERDISTEIYQAGSTPCNGVEGFNCYFPLQSYGFQPTNGVGYQPYRVVVLSFELLHAPATVCGPKKSTNLVKNKCVNFNFNGLTGTGVLTESNKKFLPFQQFGRDIADTTDAVRDPQTLEILDITPCSFGGVSVITPGTNTSNQVAVLYQGVNCTEVPVAIHADQLTPTWRVYSTGSNVFQTRAGCLIGAEHVNNSYECDIPIGAGICASYQTQTNSPRRARSVASQSIIAYTMSLGAENSVAYSNNSIAIPTNFTISVTTEILPVSMTKTSVDCTMYICGDSTECSNLLLQYGSFCTQLNRALTGIAVEQDKNTQEVFAQVKQIYKTPPIKDFGGFNFSQILPDPSKPSKRSFIEDLLFNKVTLADAGFIKQYGDCLGDIAARDLICAQKFNGLTVLPPLLTDEMIAQYTSALLAGTITSGWTFGAGAALQIPFAMQMAYRFNGIGVTQNVLYENQKLIANQFNSAIGKIQYSLSSTASALGKLQDVVNQNAQALNTLVKQLSSNFGAISSVLNDILSRLDPPEAEVQIDRLITGRLQSLQTYVTQQLIRAAEIRASANLAATKMSECVLGQSKRVDFCGKGYHLMSFPQSAPHGVVFLHVTYVPAQEKNFTTAPAICHDGKAHFPREGVFVSNGTHWFVTQRNFYEPQIITTDNTFVSGNCDVVIGIVNNTVYDPLQPELDSFKEELDKYFKNHTSPDVDLGDISGINASVVNIQKEIDRLNEVAKNLNESLIDLQELGKYEQYIKGGGSGGGQIYEGKLTAEGLRFGIVASRFNHALVDRLVEGAIDAIVRHGGREEDITLVRVPGSWEIPVAAGELARKEDIDAVIAIGVLIRGATPHFDYIASEVSKGLADLSLELRKPITFGVITADTLEQAIERAGTKHGNKGWEAALSAIEMANLFKSLR

SEQ ID NO: 3736 - protein, 1371 aa, Artificial Sequence; identical to SEQ ID NO: 93
  SARS-CoV-2/Portugal/PT0034/2020__EPI_ISL_418019 spike protein (1-1211)(K986P_V987P) LumSynth construct

SEQ ID NO: 3737 - protein, 1371 aa, Artificial Sequence
  SARS-CoV-2/Iceland/202/2020__EPI_ISL_417750 spike protein (1-1211)(K986P_V987P) LumSynth construct
MFVFLVLLPLVSSQCVNLTTRTQLPPAYTNSFTRGVYYPDKVFRSSVLHSTQDLFLPFFSNVTWFHAIHVSGTNGTKRFDNPVLPFNDGVYFASTEKSNIIRGWIFGTTLDSKTQSLLIVNNATNVVIKVCEFQFCNDPFLGVYYHKNNKSWMESEFRVYSSANNCTFEYVSQPFLMDLEGKQGNFKNLREFVFKNIDGYFKIYSKHTPINLVRDLPQGFSALEPLVDLPIGINITRFQTLLALHRSYLTPGDSSSGWTAGAAAYYVGYLQPRTFLLKYNENGTITDAVDCALDPLSETKCTLKSFTVEKGIYQTSNFRVQPTESIVRFPNITNLCPFGEVFNATRFASVYAWNRKRISNCVADYSVLYNSASFSTFKCYGVSPTKLNDLCFTNVYADSFVIRGDEVRQIAPGQTGKIADYNYKLPDDFTGCVIAWNSNNLDSKVGGNYNYLYRLFRKSNLKPFERDISTEIYQAGSTPCNGVEGFNCYFPLQSYGFQPTNGVGYQPYRVVVLSFELLHAPATVCGPKKSTNLVKNKCVNFNFNGLTGTGVLTESNKKFLPFQQFGRDIADTTDAVRDPQTLEILDITPCSFGGVSVITPGTNTSNQVAVLYQDVNCTEVPVAIHADQLTPTWRVYSTGSNVFQTRAGCLIGAEHVNNSYECDIPIGAGICASYQTQTNSPRRARSVASQSIIAYTMSLGAENSVAYSNNSIAIPTNFTISVTTEILPVSMTKTSVDCTMYICGDSTECSNLLLQYGSFCTQLNRALTGIAVEQDKNTQEVFAQVKQIYKTPPIKDFGGFNFSQILPDPSKPSKRSFIEDLLFNKVTLADAGFIKQYGDCLGDIAARDLICAQKFNGLTVLPPLLTDEMIAQYTSALLAGTITSGWTFGAGAALQIPFAMQMAYRFNGIGVTQNVLYENQKLIANQFNSAIGKIQDSLSSTASALGKLQDVVNQNAQALNTLVKQLSSNFGAISSVLNDILSRLDPPEAEVQIDRLITGRLQSLQTYVTQQLIRAAEIRASANLAATKMSECVLGQSKRVDFCGKGYHLMSFPQSAPHGVVFLHVTYVPAQEKNFTTAPAICHDGKAHFPREGVFVSNGTHWFVTQRNFYEPQIITTDNTFVSGNCDVVIGIVNNTVYDPLQPELDSFKEELDKYFKNHTSPDVDLGDIPGINASVVNIQKEIDRLNEVAKNLNESLIDLQELGKYEQYIKGGGSGGGQIYEGKLTAEGLRFGIVASRFNHALVDRLVEGAIDAIVRHGGREEDITLVRVPGSWEIPVAAGELARKEDIDAVIAIGVLIRGATPHFDYIASEVSKGLADLSLELRKPITFGVITADTLEQAIERAGTKHGNKGWEAALSAIEMANLFKSLR

SEQ ID NO: 3738 - protein, 1371 aa, Artificial Sequence
  SARS-CoV-2/USA/WA-UW261/2020__EPI_ISL_418046 spike protein (1-1211)(K986P_V987P) LumSynth construct
MFVFLVLLPLVSSQCVNLTTRTQLPPAYTNSFTRGVYYPDKVFRSSVLHSTQDLFLPFFSNVTWFHAIHVSGTNGTKRFDNPVLPFNDGVYFASTEKSNIIRGWIFGTTLDSKTQSLLIVNNATNVVIKVCEFQFCNDPFLGVYYHKNNKSWMESEFRVYSSANNCTFEYVSQPFLMDLEGKQGNFKNLREFVFKNIDGYFKIYSKHTPINLVRDLPQGFSALEPLVDLPIGINITRFQTLLALHRSYLTPGDSSSGWTAGAAAYYVGYLQPRTFLLKYNENGTITDAVDCALDPLSETKCTLKSFTVEKGIYQTSNFRVQPTESIVRFPNITNLCPFGEVFNATRFTSVYAWNRKRISNCVADYSVLYNSASFSTFKCYGVSPTKLNDLCFTNVYADSFVIRGDEVRQIAPGQTGKIADYNYKLPDDFTGCVIAWNSNNLDSKVGGNYNYLYRLFRKSNLKPFERDISTEIYQAGSTPCNGVEGFNCYFPLQSYGFQPTNGVGYQPYRVVVLSFELLHAPATVCGPKKSTNLVKNKCVNFNFNGLTGTGVLTESNKKFLPFQQFGRDIADTTDAVRDPQTLEILDITPCSFGGVSVITPGTNTSNQVAVLYQDVNCTEVPVAIHADQLTPTWRVYSTGSNVFQTRAGCLIGAEHVNNSYECDIPIGAGICASYQTQTNSPRRARSVASQSIIAYTMSLGAENSVAYSNNSIAIPTNFTISVTTEILPVSMTKTSVDCTMYICGDSTECSNLLLQYGSFCTQLNRALTGIAVEQDKNTQEVFAQVKQIYKTPPIKDFGGFNFSQILPDPSKPSKRSFIEDLLFNKVTLADAGFIKQYGDCLGDIAARDLICAQKFNGLTVLPPLLTDEMIAQYTSALLAGTITSGWTFGAGAALQIPFAMQMAYRFNGIGVTQNVLYENQKLIANQFNSAIGKIQDSLSSTASALGKLQDVVNQNAQALNTLVKQLSSNFGAISSVLNDILSRLDPPEAEVQIDRLITGRLQSLQTYVTQQLIRAAEIRASANLAATKMSECVLGQSKRVDFCGKGYHLMSFPQSAPHGVVFLHVTYVPAQEKNFTTAPAICHDGKAHFPREGVFVSNGTHWFVTQRNFYEPQIITTDNTFVSGNCDVVIGIVNNTVYDPLQPELDSFKEELDKYFKNHTSPDVDLGDISGINASVVNIQKEIDRLNEVAKNLNESLIDLQELGKYEQYIKGGGSGGGQIYEGKLTAEGLRFGIVASRFNHALVDRLVEGAIDAIVRHGGREEDITLVRVPGSWEIPVAAGELARKEDIDAVIAIGVLIRGATPHFDYIASEVSKGLADLSLELRKPITFGVITADTLEQAIERAGTKHGNKGWEAALSAIEMANLFKSLR

SEQ ID NO: 3739 - protein, 1371 aa, Artificial Sequence
  SARS-CoV-2/Portugal/PT0035/2020__EPI_ISL_418020 spike protein (1-1211)(K986P_V987P) LumSynth construct
MFVFLVLLPLVSSQCVNLTTRTQLPPAYTNSFTRGVYYPDKVFRSSVLHSTQDLFLPFFSNVTWFHAIHVSGTNGTKRFDNPVLPFNDGVYFASTEKSNIIRGWIFGTTLDSKTQSLLIVNNATNVVIKVCEFQFCNDPFLGVYYHKNNKSWMESEFRVYSSANNCTFEYVSQPFLMDLEGKQGNFKNLREFVFKNIDGYFKIYSKHTPINLVRDLPQGFSALEPLVDLPIGINITRFQTLLALHRSYLTPGDSSSGWTAGAAAYYVGYLQPRTFLLKYNENGTITDAVDCALDPLSETKCTLKSFTVEKGIYQTSNFRVQPTESIVRFPNITNLCPFGEVFNATRFASVYAWNRKRISNCVADYSVLYNSASFSTFKCYGVSPTKLNDLCFTNVYADSFVIRGDEVRQIAPGQTGKIADYNYKLPDDFTGCVIAWNSNNLDSKVGGNYNYLYRLFRKSNLKPFERDISTEIYQAGSTPCNGVEGFNCYFPLQSYGFQPTNGVGYQPYRVVVLSFELLHAPATVCGPKKSTNLVKNKCVNFNFNGLTGTGVLTESNKKFLPFQQFGRDIADTTDAVRDPQTLEILDITPCSFGGVSVITPGTNTSNQVAVLYQDVNCTEVPVAIHADQLTPTWRVYSTGSNVFQTRAGCLIGAEHVNNSYECDIPIGAGICASYQTQTNSPRRARSVASQSIIAYTMSLGAENSVAYSNNSIAIPTNFTISVTTEILPVSMTKTSVDCTMYICGDSTECSNLLLQYGSFCTQLNRALTGIAVEQDKNTQEVFAQVKQIYKTPPIKDFGGFNFSQILPDPSKPSKRSFIEDLLFNKVTLADAGFIKQYGDCLGDISARDLICAQKFNGLTVLPPLLTDEMIAQYTSALLAGTITSGWTFGAGAALQIPFAMQMAYRFNGIGVTQNVLYENQKLIANQFNSAIGKIQDSLSSTASALGKLQDVVNQNAQALNTLVKQLSSNFGAISSVLNDILSRLDPPEAEVQIDRLITGRLQSLQTYVTQQLIRAAEIRASANLAATKMSECVLGQSKRVDFCGKGYHLMSFPQSAPHGVVFLHVTYVPAQEKNFTTAPAICHDGKAHFPREGVFVSNGTHWFVTQRNFYEPQIITTDNTFVSGNCDVVIGIVNNTVYDPLQPELDSFKEELDKYFKNHTSPDVDLGDISGINASVVNIQKEIDRLNEVAKNLNESLIDLQELGKYEQYIKGGGSGGGQIYEGKLTAEGLRFGIVASRFNHALVDRLVEGAIDAIVRHGGREEDITLVRVPGSWEIPVAAGELARKEDIDAVIAIGVLIRGATPHFDYIASEVSKGLADLSLELRKPITFGVITADTLEQAIERAGTKHGNKGWEAALSAIEMANLFKSLR

SEQ ID NO: 3740 - protein, 1371 aa, Artificial Sequence
  SARS-CoV-2/USA/NY-NYUMC7/2020__EPI_ISL_418192 spike protein (1-1211)(K986P_V987P) LumSynth construct
MFVFLVLLPLVSSQCVNLTTRTQLPPAYTNSFTRGVYYPDKVFRSSVLHSTQDLFLPFFSNVTWFHAIHVSGTNGTKRFDNPVLPFNDGVYFASTEKSNIIRGWIFGTTLDSKTQSLLIVNNATNVVIKVCEFQFCNDPFLGVYHHKNNKSWMESEFRVYSSANNCTFEYVSQPFLMDLEGKQGNFKNLREFVFKNIDGYFKIYSKHTPINLVRDLPQGFSALEPLVDLPIGINITRFQTLLALHRSYLTPGDSSSGWTAGAAAYYVGYLQPRTFLLKYNENGTITDAVDCALDPLSETKCTLKSFTVEKGIYQTSNFRVQPTESIVRFPNITNLCPFGEVFNATRFASVYAWNRKRISNCVADYSVLYNSASFSTFKCYGVSPTKLNDLCFTNVYADSFVIRGDEVRQIAPGQTGKIADYNYKLPDDFTGCVIAWNSNNLDSKVGGNYNYLYRLFRKSNLKPFERDISTEIYQAGSTPCNGVEGFNCYFPLQSYGFQPTNGVGYQPYRVVVLSFELLHAPATVCGPKKSTNLVKNKCVNFNFNGLTGTGVLTESNKKFLPFQQFGRDIADTTDAVRDPQTLEILDITPCSFGGVSVITPGTNTSNQVAVLYQGVNCTEVPVAIHADQLTPTWRVYSTGSNVFQTRAGCLIGAEHVNNSYECDIPIGAGICASYQTQTNSPRRARSVASQSIIAYTMSLGAENSVAYSNNSIAIPTNFTISVTTEILPVSMTKTSVDCTMYICGDSTECSNLLLQYGSFCTQLNRALTGIAVEQDKNTQEVFAQVKQIYKTPPIKDFGGFNFSQILPDPSKPSKRSFIEDLLFNKVTLADAGFIKQYGDCLGDIAARDLICAQKFNGLTVLPPLLTDEMIAQYTSALLAGTITSGWTFGAGAALQIPFAMQMAYRFNGIGVTQNVLYENQKLIANQFNSAIGKIQDSLSSTASALGKLQDVVNQNAQALNTLVKQLSSNFGAISSVLNDILSRLDPPEAEVQIDRLITGRLQSLQTYVTQQLIRAAEIRASANLAATKMSECVLGQSKRVDFCGKGYHLMSFPQSAPHGVVFLHVTYVPAQEKNFTTAPAICHDGKAHFPREGVFVSNGTHWFVTQRNFYEPQIITTDNTFVSGNCDVVIGIVNNTVYDPLQPELDSFKEELDKYFKNHTSPDVDLGDISGINASVVNIQKEIDRLNEVAKNLNESLIDLQELGKYEQYIKGGGSGGGQIYEGKLTAEGLRFGIVASRFNHALVDRLVEGAIDAIVRHGGREEDITLVRVPGSWEIPVAAGELARKEDIDAVIAIGVLIRGATPHFDYIASEVSKGLADLSLELRKPITFGVITADTLEQAIERAGTKHGNKGWEAALSAIEMANLFKSLR

SEQ ID NO: 3741 - protein, 1371 aa, Artificial Sequence
  SARS-CoV-2/Iceland/189/2020__EPI_ISL_417709 spike protein (1-1211)(K986P_V987P) LumSynth construct
MFVFLVLLPLVSSQCVNLTTRTQLPPAYTNSFTRGVYYPDKVFRSSVLHSTQDLFLPFFSNVTWFHAIHVSGTNGTKRFDNPVLPFNDGVYFASTEKSNIIRGWIFGTTLDSKTQSLLIVNNATNVVIKVCEFQFCNDPFLGVYYHKNNKSWMESEFRVYSSANNCTFEYVSQPFLMDLEGKQGNFKNLREFVFKNIDGYFKIYSKHTPINLVRDLPQGFSALEPLVDLPIGINITRFQTLLALHRSYLTPGDSSSGWTAGAAAYYVGYLQPRTFLLKYNENGTITDAVDCALDPLSETKCTLKSFTVEKGIYQTSNFRVQPTESIVRFPNITNLCPFGEVFNATRFASVYAWNRKRISNCVADYSVLYNSASFSTFKCYGVSPTKLNDLCFTNVYADSFVIRGDEVRQIAPGQTGKIADYNYKLPDDFTGCVIAWNSNNLDSKVGGNYNYLYRLFRKSNLKPFERDISTEIYQAGSTPCNGVEGFNCYFPLQSYGFQPTNGVGYQPYRVVVLSFELLHAPATVCGPKKSTNLVKNKCVNFNFNGLTGTGVLTESNKKFLPFQQFGRDIADTTDAVRDPQTLEILDITPCSFGGVSVITPGTNTSNQVAVLYQGVNCTEVPVAIHADQLTPTWRVYSTGSNVFQTRAGCLIGAEHVNNSYECDIPIGAGICASYQTQTNSPRRARSVASQSIIAYTMSLGAENSVAYSNNSIAIPTNFTISVTTEILPVSMTKTSVDCTMYICGDSTECSNLLLQYGSFCTQLNRALTGIAVEQDKNTQEVFAQVKQIYKTPPIKDFGGFNFSQILPDPSKPSKRSFIEDLLFNKVTLADAGFTKQYGDCLGDIAARDLICAQKFNGLTVLPPLLTDEMIAQYTSALLAGTITSGWTFGAGAALQIPFAMQMAYRFNGIGVTQNVLYENQKLIANQFNSAIGKIQDSLSSTASALGKLQDVVNQNAQALNTLVKQLSSNFGAISSVLNDILSRLDPPEAEVQIDRLITGRLQSLQTYVTQQLIRAAEIRASANLAATKMSECVLGQSKRVDFCGKGYHLMSFPQSAPHGVVFLHVTYVPAQEKNFTTAPAICHDGKAHFPREGVFVSNGTHWFVTQRNFYEPQIITTDNTFVSGNCDVVIGIVNNTVYDPLQPELDSFKEELDKYFKNHTSPDVDLGDISGINASVVNIQKEIDRLNEVAKNLNESLIDLQELGKYEQYIKGGGSGGGQIYEGKLTAEGLRFGIVASRFNHALVDRLVEGAIDAIVRHGGREEDITLVRVPGSWEIPVAAGELARKEDIDAVIAIGVLIRGATPHFDYIASEVSKGLADLSLELRKPITFGVITADTLEQAIERAGTKHGNKGWEAALSAIEMANLFKSLR

SEQ ID NO: 3742 - protein, 1371 aa, Artificial Sequence
  SARS-CoV-2/Australia/NSW56/2020__EPI_ISL_417408 spike protein (1-1211)(K986P_V987P) LumSynth construct
MFVFLVLLPLVSSQCVNLTTRTQLPPAYTNSFTRGVYYPDKVFRSSVLHSTQDLFLPFFSNVTWFHAIHVSGTNGTKRFDNPVLPFNDGVYFASTEKSNIIRGWIFGTTLDSKTQSLLIVNNATNVVIKVCEFQFCNDPFLGVYYHKNNKSWMESEFRVYSSANNCTFEYVSQPFLMDLEGKQGNFKNLREFVFKNIDGYFKIYSKHTPINLVRDLPQGFSALEPLVDLPIGINITRFQTLLALHRSYLTPGDSSSGWTAGAAAYYVGYLQPRTFLLKYNENGTITDAVDCALDPLSETKCTLKSFTVEKGIYQTSNFRVQPTESIVRFPNITNLCPFGEVFNATRFASVYAWNRKRISNCVADYSVLYNSASFSTFKCYGVSPTKLNDLCFTNVYADSFVIRGDEVRQIAPGQTGKIADYNYKLPDDFTGCVIAWNSNNLDSKVGGNYNYLYRLFRKSNLKPFERDISTEIYQAGSTPCNGVEGFNCYFPLQSYGFQPTNGVGYQPYRVVVLSFELLHAPATVCGPKKSTNLVKNKCVNFNFNGLTGTGVLTESNKKFLPFQQFGRDIADTTDAVRDPQTLEILDITPCSFGGVSVITPGTNTSNQVAVLYQDVNCTEVPVAIHADQLTPTWRVYSTGSNVFQTRAGCLIGAEHVNNSYECDIPIGAGICASYQTQTNSPRRARSVASQSIIAYTMSLGAENSVAYSNNSIAIPTNFTISVTTEILPVSMTKTSVDCTMYICGDSTECSNLLLQYGSFCTQLNRALTGIAVEQDKNTQEVFAQVKQIYKTPPIKDFGGFNFSQILPDSSKPSKRSFIEDLLFNKVTLADAGFIKQYGDCLGDIAARDLICAQKFNGLTVLPPLLTDEMIAQYTSALLAGTITSGWTFGAGAALQIPFAMQMAYRFNGIGVTQNVLYENQKLIANQFNSAIGKIQDSLSSTASALGKLQDVVNQNAQALNTLVKQLSSNFGAISSVLNDILSRLDPPEAEVQIDRLITGRLQSLQTYVTQQLIRAAEIRASANLAATKMSECVLGQSKRVDFCGKGYHLMSFPQSAPHGVVFLHVTYVPAQEKNFTTAPAICHDGKAHFPREGVFVSNGTHWFVTQRNFYEPQIITTDNTFVSGNCDVVIGIVNNTVYDPLQPELDSFKEELDKYFKNHTSPDVDLGDISGINASVVNIQKEIDRLNEVAKNLNESLIDLQELGKYEQYIKGGGSGGGQIYEGKLTAEGLRFGIVASRFNHALVDRLVEGAIDAIVRHGGREEDITLVRVPGSWEIPVAAGELARKEDIDAVIAIGVLIRGATPHFDYIASEVSKGLADLSLELRKPITFGVITADTLEQAIERAGTKHGNKGWEAALSAIEMANLFKSLR

SEQ ID NO: 3743 - protein, 1371 aa, Artificial Sequence
  SARS-CoV-2/Iceland/280/2020__EPI_ISL_417608 spike protein (1-1211)(K986P_V987P) LumSynth construct
MFVFLVLLPLVSSQCVNLTTRTQLPPAYTNSFTRGVYYPDKVFRSSVLHSTQDLFLPFFSNVTWFHAIHVSGTNGTKRFDNPVLPFNDGVYFASTEKSNIIRGWIFGTTLDSKTQSLLIVNNATNVVIKVCEFQFCNDPFLGVYYHKNNKSWMESEFRVYSSANNCTFEYVSQPFLMDLEGKQGNFKNLREFVFKNIDGYFKIYSKHTPINLVRDLPQGFSALEPLVDLPIGINITRFQTLLALHRSYLTPGDSSSGWTAGAAAYYVGYLQPRTFLLKYNENGTITDAVDCALDPLSETKCTLKSFTVEKGIYQTSNFRVQPTESIVRFPNITNLCPFGEVFNATRFASVYAWNRKRISNCVADYSVLYNSASFSTFKCYGVSPTKLNDLCFTNVYADSFVIRGDEVRQIAPGQTGKIADYNYKLPDDFTGCVIAWNSNNLDSKVGGNYNYLYRLFRKSNLKPFERDISTEIYQAGSTPCNGVEGFNCYFPLQSYGFQPTNGVGYQPYRVVVLSFELLHAPATVCGPKKSTNLVKNKCVNFNFNGLTGTGVLTESNKKFLPFQQFGRDIADTTDAVRDPQTLEILDITPCSFGGVSVITPGTNTSNQVAVLYQGVNCTEVPVAIHADQLTPTWRVYSTGSNVFQTRAGCLIGAEHVNNSYECDIPIGAGICASYHTQTNSPRRARSVASQSIIAYTMSLGAENSVAYSNNSIAIPTNFTISVTTEILPVSMTKTSVDCTMYICGDSTECSNLLLQYGSFCTQLNRALTGIAVEQDKNTQEVFAQVKQIYKTPPIKDFGGFNFSQILPDPSKPSKRSFIEDLLFNKVTLADAGFIKQYGDCLGDIAARDLICAQKFNGLTVLPPLLTDEMIAQYTSALLAGTITSGWTFGAGAALQIPFAMQMAYRFNGIGVTQNVLYENQKLIANQFNSAIGKIQDSLSSTASALGKLQDVVNQNAQALNTLVKQLSSNFGAISSVLNDILSRLDPPEAEVQIDRLITGRLQSLQTYVTQQLIRAAEIRASANLAATKMSECVLGQSKRVDFCGKGYHLMSFPQSAPHGVVFLHVTYVPAQEKNFTTAPAICHDGKAHFPREGVFVSNGTHWFVTQRNFYEPQIITTDNTFVSGNCDVVIGIVNNTVYDPLQPELDSFKEELDKYFKNHTSPDVDLGDISGINASVVNIQKEIDRLNEVAKNLNESLIDLQELGKYEQYIKGGGSGGGQIYEGKLTAEGLRFGIVASRFNHALVDRLVEGAIDAIVRHGGREEDITLVRVPGSWEIPVAAGELARKEDIDAVIAIGVLIRGATPHFDYIASEVSKGLADLSLELRKPITFGVITADTLEQAIERAGTKHGNKGWEAALSAIEMANLFKSLR

SEQ ID NO: 3744 - protein, 1371 aa, Artificial Sequence; identical to SEQ ID NO: 93
  SARS-CoV-2/Iceland/247/2020__EPI_ISL_417575 spike protein (1-1211)(K986P_V987P) LumSynth construct

SEQ ID NO: 3745 - protein, 1371 aa, Artificial Sequence
  SARS-CoV-2/Iceland/238/2020__EPI_ISL_417566 spike protein (1-1211)(K986P_V987P) LumSynth construct
MFVFLVLLPLVSSQCVNLTTRTQLPPAYTNSFTRGVYYPDKVFRSSVLHSTQDLFLPFFSNVTWFHAIHVSGTNGTKRFDNPVLPFNDGVYFASTEKSNIIRGWIFGTTLDSKTQSLLIVNNATNVVIKVCEFQFCNDPFLGVYYHKNNKSWMESEFRVYSSANNCTFEYVSQPFLMDLEGKQGNFKNLREFVFKNIDGYFKIYSKHTPINLVRDLPQGFSALEPLVDLPIGINITRFQTLLALHRSYLTPGDSSSGWTAGAAAYYVGYLQPRTFLLKYNENGTITDAVDCALDPLSETKCTLKSFTVEKGIYQTSNFRVQPTESIVRFPNITNLCPFGEVFNATRFASVYAWNRKRISNCVADYSVLYNSASFSTFKCYGVSPTKLNDLCFTNVYADSFVIRGDEVRQIAPGQTGKIADYNYKLPDDFTGCVIAWNSNNLDSKVGGNYNYLYRLFRKSNLKPFERDISTEIYQAGSTPCNGVEGFNCYFPLQSYGFQPTNGVGYQPYRVVVLSFELLHAPATVCGPKKSTNLVKNKCVNFNFNGLTGTGVLTESNKKFLPFQQFGRDIADTTDAVRDPQTLEILDITPCSFGGVSVITPGTNTSNQVAVLYQGVNCTEVPVAIHADQLTPTWRVYSTGSNVFQTRAGCLIGAEHVNNSYECDIPIGAGICASYQTQTNSPRRARSVASQSIIAYTMSLGAENSVAYSNNSIAIPTNFTISVTTEILPVSMTKTSVDCTMYICGDSTECSNLLLQYGSFCTQLNRALTGIAVEQDKNTQEVFAQVKQIYKTPPIKDFGGFNFSQILPDPSKPSKRSFIEDLLFNKVTLADVGFIKQYGDCLGDIAARDLICAQKFNGLTVLPPLLTDEMIAQYTSALLAGTITSGWTFGAGAALQIPFAMQMAYRFNGIGVTQNVLYENQKLIANQFNSAIGKIQDSLSSTASALGKLQDVVNQNAQALNTLVKQLSSNFGAISSVLNDILSRLDPPEAEVQIDRLITGRLQSLQTYVTQQLIRAAEIRASANLAATKMSECVLGQSKRVDFCGKGYHLMSFPQSAPHGVVFLHVTYVPAQEKNFTTAPAICHDGKAHFPREGVFVSNGTHWFVTQRNFYEPQIITTDNTFVSGNCDVVIGIVNNTVYDPLQPELDSFKEELDKYFKNHTSPDVDLGDISGINASVVNIQKEIDRLNEVAKNLNESLIDLQELGKYEQYIKGGGSGGGQIYEGKLTAEGLRFGIVASRFNHALVDRLVEGAIDAIVRHGGREEDITLVRVPGSWEIPVAAGELARKEDIDAVIAIGVLIRGATPHFDYIASEVSKGLADLSLELRKPITFGVITADTLEQAIERAGTKHGNKGWEAALSAIEMANLFKSLR

SEQ ID NO: 3746 - protein, 1371 aa, Artificial Sequence
  SARS-CoV-2/Greece/16/2020__EPI_ISL_418265 spike protein (1-1211)(K986P_V987P) LumSynth construct
MFVFLVLLPLVSSQCVNLTTRTQLPPAYTNSFTRGVYYPDKVFRSSVLHSTQDLFLPFFSNVTWFHAIHVSGTNGTKRFDNPVLPFNDGVYFASTEKSNIIRGWIFGTTLDSKTQSLLIVNNATNVVIKVCEFQFCNDPFLGVYYHKNNKSWMESEFRVYSSANNCTFEYVSQPFLMDLEGKQGNFKNLREFVFKNVDGYFKIYSKHTPINLVRDLPQGFSALEPLVDLPIGINITRFQTLLALHRSYLTPGDSSSGWTAGAAAYYVGYLQPRTFLLKYNENGTITDAVDCALDPLSETKCTLKSFTVEKGIYQTSNFRVQPTESIVRFPNITNLCPFGEVFNATRFASVYAWNRKRISNCVADYSVLYNSASFSTFKCYGVSPTKLNDLCFTNVYADSFVIRGDEVRQIAPGQTGKIADYNYKLPDDFTGCVIAWNSNNLDSKVGGNYNYLYRLFRKSNLKPFERDISTEIYQAGSTPCNGVEGFNCYFPLQSYGFQPTNGVGYQPYRVVVLSFELLHAPATVCGPKKSTNLVKNKCVNFNFNGLTGTGVLTESNKKFLPFQQFGRDIADTTDAVRDPQTLEILDITPCSFGGVSVITPGTNTSNQVAVLYQDVNCTEVPVAIHADQLTPTWRVYSTGSNVFQTRAGCLIGAEHVNNSYECDIPIGAGICASYQTQTNSPRRARSVASQSIIAYTMSLGAENSVAYSNNSIAIPTNFTISVTTEILPVSMTKTSVDCTMYICGDSTECSNLLLQYGSFCTQLNRALTGIAVEQDKNTQEVFAQVKQIYKTPPIKDFGGFNFSQILPDPSKPSKRSFIEDLLFNKVTLADAGFIKQYGDCLGDIAARDLICAQKFNGLTVLPPLLTDEMIAQYTSALLAGTITSGWTFGAGAALQIPFAMQMAYRFNGIGVTQNVLYENQKLIANQFNSAIGKIQDSLSSTASALGKLQDVVNQNAQALNTLVKQLSSNFGAISSVLNDILSRLDPPEAEVQIDRLITGRLQSLQTYVTQQLIRAAEIRASANLAATKMSECVLGQSKRVDFCGKGYHLMSFPQSAPHGVVFLHVTYVPAQEKNFTTAPAICHDGKAHFPREGVFVSNGTHWFVTQRNFYEPQIITTDNTFVSGNCDVVIGIVNNTVYDPLQPELDSFKEELDKYFKNHTSPDVDLGDISGINASVVNIQKEIDRLNEVAKNLNESLIDLQELGKYEQYIKGGGSGGGQIYEGKLTAEGLRFGIVASRFNHALVDRLVEGAIDAIVRHGGREEDITLVRVPGSWEIPVAAGELARKEDIDAVIAIGVLIRGATPHFDYIASEVSKGLADLSLELRKPITFGVITADTLEQAIERAGTKHGNKGWEAALSAIEMANLFKSLR

SEQ ID NO: 3747 - protein, 1371 aa, Artificial Sequence
  SARS-CoV-2/Iceland/319/2020__EPI_ISL_417648 spike protein (1-1211)(K986P_V987P) LumSynth construct
MFVFLVLLPLVSSQCVNLTTRTQLPPAYTNSFTRGVYYPDKVFRSSVLHSTQDLFLPFFSNVTWFHAIHVSGTNGTKRFDNPVLPFNDGVYFASTEKSNIIRGWIFGTTLDSKTQSLLIVNNATNVVIKVCEFQFCNDPFLGVYYHKNNKSWMESEFRVYSSANNCTFEYVSQPFLIDLEGKQGNFKNLREFVFKNIDGYFKIYSKHTPINLVRDLPQGFSALEPLVDLPIGINITRFQTLLALHRSYLTPGDSSSGWTAGAAAYYVGYLQPRTFLLKYNENGTITDAVDCALDPLSETKCTLKSFTVEKGIYQTSNFRVQPTESIVRFPNITNLCPFGEVFNATRFASVYAWNRKRISNCVADYSVLYNSASFSTFKCYGVSPTKLNDLCFTNVYADSFVIRGDEVRQIAPGQTGKIADYNYKLPDDFTGCVIAWNSNNLDSKVGGNYNYLYRLFRKSNLKPFERDISTEIYQAGSTPCNGVEGFNCYFPLQSYGFQPTNGVGYQPYRVVVLSFELLHAPATVCGPKKSTNLVKNKCVNFNFNGLTGTGVLTESNKKFLPFQQFGRDIADTTDAVRDPQTLEILDITPCSFGGVSVITPGTNTSNQVAVLYQGVNCTEVPVAIHADQLTPTWRVYSTGSNVFQTRAGCLIGAEHVNNSYECDIPIGAGICASYQTQTNSPRRARSVASQSIIAYTMSLGAENSVAYSNNSIAIPTNFTISVTTEILPVSMTKTSVDCTMYICGDSTECSNLLLQYGSFCTQLNRALTGIAVEQDKNTQEVFAQVKQIYKTPPIKDFGGFNFSQILPDPSKPSKRSFIEDLLFNKVTLADAGFIKQYGDCLGDIAARDLICAQKFNGLTVLPPLLTDEMIAQYTSALLAGTITSGWTFGAGAALQIPFAMQMAYRFNGIGVTQNVLYENQKLIANQFNSAIGKIQDSLSSTASALGKLQDVVNQNAQALNTLVKQLSSNFGAISSVLNDILSRLDPPEAEVQIDRLITGRLQSLQTYVTQQLIRAAEIRASANLAATKMSECVLGQSKRVDFCGKGYHLMSFPQSAPHGVVFLHVTYVPAQEKNFTTAPAICHDGKAHFPREGVFVSNGTHWFVTQRNFYEPQIITTDNTFVSGNCDVVIGIVNNTVYDPLQPELDSFKEELDKYFKNHTSPDVDLGDISGINASVVNIQKEIDRLNEVAKNLNESLIDLQELGKYEQYIKGGGSGGGQIYEGKLTAEGLRFGIVASRFNHALVDRLVEGAIDAIVRHGGREEDITLVRVPGSWEIPVAAGELARKEDIDAVIAIGVLIRGATPHFDYIASEVSKGLADLSLELRKPITFGVITADTLEQAIERAGTKHGNKGWEAALSAIEMANLFKSLR

SEQ ID NO: 3748 - protein, 1371 aa, Artificial Sequence
  SARS-CoV-2/Congo/94/2020__EPI_ISL_417947 spike protein (1-1211)(K986P_V987P) LumSynth construct
MFVFLVLLPLVSSQCVNLTTRTQLPPAYTNSFTRGVYYPDKVFRSSVLHSTQDLFLPFFSNVTWFHAIHVSGTNGTKRFDNPVLPFNDGVYFASTEKSNIIRGWIFGTTLDSKTQSLLIVNNATNVVIKVCEFQFCNDPFLGVYYHKNNKSWMESEFRVYSSANNCTFEYVSQPFLMDLEGKQGNFKNLREFVFKNIDGYFKIYSKHTPINLVRDLPQGFSALEPLVDLPIGINITRFQTLLALHRSYLTPGDSSSGWTAGAAAYYVGYLQPRTFLLKYNENGTITDAVDCALDPLSETKCTLKSFTVEKGIYQTSNFRVQPTESIVRFPNITNLCPFGEVFNATRFASVYAWNRKRISNCVADYSVLYNSASFSTFKCYGVSPTKLNDLCFTNVYADSFVIRGDEVRQIAPGQTGKIADYNYKLPDDFTGCVIAWNSNNLDSKVGGNYNYLYRLFRKSNLKPFERDISTEIYQAGSTPCNGVEGFNCYFPLQSYGFQPTNGVGYQPYRVVVLSFELLHAPATVCGPKKSTNLVKNKCVNFNFNGLTGTGVLTESNKKFLPFQQFGRDIADTTDAVRDPQTLEILDITPCSFGGVSVITPGTNTSNQVAVLYQGVNCTEVPVAIHADQLTPTWRVYSTGSNVFQTRAGCLIGAEHVNNSYECDIPIGAGICASYQTQTNSPRRARSVASQSIIAYTMSLGAENSVAYSNNSIAIPTNFTISVTTEILPVSMTKTSVDCTMYICGDSTECSNLLLQYGSFCTQLNRALTGIAVEQDKNTQEVFAQVKQIYKTPPIKDFGGFNFSQILPDPSKPSKRSFIEDILFNKVTLADAGFIKQYGDCLGDIAARDLICAQKFNGLTVLPPLLTDEMIAQYTSALLAGTITSGWTFGAGAALQIPFAMQMAYRFNGIGVTQNVLYENQKLIANQFNSAIGKIQDSLSSTASALGKLQDVVNQNAQALNTLVKQLSSNFGAISSVLNDILSRLDPPEAEVQIDRLITGRLQSLQTYVTQQLIRAAEIRASANLAATKMSECVLGQSKRVDFCGKGYHLMSFPQSAPHGVVFLHVTYVPAQEKNFTTAPAICHDGKAHFPREGVFVSNGTHWFVTQRNFYEPQIITTDNTFVSGNCDVVIGIVNNTVYDPLQPELDSFKEELDKYFKNHTSPDVDLGDISGINASVVNIQKEIDRLNEVAKNLNESLIDLQELGKYEQYIKGGGSGGGQIYEGKLTAEGLRFGIVASRFNHALVDRLVEGAIDAIVRHGGREEDITLVRVPGSWEIPVAAGELARKEDIDAVIAIGVLIRGATPHFDYIASEVSKGLADLSLELRKPITFGVITADTLEQAIERAGTKHGNKGWEAALSAIEMANLFKSLR

SEQ ID NO: 3749 - protein, 1371 aa, Artificial Sequence
  SARS-CoV-2/Congo/158/2020__EPI_ISL_417950 spike protein (1-1211)(K986P_V987P) LumSynth construct
MFVFLVLLPLVSSQCVNLTTRTQLPPAYTNSFTRGVYYPDKVFRSSVLHSTQDLFLPFFSNVTWFHAIHVSGTNGTKRFDNPVLPFNDGVYFASTEKSNIIRGWIFGTTLDSKTQSLLIVNNATNVVIKVCEFQFCNDPFLGVYYHKNNKSWMESEFRVYSSANNCTFEYVSQPFLMDLEGKQGNFKNLREFVFKNIDGYFKIYSKHTPINLVRDLPQGFSALEPLVDLPIGINITRFQTLLALHRSYLTPGDSSSGWTAGAAAYYVGYLQPRTFLLKYNENGTITDAVDCALDPLSETKCTLKSFTVEKGIYQTSNFRVQPTESIVRFPNITNLCPFGEVFNATRFASVYAWNRKRISNCVADYSVLYNSASFSTFKCYGVSPTKLNDLCFTNVYADSFVIRGDEVRQIAPGQTGKIADYNYKLPDDFTGCVIAWNSNNLDSKVGGNYNYLYRLFRKSNLKPFERDISTEIYQAGSTPCNGVEGFNCYFPLQSYGFQPTNGVGYQPYRVVVLSFELLHAPATVCGPKKSTNLVKNKCVNFNFNGLTGTGVLTESNKKFLPFQQFGRDIADTTDAVRDPQTLEILDITPCSFGGVSVITPGTNTSNQVAVLYQDVNCTEVPVAIHADQLTPTWRVYSTGSNVFQTRAGCLIGAEHVNNSYECDIPIGAGICASYQTQTNSPRRARSVASQSIIAYTMSLGAENSVAYSNNSIAIPTNFTISVTTEILPVSMTKTSVDCTMYICGDSTECSNLLLQYGSFCTQLNRALTGIAVEQDKNTQEVFAQVKQIYKTPPIKDFGGFNFSQILPDPSKPSKRSFIEDLLFNKVTLADAGFIKQYGDCLGDIAARDLICAQKFNGLTVLPPLLTDEMIAQYTSALLAGTITSGWTFGAGAALQIPFAMQMAYRFNGIGVTQNVLYENQKLIANQFNSAIGKIQDSLSSTASALGKLQDVVNQNAQALNTLVKQLSSNFGAISSVLNDILSRLDPPEAEVQIDRLITGRLQSLQTYVTQQLIRAAEIRASANLAATKMSECVLGQSKRVDFCGKGYHLMSFPQSAPHGVVFLHVTYVPAQEKNFTTAPAICHDGKAHFPREGVFVSNGTHWFVTQRNFYEPQIITTDNTFLSGNCDVVIGIVNNTVYDPLQPELDSFKEELDKYFKNHTSPDVDLGDISGINASVVNIQKEIDRLNEVAKNLNESLIDLQELGKYEQYIKGGGSGGGQIYEGKLTAEGLRFGIVASRFNHALVDRLVEGAIDAIVRHGGREEDITLVRVPGSWEIPVAAGELARKEDIDAVIAIGVLIRGATPHFDYIASEVSKGLADLSLELRKPITFGVITADTLEQAIERAGTKHGNKGWEAALSAIEMANLFKSLR

SEQ ID NO: 3750 - protein, 1371 aa, Artificial Sequence
  SARS-CoV-2/USA/UT-00034/2020__EPI_ISL_417977 spike protein (1-1211)(K986P_V987P) LumSynth construct
MFVFLVLLPLVSSQCVNLTTRTQLPPAYTNSFTRGVYYPDKVFRSSVLHSTQDLFLPFFSNVTWFHAIHVSGTNGTKRFDNPVLPFNDGVYFASTEKSNIIRGWIFGTTLDSKTQSLLIVNNATNVVIKVCEFQFCNDPFLGVYYYKNNKSWMESEFRVYSSANNCTFEYVSQPFLMDLEGKQGNFKNLREFVFKNIDGYFKIYSKHTPINLVRDLPQGFSALEPLVDLPIGINITRFQTLLALHRSYLTPGDSSSGWTAGAAAYYVGYLQPRTFLLKYNENGTITDAVDCALDPLSETKCTLKSFTVEKGIYQTSNFRVQPTESIVRFPNITNLCPFGEVFNATRFASVYAWNRKRISNCVADYSVLYNSASFSTFKCYGVSPTKLNDLCFTNVYADSFVIRGDEVRQIAPGQTGKIADYNYKLPDDFTGCVIAWNSNNLDSKVGGNYNYLYRLFRKSNLKPFERDISTEIYQAGSTPCNGVEGFNCYFPLQSYGFQPTNGVGYQPYRVVVLSFELLHAPATVCGPKKSTNLVKNKCVNFNFNGLTGTGVLTESNKKFLPFQQFGRDIADTTDAVRDPQTLEILDITPCSFGGVSVITPGTNTSNQVAVLYQGVNCTEVPVAIHADQLTPTWRVYSTGSNVFQTRAGCLIGAEHVNNSYECDIPIGAGICASYQTQTNSPRRARSVASQSIIAYTMSLGAENSVAYSNNSIAIPTNFTISVTTEILPVSMTKTSVDCTMYICGDSTECSNLLLQYGSFCTQLNRALTGIAVEQDKNTQEVFAQVKQIYKTPPIKDFGGFNFSQILPDPSKPSKRSFIEDLLFNKVTLADAGFIKQYGDCLGDIAARDLICAQKFNGLTVLPPLLTDEMIAQYTSALLAGTITSGWTFGAGAALQIPFAMQMAYRFNGIGVTQNVLYENQKLIANQFNSAIGKIQDSLSSTASALGKLQDVVNQNAQALNTLVKQLSSNFGAISSVLNDILSRLDPPEAEVQIDRLITGRLQSLQTYVTQQLIRAAEIRASANLAATKMSECVLGQSKRVDFCGKGYHLMSFPQSAPHGVVFLHVTYVPAQEKNFTTAPAICHDGKAHFPREGVFVSNGTHWFVTQRNFYEPQIITTDNTFVSGNCDVVIGIVNNTVYDPLQPELDSFKEELDKYFKNHTSPDVDLGDISGINASVVNIQKEIDRLNEVAKNLNESLIDLQELGKYEQYIKGGGSGGGQIYEGKLTAEGLRFGIVASRFNHALVDRLVEGAIDAIVRHGGREEDITLVRVPGSWEIPVAAGELARKEDIDAVIAIGVLIRGATPHFDYIASEVSKGLADLSLELRKPITFGVITADTLEQAIERAGTKHGNKGWEAALSAIEMANLFKSLR

SEQ ID NO: 3751 - protein, 1371 aa, Artificial Sequence
  SARS-CoV-2/USA/UT-00033/2020__EPI_ISL_417976 spike protein (1-1211)(K986P_V987P) LumSynth construct
MFVFLVLLPLVSSQCVNLTTRTQLPPAYTNSFTRGVYYPDKVFRSSVLHSTQDLFLPFFSNVTWFHAIHVSGTNGTKRFDNPVLPFNDGVYFASTEKSNIIRGWIFGTTLDSKTQSLLIVNNATNVVIKVCEFQFCNDPFLGVYYHKNNKSWMESEFRVYSSANNCTFEYVSQPFLMDLEGKQGNFKNLREFVFKNIDGYFKIYSKHTPINLVRDLPQGFSALEPLVDLPIGINITRFQTLLALHRSYLTPGDSSSGLTAGAAAYYVGYLQPRTFLLKYNENGTITDAVDCALDPLSETKCTLKSFTVEKGIYQTSNFRVQPTESIVRFPNITNLCPFGEVFNATRFASVYAWNRKRISNCVADYSVLYNSASFSTFKCYGVSPTKLNDLCFTNVYADSFVIRGDEVRQIAPGQTGKIADYNYKLPDDFTGCVIAWNSNNLDSKVGGNYNYLYRLFRKSNLKPFERDISTEIYQAGSTPCNGVEGFNCYFPLQSYGFQPTNGVGYQPYRVVVLSFELLHAPATVCGPKKSTNLVKNKCVNFNFNGLTGTGVLTESNKKFLPFQQFGRDIADTTDAVRDPQTLEILDITPCSFGGVSVITPGTNTSNQVAVLYQGVNCTEVPVAIHADQLTPTWRVYSTGSNVFQTRAGCLIGAEHVNNSYECDIPIGAGICASYQTQTNSPRRARSVASQSIIAYTMSLGAENSVAYSNNSIAIPTNFTISVTTEILPVSMTKTSVDCTMYICGDSTECSNLLLQYGSFCTQLNRALTGIAVEQDKNTQEVFAQVKQIYKTPPIKDFGGFNFSQILPDPSKPSKRSFIEDLLFNKVTLADAGFIKQYGDCLGDIAARDLICAQKFNGLTVLPPLLTDEMIAQYTSALLAGTITSGWTFGAGAALQIPFAMQMAYRFNGIGVTQNVLYENQKLIANQFNSAIGKIQDSLSSTASALGKLQDVVNQNAQALNTLVKQLSSNFGAISSVLNDILSRLDPPEAEVQIDRLITGRLQSLQTYVTQQLIRAAEIRASANLAATKMSECVLGQSKRVDFCGKGYHLMSFPQSAPHGVVFLHVTYVPAQEKNFTTAPAICHDGKAHFPREGVFVSNGTHWFVTQRNFYEPQIITTDNTFVSGNCDVVIGIVNNTVYDPLQPELDSFKEELDKYFKNHTSPDVDLGDISGINASVVNIQKEIDRLNEVAKNLNESLIDLQELGKYEQYIKGGGSGGGQIYEGKLTAEGLRFGIVASRFNHALVDRLVEGAIDAIVRHGGREEDITLVRVPGSWEIPVAAGELARKEDIDAVIAIGVLIRGATPHFDYIASEVSKGLADLSLELRKPITFGVITADTLEQAIERAGTKHGNKGWEAALSAIEMANLFKSLR

SEQ ID NO: 3752 - protein, 1371 aa, Artificial Sequence
  SARS-CoV-2/USA/WI-13/2020__EPI_ISL_417516 spike protein (1-1211)(K986P_V987P) LumSynth construct
MFVFLVLLPLVSSQCVNLTTRTQLPPAYTNSFTRGVYYPDKVFRSSVLHSTQDLFLPFFSNVTWFHAIHVSGTNGTKRFDNPVLPFNDGVYFASTEKSNIIRGWIFGTTLDSKTQSLLIVNNATNVVIKVCEFQFCNDPFLGVYYHKNNKSWMESEFRVYSSANNCTFEYVSQPFLMDLEGKQGNFKNLREFVFKNIDGYFKIYSKHTPINLVRDLPQGFSALEPLVDLPIGINITRFQTLLALHRSYLTPGDSSSGWTAGAAAYYVGYLQPRTFLLKYNENGTITDAVDCALDPLSETKCTLKSFTVEKGIYQTSNFRVLPTESIVRFPNITNLCPFGEVFNATRFASVYAWNRKRISNCVADYSVLYNSASFSTFKCYGVSPTKLNDLCFTNVYADSFVIRGDEVRQIAPGQTGKIADYNYKLPDDFTGCVIAWNSNNLDSKVGGNYNYLYRLFRKSNLKPFERDISTEIYQAGSTPCNGVEGFNCYFPLQSYGFQPTNGVGYQPYRVVVLSFELLHAPATVCGPKKSTNLVKNKCVNFNFNGLTGTGVLTESNKKFLPFQQFGRDIADTTDAVRDPQTLEILDITPCSFGGVSVITPGTNTSNQVAVLYQGVNCTEVPVAIHADQLTPTWRVYSTGSNVFQTRAGCLIGAEHVNNSYECDIPIGAGICASYQTQTNSPRRARSVASQSIIAYTMSLGAENSVAYSNNSIAIPTNFTISVTTEILPVSMTKTSVDCTMYICGDSTECSNLLLQYGSFCTQLNRALTGIAVEQDKNTQEVFAQVKQIYKTPPIKDFGGFNFSQILPDPSKPSKRSFIEDLLFNKVTLADAGFIKQYGDCLGDIAARDLICAQKFNGLTVLPPLLTDEMIAQYTSALLAGTITSGWTFGAGAALQIPFAMQMAYRFNGIGVTQNVLYENQKLIANQFNSAIGKIQDSLSSTASALGKLQDVVNQNAQALNTLVKQLSSNFGAISSVLNDILSRLDPPEAEVQIDRLITGRLQSLQTYVTQQLIRAAEIRASANLAATKMSECVLGQSKRVDFCGKGYHLMSFPQSAPHGVVFLHVTYVPAQEKNFTTAPAICHDGKAHFPREGVFVSNGTHWFVTQRNFYEPQIITTDNTFVSGNCDVVIGIVNNTVYDPLQPELDSFKEELDKYFKNHTSPDVDLGDISGINASVVNIQKEIDRLNEVAKNLNESLIDLQELGKYEQYIKGGGSGGGQIYEGKLTAEGLRFGIVASRFNHALVDRLVEGAIDAIVRHGGREEDITLVRVPGSWEIPVAAGELARKEDIDAVIAIGVLIRGATPHFDYIASEVSKGLADLSLELRKPITFGVITADTLEQAIERAGTKHGNKGWEAALSAIEMANLFKSLR

SEQ ID NO: 3753 - protein, 1370 aa, Artificial Sequence
  SARS-CoV-2/India/1-27/2020__EPI_ISL_413522 spike protein (1-1210)(K985P_V986P) LumSynth construct
MFVFLVLLPLVSSQCVNLTTRTQLPPAYTNSFTRGVYYPDKVFRSSVLHSTQDLFLPFFSNVTWFHAIHVSGTNGTKRFDNPVLPFNDGVYFASTEKSNIIRGWIFGTTLDSKTQSLLIVNNATNVVIKVCEFQFCNDPFLGVYHKNNKSWMESEFRVYSSANNCTFEYVSQPFLMDLEGKQGNFKNLREFVFKNIDGYFKIYSKHTPINLVRDLPQGFSALEPLVDLPIGINITRFQTLLALHRSYLTPGDSSSGWTAGAAAYYVGYLQPRTFLLKYNENGTITDAVDCALDPLSETKCTLKSFTVEKGIYQTSNFRVQPTESIVRFPNITNLCPFGEVFNATRFASVYAWNRKRISNCVADYSVLYNSASFSTFKCYGVSPTKLNDLCFTNVYADSFVIRGDEVIQIAPGQTGKIADYNYKLPDDFTGCVIAWNSNNLDSKVGGNYNYLYRLFRKSNLKPFERDISTEIYQAGSTPCNGVEGFNCYFPLQSYGFQPTNGVGYQPYRVVVLSFELLHAPATVCGPKKSTNLVKNKCVNFNFNGLTGTGVLTESNKKFLPFQQFGRDIADTTDAVRDPQTLEILDITPCSFGGVSVITPGTNTSNQVAVLYQDVNCTEVPVAIHADQLTPTWRVYSTGSNVFQTRAGCLIGAEHVNNSYECDIPIGAGICASYQTQTNSPRRARSVASQSIIAYTMSLGAENSVAYSNNSIAIPTNFTISVTTEILPVSMTKTSVDCTMYICGDSTECSNLLLQYGSFCTQLNRALTGIAVEQDKNTQEVFAQVKQIYKTPPIKDFGGFNFSQILPDPSKPSKRSFIEDLLFNKVTLADAGFIKQYGDCLGDIAARDLICAQKFNGLTVLPPLLTDEMIAQYTSALLAGTITSGWTFGAGAALQIPFAMQMAYRFNGIGVTQNVLYENQKLIANQFNSAIGKIQDSLSSTASALGKLQDVVNQNAQALNTLVKQLSSNFGAISSVLNDILSRLDPPEAEVQIDRLITGRLQSLQTYVTQQLIRAAEIRASANLAATKMSECVLGQSKRVDFCGKGYHLMSFPQSAPHGVVFLHVTYVPAQEKNFTTAPAICHDGKAHFPREGVFVSNGTHWFVTQRNFYEPQIITTDNTFVSGNCDVVIGIVNNTVYDPLQPELDSFKEELDKYFKNHTSPDVDLGDISGINASVVNIQKEIDRLNEVAKNLNESLIDLQELGKYEQYIKGGGSGGGQIYEGKLTAEGLRFGIVASRFNHALVDRLVEGAIDAIVRHGGREEDITLVRVPGSWEIPVAAGELARKEDIDAVIAIGVLIRGATPHFDYIASEVSKGLADLSLELRKPITFGVITADTLEQAIERAGTKHGNKGWEAALSAIEMANLFKSLR

SEQ ID NO: 3754 - protein, 1365 aa, Artificial Sequence
  SARS-CoV-2/pangolin/Guangxi/P4L/2017__EPI_ISL_410538 spike protein (1-1205)(K980P_V981P) LumSynth construct
MFVFLFVLPLVSSQCVNLTTRTGIPPGYTNSSTRGVYYPDKVFRSSILHLTQDLFLPFFSNVTWFNTINYQGGFKKFDNPVLPFNDGVYFASTEKSNIIRGWIFGTTLDARTQSLLIVNNATNVVIKVCEFQFCTDPFLGVYYHNNNKTWVENEFRVYSSANNCTFEYISQPFLMDLEGKQGNFKNLREFVFKNVDGYFKIYSKHTPIDLVRDLPRGFAALEPLVDLPIGINITRFQTLLALHRSYLTPGNLESGWTTGAAAYYVGYLQQRTFLLSYNQNGTITDAVDCSLDPLSETKCTLKSLTVEKGIYQTSNFRVQPTISIVRFPNITNLCPFGEVFNASKFASVYAWNRKRISNCVADYSVLYNSTSFSTFKCYGVSPTKLNDLCFTNVYADSFVVKGDEVRQIAPGQTGVIADYNYKLPDDFTGCVIAWNSVKQDALTGGNYGYLYRLFRKSKLKPFERDISTEIYQAGSTPCNGQVGLNCYYPLERYGFHPTTGVNYQPFRVVVLSFELLNGPATVCGPKLSTTLVKDKCVNFNFNGLTGTGVLTTSKKQFLPFQQFGRDISDTTDAVRDPQTLEILDITPCSFGGVSVITPGTNTSNQVAVLYQDVNCTEVPMAIHAEQLTPAWRVYSAGANVFQTRAGCLVGAEHVNNSYECDIPVGAGICASYHSMSSLRSVNQRSIIAYTMSLGAENSVAYSNNSIAIPTNFTISVTTEILPVSMTKTSVDCTMYICGDSIECSNLLLQYGSFCTQLNRALTGIAVEQDKNTQEVFAQVKQIYKTPPIKDFGGFNFSQILPDPSKPSKRSFIEDLLFNKVTLADAGFIKQYGDCLGDIAARDLICAQKFNGLTVLPPLLTDEMIAQYTSALLAGTITSGWTFGAGAALQIPFAMQMAYRFNGIGVTQNVLYENQKLIANQFNSAIGKIQDSLSSTASALGKLQDVVNQNAQALNTLVKQLSSNFGAISSVLNDILSRLDPPEAEVQIDRLITGRLQSLQTYVTQQLIRAAEIRASANLAATKMSECVLGQSKRVDFCGKGYHLMSFPQSAPHGVVFLHVTYVPAQEKNFTTAPAICHEGKAHFPREGVFVSNGTHWFITQRNFYEPQIITTDNTFVSGSCDVVIGIVNNTVYDPLQPELDSFKEELDKYFKNHTSPDVDLGDISGINASVVNIQKEIDRLNEVAKNLNESPIDLQELGKYEQYIKGGGSGGGQIYEGKLTAEGLRFGIVASRFNHALVDRLVEGAIDAIVRHGGREEDITLVRVPGSWEIPVAAGELARKEDIDAVIAIGVLIRGATPHFDYIASEVSKGLADLSLELRKPITFGVITADTLEQAIERAGTKHGNKGWEAALSAIEMANLFKSLR

SEQ ID NO: 3755 - protein, 1365 aa, Artificial Sequence
  SARS-CoV-2/pangolin/Guangxi/P5L/2017__EPI_ISL_410540 spike protein (1-1205)(K980P_V981P) LumSynth construct
MFVFLFVLPLVSSQCVNLTTRTGIPPGYTNSSTRGVYYPDKVFRSSILHLTQDLFLPFFSNVTWFNTINYQGGFKKFDNPVLPFNDGVYFASTEKSNIIRGWIFGTTLDARTQSLLIVNNATNVVIKVCEFQFCTDPFLGVYYHNNNKTWVENEFRVYSSANNCTFEYISQPFLMDLEGKQGNFKNLREFVFKNVDGYFKIYSKHTPIDLVRDLPRGFAALEPLVDLPIGINITRFQTLLALHRSYLTPGKLESGWTTGAAAYYVGYLQQRTFLLSYNQNGTITDAVDCSLDPLSETKCTLKSLTVEKGIYQTSNFRVQPTISIVRFPNITNLCPFGEVFNASKFASVYAWNRKRISNCVADYSVLYNSTSFSTFKCYGVSPTKLNDLCFTNVYADSFVVKGDEVRQIAPGQTGVIADYNYKLPDDFTGCVIAWNSVKQDALTGGNYGYLYRLFRKSKLKPFERDISTEIYQAGSTPCNGQVGLNCYYPLERYGFHPTTGVNYQPFRVVVLSFELLNGPATVCGPKLSTTLVKDKCVNFNFNGLTGTGVLTTSKKQFLPFQQFGRDISDTTDAVRDPQTLEILDITPCSFGGVSVITPGTNTSNQVAVLYQDVNCTEVPMAIHAEQLTPAWRVYSAGANVFQTRAGCLVGAEHVNNSYECDIPVGAGICASYHSMSSFRSVNQRSIIAYTMSLGAENSVAYSNNSIAIPTNFTISVTTEILPVSMTKTSVDCTMYICGDSIECSNLLLQYGSFCTQLNRALTGIAVEQDKNTQEVFAQVKQIYKTPPIKDFGGFNFSQILPDPSKPSKRSFIEDLLFNKVTLADAGFIKQYGDCLGDIAARDLICAQKFNGLTVLPPLLTDEMIAQYTSALLAGTITSGWTFGAGAALQIPFAMQMAYRFNGIGVTQNVLYENQKLIANQFNSAIGKIQDSLSSTASALGKLQDVVNQNAQALNTLVKQLSSNFGAISSVLNDILSRLDPPEAEVQIDRLITGRLQSLQTYVTQQLIRAAEIRASANLAATKMSECVLGQSKRVDFCGKGYHLMSFPQSAPHGVVFLHVTYVPAQEKNFTTAPAICHEGKAHFPREGVFVSNGTHWFITQRNFYEPQIITTDNTFVSGSCDVVIGIVNNTVYDPLQPELDSFKEELDKYFKNHTSPDVDLGDISGINASVVNIQKEIDRLNEVAKNLNESLIDLQELGKYEQYIKGGGSGGGQIYEGKLTAEGLRFGIVASRFNHALVDRLVEGAIDAIVRHGGREEDITLVRVPGSWEIPVAAGELARKEDIDAVIAIGVLIRGATPHFDYIASEVSKGLADLSLELRKPITFGVITADTLEQAIERAGTKHGNKGWEAALSAIEMANLFKSLR

SEQ ID NO: 3756 - protein, 1365 aa, Artificial Sequence
  SARS-CoV-2/pangolin/Guangxi/P5E/2017__EPI_ISL_410541 spike protein (1-1205)(K980P_V981P) LumSynth construct
MFVFLFVLPLVSSQCVNLTTRTGIPPGYTNSSTRGVYYPDKVFRSSILHLTQDLFLPFFSNVTWFNTITYQGGSKKFDNPVLPFNDGVYFASTEKSNIIRGWIFGTTLDARTQSLLIVNNATNVVIKVCEFQFCTDPFLGVYYHNNNKTWVENEFRVYSSANNCTFEYISQPFLMDLEGKQGNFKNLREFVFKNVDGYFKIYSKHTPIDLVRDLPRGFAALEPLVDLPIGINITRFQTLLALHRSYLTPGKLESGWTTGAAAYYVGYLQQRTFLLSYNQNGTITDAVDCSLDPLSETKCTLKSLTVEKGIYQTSNFRVQPTISIVRFPNITNLCPFGEVFNASKFASVYAWNRKRISNCVADYSVLYNSTSFSTFKCYGVSPTKLNDLCFTNVYADSFVVKGDEVRQIAPGQTGVIADYNYKLPDDFTGCVIAWNSVKQDALTGDNYGYLYRLFRKSKLKPFERDISTEIYQAGSTPCNGQVGLNCYYPLERYGFHPTTGVNYQPFRVVVLSFELLNGPATVCGPKLSTTLVKDKCVNFNFNGLTGTGVLTTSKKQFLPFQQFGRDISDTTDAVRDPQTLEILDITPCSFGGVSVITPGTNTSNQVAVLYQDVNCTEVPMAIHAEQLTPAWRVYSAGANVFQTRAGCLVGAEHVNNSYECDIPVGAGICASYHSMSSFRSVNQRSIIAYTMSLGAENSVAYSNNSIAIPTNFTISVTTEILPVSMTKTSVDCTMYICGDSIECSNLLLQYGSFCTQLNRALTGIAVEQDKNTQEVFAQVKQIYKTPPIKDFGGFNFSQILPDPSKPSKRSFIEDLLFNKVTLADAGFIKQYGDCLGDIAARDLICAQKFNGLTVLPPLLTDEMIAQYTSALLAGTITSGWTFGAGAALQIPFAMQMAYRFNGIGVTQNVLYENQKLIANQFNSAIGKIQDSLSSTASALGKLQDVVNQNAQALNTLVKQLSSNFGAISSVLNDILSRLDPPEAEVQIDRLITGRLQSLQTYVTQQLIRAAEIRASANLAATKMSECVLGQSKRVDFCGKGYHLMSFPQSAPHGVVFLHVTYVPAQEKNFTTAPAICHEGKAHFPREGVFVSNGTHWFITQRNFYEPQIITTDNTFVSGSCDVVIGIVNNTVYDPLQPELDSFKEELDKYFKNHTSPDVDLGDISGINASVVNIQKEIDRLNEVAKNLNESLIDLQELGKYEQYIKGGGSGGGQIYEGKLTAEGLRFGIVASRFNHALVDRLVEGAIDAIVRHGGREEDITLVRVPGSWEIPVAAGELARKEDIDAVIAIGVLIRGATPHFDYIASEVSKGLADLSLELRKPITFGVITADTLEQAIERAGTKHGNKGWEAALSAIEMANLFKSLR

SEQ ID NO: 3757 - protein, 1363 aa, Artificial Sequence
  SARS-CoV-2/pangolin/Guangxi/P1E/2017__EPI_ISL_410539 spike protein (1-1203)(K978P_V979P) LumSynth construct
MFVFLFVLPLVSSQCVNLTTRTGIQPGYTNSSTRGVYYPDKVFRSSILHLTQDLFLPFFSNVTWFNTINYQGGFKKFDNPVLPFNDGVYFASTEKSNIIRGWIFGTTLDARTQSLLIVNNATNVVIKVCEFQFCTDPFLGVYYHNNNKTWVENEFRVYSSANNCTFEYISQPFLMDLEGKQGNFKNLREFVFKNVDGYFKIYSKHTPIDLVRDLPRGFAALEPLVDLPIGINITRFQTLLALHRSYLTPGKLESGWTTGAAAYYVGYLQQRTFLLSYNQNGTITDAVDCSLDPLSETKCTLKSLTVEKGIYQTSNFRVQPTISIVRFPNITNLCPFGEVFNASKFASVYAWNRKRISNCVADYSVLYNSTSFSTFKCYGVSPTKLNDLCFTNVYADSFVVKGDEVRQIAPGQTGVIADYNYKLPDDFTGCVIAWNSVKQDALTGGNYLYRLFRKSKLKPFERDISTEIYQAGSTPCNGQVGLNCYYPLERYGFHPTTGVNYQPFRVVVLSFELLNGPATVCGPKLSTTLVKDKCVNFNFNGLTGTGVLTTSKKQFLPFQQFGRDISDTTDAVRDPQTLEILDITPCSFGGVSVITPGTNTSNQVAVLYQDVNCTEVPMAIHAEQLTPAWRVYSAGANVFQTRAGCLVGAEHVNNSYECDIPVGAGICASYHSMSSLRSVNQRSIIAYTMSLGAENSVAYSNNSIAIPTNFTISVTTEILPVSMTKTSVDCTMYICGDSIECSNLLLQYGSFCTQLNRALTGIAVEQDKNTQEVFAQVKQIYKTPPIKDFGGFNFSQILPDPSKPSKRSFIEDLLFNKVTLADAGFIKQYGDCLGDIAARDLICAQKFNGLTVLPPLLTDEMIAQYTSALLAGTITSGWTFGAGAALQIPFAMQMAYRFNGIGVTQNVLYENQKLIANQFNSAIGKIQDSLSSTASALGKLQDVVNQNAQALNTLVKQLSSNFGAISSVLNDILSRLDPPEAEVQIDRLITGRLQSLQTYVTQQLIRAAEIRASANLAATKMSECVLGQSKRVDFCGKGYHLMSFPQSAPHGVVFLHVTYVPAQEKNFTTAPAICHEGKAHFPREGVFVSNGTHWFITQRNFYEPQIITTDNTFVSGSCDVVIGIVNNTVYDPLQPELDSFKEELDKYFKNHTSPDVDLGDISGINASVVNIQKEIDRLNEVAKNLNESLIDLQELGKYEQYIKGGGSGGGQIYEGKLTAEGLRFGIVASRFNHALVDRLVEGAIDAIVRHGGREEDITLVRVPGSWEIPVAAGELARKEDIDAVIAIGVLIRGATPHFDYIASEVSKGLADLSLELRKPITFGVITADTLEQAIERAGTKHGNKGWEAALSAIEMANLFKSLR

SEQ ID NO: 3758 - protein, 1371 aa, Artificial Sequence
  SARS-CoV-2/Wuhan/WIV05/2019__EPI_ISL_402128 spike protein (1-1211)(K986P_V987P_T887W_A1020W) LumSynth construct
MFVFLVLLPLVSSQCVNLTTRTQLPPAYTNSFTRGVYYPDKVFRSSVLHSTQDLFLPFFSNVTWFHAIHVSGTNGTKRFDNPVLPFNDGVYFASTEKSNIIRGWIFGTTLDSKTQSLLIVNNATNVVIKVCEFQFCNDPFLGVYYHKNNKSWMESEFRVYSSANNCTFEYVSQPFLMDLEGKQGNFKNLREFVFKNIDGYFKIYSKHTPINLVRDLPQGFSALEPLVDLPIGINITRFQTLLALHRSYLTPGDSSSGWTAGAAAYYVGYLQPRTFLLKYNENGTITDAVDCALDPLSETKCTLKSFTVEKGIYQTSNFRVQPTESIVRFPNITNLCPFGEVFNATRFASVYAWNRKRISNCVADYSVLYNSASFSTFKCYGVSPTKLNDLCFTNVYADSFVIRGDEVRQIAPGQTGKIADYNYKLPDDFTGCVIAWNSNNLDSKVGGNYNYLYRLFRKSNLKPFERDISTEIYQAGSTPCNGVEGFNCYFPLQSYGFQPTNGVGYQPYRVVVLSFELLHAPATVCGPKKSTNLVKNKCVNFNFNGLTGTGVLTESNKKFLPFQQFGRDIADTTDAVRDPQTLEILDITPCSFGGVSVITPGTNTSNQVAVLYQDVNCTEVPVAIHADQLTPTWRVYSTGSNVFQTRAGCLIGAEHVNNSYECDIPIGAGICASYQTQTNSPRRARSVASQSIIAYTMSLGAENSVAYSNNSIAIPTNFTISVTTEILPVSMTKTSVDCTMYICGDSTECSNLLLQYGSFCTQLNRALTGIAVEQDKNTQEVFAQVKQIYKTPPIKDFGGFNFSQILPDPSKPSKRSFIEDLLFNKVTLADAGFIKQYGDCLGDIAARDLICAQKFNGLTVLPPLLTDEMIAQYTSALLAGTITSGWWFGAGAALQIPFAMQMAYRFNGIGVTQNVLYENQKLIANQFNSAIGKIQDSLSSTASALGKLQDVVNQNAQALNTLVKQLSSNFGAISSVLNDILSRLDPPEAEVQIDRLITGRLQSLQTYVTQQLIRAAEIRWSANLAATKMSECVLGQSKRVDFCGKGYHLMSFPQSAPHGVVFLHVTYVPAQEKNFTTAPAICHDGKAHFPREGVFVSNGTHWFVTQRNFYEPQIITTDNTFVSGNCDVVIGIVNNTVYDPLQPELDSFKEELDKYFKNHTSPDVDLGDISGINASVVNIQKEIDRLNEVAKNLNESLIDLQELGKYEQYIKGGGSGGGQIYEGKLTAEGLRFGIVASRFNHALVDRLVEGAIDAIVRHGGREEDITLVRVPGSWEIPVAAGELARKEDIDAVIAIGVLIRGATPHFDYIASEVSKGLADLSLELRKPITFGVITADTLEQAIERAGTKHGNKGWEAALSAIEMANLFKSLR

SEQ ID NO: 3759 - protein, 1367 aa, Artificial Sequence
  SARS-CoV-2/bat/Yunnan/RaTG13/2013__EPI_ISL_402131 spike protein (1-1207)(K982P_V983P_T883W_A1016W) LumSynth construct
MFVFLVLLPLVSSQCVNLTTRTQLPPAYTNSSTRGVYYPDKVFRSSVLHLTQDLFLPFFSNVTWFHAIHVSGTNGIKRFDNPVLPFNDGVYFASTEKSNIIRGWIFGTTLDSKTQSLLIVNNATNVVIKVCEFQFCNDPFLGVYYHKNNKSWMESEFRVYSSANNCTFEYVSQPFLMDLEGKQGNFKNLREFVFKNIDGYFKIYSKHTPINLVRDLPPGFSALEPLVDLPIGINITRFQTLLALHRSYLTPGDSSSGWTAGAAAYYVGYLQPRTFLLKYNENGTITDAVDCALDPLSETKCTLKSFTVEKGIYQTSNFRVQPTDSIVRFPNITNLCPFGEVFNATTFASVYAWNRKRISNCVADYSVLYNSTSFSTFKCYGVSPTKLNDLCFTNVYADSFVITGDEVRQIAPGQTGKIADYNYKLPDDFTGCVIAWNSKHIDAKEGGNFNYLYRLFRKANLKPFERDISTEIYQAGSKPCNGQTGLNCYYPLYRYGFYPTDGVGHQPYRVVVLSFELLNAPATVCGPKKSTNLVKNKCVNFNFNGLTGTGVLTESNKKFLPFQQFGRDIADTTDAVRDPQTLEILDITPCSFGGVSVITPGTNASNQVAVLYQDVNCTEVPVAIHADQLTPTWRVYSTGSNVFQTRAGCLIGAEHVNNSYECDIPIGAGICASYQTQTNSRSVASQSIIAYTMSLGAENSVAYSNNSIAIPTNFTISVTTEILPVSMTKTSVDCTMYICGDSTECSNLLLQYGSFCTQLNRALTGIAVEQDKNTQEVFAQVKQIYKTPPIKDFGGFNFSQILPDPSKPSKRSFIEDLLFNKVTLADAGFIKQYGDCLGDIAARDLICAQKFNGLTVLPPLLTDEMIAQYTSALLAGTITSGWWFGAGAALQIPFAMQMAYRFNGIGVTQNVLYENQKLIANQFNSAIGKIQDSLSSTASALGKLQDVVNQNAQALNTLVKQLSSNFGAISSVLNDILSRLDPPEAEVQIDRLITGRLQSLQTYVTQQLIRAAEIRWSANLAATKMSECVLGQSKRVDFCGKGYHLMSFPQSAPHGVVFLHVTYVPAQEKNFTTAPAICHDGKAHFPREGVFVSNGTHWFVTQRNFYEPQIITTDNTFVSGSCDVVIGIVNNTVYDPLQPELDSFKEELDKYFKNHTSPDVDLGDISGINASVVNIQKEIDRLNEVAKNLNESLIDLQELGKYEQYIKGGGSGGGQIYEGKLTAEGLRFGIVASRFNHALVDRLVEGAIDAIVRHGGREEDITLVRVPGSWEIPVAAGELARKEDIDAVIAIGVLIRGATPHFDYIASEVSKGLADLSLELRKPITFGVITADTLEQAIERAGTKHGNKGWEAALSAIEMANLFKSLR

SEQ ID NO: 3760 - protein, 1371 aa, Artificial Sequence
  SARS-CoV-2/Wuhan/HBCDC-HB-01/2019__EPI_ISL_402132 spike protein (1-1211)(K986P_V987P_T887W_A1020W) LumSynth construct
MFVFLVLLPLVSSQCVNLTTRTQLPPAYTNSITRGVYYPDKVFRSSVLHSTQDLFLPFFSNVTWFHAIHVSGTNGTKRFDNPVLPFNDGVYFASTEKSNIIRGWIFGTTLDSKTQSLLIVNNATNVVIKVCEFQFCNDPFLGVYYHKNNKSWMESEFRVYSSANNCTFEYVSQPFLMDLEGKQGNFKNLREFVFKNIDGYFKIYSKHTPINLVRDLPQGFSALEPLVDLPIGINITRFQTLLALHRSYLTPGDSSSGWTAGAAAYYVGYLQPRTFLLKYNENGTITDAVDCALDPLSETKCTLKSFTVEKGIYQTSNFRVQPTESIVRFPNITNLCPFGEVFNATRFASVYAWNRKRISNCVADYSVLYNSASFSTFKCYGVSPTKLNDLCFTNVYADSFVIRGDEVRQIAPGQTGKIADYNYKLPDDFTGCVIAWNSNNLDSKVGGNYNYLYRLFRKSNLKPFERDISTEIYQAGSTPCNGVEGFNCYFPLQSYGFQPTNGVGYQPYRVVVLSFELLHAPATVCGPKKSTNLVKNKCVNFNFNGLTGTGVLTESNKKFLPFQQFGRDIADTTDAVRDPQTLEILDITPCSFGGVSVITPGTNTSNQVAVLYQDVNCTEVPVAIHADQLTPTWRVYSTGSNVFQTRAGCLIGAEHVNNSYECDIPIGAGICASYQTQTNSPRRARSVASQSIIAYTMSLGAENSVAYSNNSIAIPTNFTISVTTEILPVSMTKTSVDCTMYICGDSTECSNLLLQYGSFCTQLNRALTGIAVEQDKNTQEVFAQVKQIYKTPPIKDFGGFNFSQILPDPSKPSKRSFIEDLLFNKVTLADAGFIKQYGDCLGDIAARDLICAQKFNGLTVLPPLLTDEMIAQYTSALLAGTITSGWWFGAGAALQIPFAMQMAYRFNGIGVTQNVLYENQKLIANQFNSAIGKIQDSLSSTASALGKLQDVVNQNAQALNTLVKQLSSNFGAISSVLNDILSRLDPPEAEVQIDRLITGRLQSLQTYVTQQLIRAAEIRWSANLAATKMSECVLGQSKRVDFCGKGYHLMSFPQSAPHGVVFLHVTYVPAQEKNFTTAPAICHDGKAHFPREGVFVSNGTHWFVTQRNFYEPQIITTDNTFVSGNCDVVIGIVNNTVYDPLQPELDSFKEELDKYFKNHTSPDVDLGDISGINASVVNIQKEIDRLNEVAKNLNESLIDLQELGKYEQYIKGGGSGGGQIYEGKLTAEGLRFGIVASRFNHALVDRLVEGAIDAIVRHGGREEDITLVRVPGSWEIPVAAGELARKEDIDAVIAIGVLIRGATPHFDYIASEVSKGLADLSLELRKPITFGVITADTLEQAIERAGTKHGNKGWEAALSAIEMANLFKSLR

SEQ ID NO: 3761 - protein, 1371 aa, Artificial Sequence
  SARS-CoV-2/Guangdong/20SF028/2020__EPI_ISL_403936 spike protein (1-1211)(K986P_V987P_T887W_A1020W) LumSynth construct
MFVFLVLLPLVSSQCVNLTTRTQLPPAYTNSFTRGVYYPDKVFRSSVLYSTQDLFLPFFSNVTWFHAIHVSGTNGTKRFDNPVLPFNDGVYFASTEKSNIIRGWIFGTTLDSKTQSLLIVNNATNVVIKVCEFQFCNDPFLGVYYHKNNKSWMESEFRVYSSANNCTFEYVSQPFLMDLEGKQGNFKNLREFVFKNIDGYFKIYSKHTPINLVRDLPQGFSALEPLVDLPIGINITRFQTLLALHRSYLTPGDSSSGWTAGAAAYYVGYLQPRTFLLKYNENGTITDAVDCALDPLSETKCTLKSFTVEKGIYQTSNFRVQPTESIVRFPNITNLCPFGEVFNATRFASVYAWNRKRISNCVADYSVLYNSASFSTFKCYGVSPTKLNDLCFTNVYADSFVIRGDEVRQIAPGQTGKIADYNYKLPDDFTGCVIAWNSNNLDSKVGGNYNYLYRLFRKSNLKPFERDISTEIYQAGSTPCNGVEGFNCYFPLQSYGFQPTNGVGYQPYRVVVLSFELLHAPATVCGPKKSTNLVKNKCVNFNFNGLTGTGVLTESNKKFLPFQQFGRDIADTTDAVRDPQTLEILDITPCSFGGVSVITPGTNTSNQVAVLYQDVNCTEVPVAIHADQLTPTWRVYSTGSNVFQTRAGCLIGAEHVNNSYECDIPIGAGICASYQTQTNSPRRARSVASQSIIAYTMSLGAENSVAYSNNSIAIPTNFTISVTTEILPVSMTKTSVDCTMYICGDSTECSNLLLQYGSFCTQLNRALTGIAVEQDKNTQEVFAQVKQIYKTPPIKDFGGFNFSQILPDPSKPSKRSFIEDLLFNKVTLADAGFIKQYGDCLGDIAARDLICAQKFNGLTVLPPLLTDEMIAQYTSALLAGTITSGWWFGAGAALQIPFAMQMAYRFNGIGVTQNVLYENQKLIANQFNSAIGKIQDSLSSTASALGKLQDVVNQNAQALNTLVKQLSSNFGAISSVLNDILSRLDPPEAEVQIDRLITGRLQSLQTYVTQQLIRAAEIRWSANLAATKMSECVLGQSKRVDFCGKGYHLMSFPQSAPHGVVFLHVTYVPAQEKNFTTAPAICHDGKAHFPREGVFVSNGTHWFVTQRNFYEPQIITTDNTFVSGNCDVVIGIVNNTVYDPLQPELDSFKEELDKYFKNHTSPDVDLGDISGINASVVNIQKEIDRLNEVAKNLNESLIDLQELGKYEQYIKGGGSGGGQIYEGKLTAEGLRFGIVASRFNHALVDRLVEGAIDAIVRHGGREEDITLVRVPGSWEIPVAAGELARKEDIDAVIAIGVLIRGATPHFDYIASEVSKGLADLSLELRKPITFGVITADTLEQAIERAGTKHGNKGWEAALSAIEMANLFKSLR

SEQ ID NO: 3762 - protein, 1371 aa, Artificial Sequence
  SARS-CoV-2/Shenzhen/SZTH-001/2020__EPI_ISL_406592 spike protein (1-1211)(K986P_V987P_T887W_A1020W) LumSynth construct
MFVFLVLLPLVSSQCVNLTTRTQLPPAYTNSFTRGVYYPDKVFRSSVLHSTQDLFLPFFSNVTWFHAIHVSGTNGTKRFDNPVLPFNDGVYFASTEKSNIIRGWIFGTTLDSKTQSLLIVNNATNVVIKVCEFQFCNDPFLGVYYHKNNKSWMESEFRVYSSANNCTFEYVSQPFLMDLEGKQGNFKNLREFVFKNIDGYFKIYSKHTPINLVRDLPQGFSALEPLVDLPIGINITRFQTLLALHRSYLTPGDSSSGWTAGAAAYYVGYLQPRTFLLKYNENGTITDAVDCALDPLSETKCTLKSFTVEKGIYQTSNFRVQPTESIVRFPNITNLCPFGEVFNATRFASVYAWNRKRISNCVADYSVLYNSASFSTFKCYGVSPTKLNDLCFTNVYADSFVIRGDEVRQIAPGQTGKIADYNYKLPDDFTGCVIAWNSNNLDSKVGGNYNYLYRLFRKSNLKPFERDISTEIYQAGSTPCNGVEGFNCYFPLQSYGFQPTNGVGYQPYRVVVLSFELLHAPATVCGPKKSTNLVKNKCVNFNFNGLTGTGVLTESNKKFLPFQQFGRDIADTTDAVRDPQTLEILDITPCSFGGVSVITPGTNTSNQVAVLYQDVNCTEVPVAIHADQLTPTWRVYSTGSNVFQTRAGCLIGAEHVNNSYECDIPIGAGICASYQTQTNSPRRARSVASQSIIAYTMSLGAENSVAYSNNSIAIPTNFTISVTTEILPVSMTKTSVDCTMYICGDSTECSNLLLQYGSFCTQLNRALTGIAVEQDKNTQEVFAQVKQIYKTPPIKDFGGFNFSQILPDPSKPSKRSFIEDLLFNKVTLADAGFIKQYGDCLGDIAARDLICAQKFNGLTVLPPLLTDEMIAQYTSALLAGTITSGWWFGAGAALQIPFAMQMAYRFNGIGVTQNVLYENQKLIANQFNSAIGKIQDSLSSTASALGKLQDVVNQNAQALNTLVKQLSSNFGAISSVLNDILSRLDPPEAEVQIDRLITGRLQSLQTYVTQQLIRAAEIRWSANLAATKMSECVLGQSKRVDFCGKGYHLMSFPQSAPHGVVFLHVTYVPAQEKNFTTAPAICHDGKAHFPREGVFVSNGTHWFVTQRNFYEPQIITTDNTFVSGNCDVLIGIVNNTVYDPLQPELDSFKEELDKYFKNHTSPDVDLGDISGINASVVNIQKEIDRLNEVAKNLNESLIDLQELGKYEQYIKGGGSGGGQIYEGKLTAEGLRFGIVASRFNHALVDRLVEGAIDAIVRHGGREEDITLVRVPGSWEIPVAAGELARKEDIDAVIAIGVLIRGATPHFDYIASEVSKGLADLSLELRKPITFGVITADTLEQAIERAGTKHGNKGWEAALSAIEMANLFKSLR

SEQ ID NO: 3763 - protein, 1371 aa, Artificial Sequence
  SARS-CoV-2/Shenzhen/SZTH-004/2020__EPI_ISL_406595 spike protein (1-1211)(K986P_V987P_T887W_A1020W) LumSynth construct
MFVFLVLLPLVSSQCVNLTTRTQLPPAYTNSFTRGVYYPDKVFRSSVLHSTQDLFLPFFSNVTWFHAIHVSGTNGTKRFDNPVLPFNDGVYFASTEKSNIIRGWIFGTTLDSKTQSLLIVNNATNVVIKVCEFQFCNDPFLGVYYHKNNKSWMESEFRVYSSANNCTFEYVSQPFLMDLEGKQGNFKNLREFVFKNIDGYFKIYSKHTPINLVRDLPQGFSALEPLVDLPIGINITRFQTLLALHRSYLTPGDSSSGWTAGAAAYYVGYLQPRTFLLKYNENGTITDAVDCALDPLSETKCTLKSFTVEKGIYQTSNFRVQPTESIVRFPNITNLCPFGEVFNATRFASVYAWDRKRISNCVAYYSVLYNSASFSTFKCYGVSPTKLNDLCFTNVYADSFVIRGDEVRQIAPGQTGKIADYNYKLPDDFTGCVIAWNSNNLDSKVGGNYNYLYRLFRKSNLKPFERDISTEIYQAGSTPCNGVEGFNCYFPLQSYGFQPTNGVGYQPYRVVVLSFELLHAPATVCGPKKSTNLVKNKCVNFNFNGLTGTGVLTESNKKFLPFQQFGRDIADTTDAVRDPQTLEILDITPCSFGGVSVITPGTNTSNQVAVLYQDVNCTEVPVAIHADQLTPTWRVYSTGSNVFQTRAGCLIGAEHVNNSYECDIPIGAGICASYQTQTNSPRRARSVASQSIIAYTMSLGAENSVAYSNNSIAIPTNFTISVTTEILPVSMTKTSVDCTMYICGDSTECSNLLLQYGSFCTQLNRALTGIAVEQDKNTQEVFAQVKQIYKTPPIKDFGGFNFSQILPDPSKPSKRSFIEDLLFNKVTLADAGFIKQYGDCLGDIAARDLICAQKFNGLTVLPPLLTDEMIAQYTSALLAGTITSGWWFGAGAALQIPFAMQMAYRFNGIGVTQNVLYENQKLIANQFNSAIGKIQDSLSSTASALGKLQDVVNQNAQALNTLVKQLSSNFGAISSVLNDILSRLDPPEAEVQIDRLITGRLQSLQTYVTQQLIRAAEIRWSANLAATKMSECVLGQSKRVDFCGKGYHLMSFPQSAPHGVVFLHVTYVPAQEKNFTTAPAICHDGKAHFPREGVFVSNGTHWFVTQRNFYEPQIITTDNTFVSGNCDVVIGIVNNTVYDPLQPELDSFKEELDKYFKNHTSPDVDLGDISGINASVVNIQKEIDRLNEVAKNLNESLIDLQELGKYEQYIKGGGSGGGQIYEGKLTAEGLRFGIVASRFNHALVDRLVEGAIDAIVRHGGREEDITLVRVPGSWEIPVAAGELARKEDIDAVIAIGVLIRGATPHFDYIASEVSKGLADLSLELRKPITFGVITADTLEQAIERAGTKHGNKGWEAALSAIEMANLFKSLR

SEQ ID NO: 3764 - protein, 1371 aa, Artificial Sequence
  SARS-CoV-2/France/IDF0372/2020__EPI_ISL_406596 spike protein (1-1211)(K986P_V987P_T887W_A1020W) LumSynth construct
MFVFLVLLPLVSSQCVNLTTRTQLPPAYTNSFTRGVYYPDKVFRSSVLHSTQDLFLPFFSNVTWFHAIHVSGTNGTKRFDNPVLPFNDGVYFASTEKSNIIRGWIFGTTLDSKTQSLLIVNNATNVVIKVCEFQFCNDPFLGVYYHKNNKSWMESEFRVYSSANNCTFEYVSQPFLMDLEGKQGNFKNLREFVFKNIDGYFKIYSKHTPINLVRDLPQGFSALEPLVDLPIGINITRFQTLLALHRSYLTPGDSSSGWTAGAAAYYVGYLQPRTFLLKYNENGTITDAVDCALDPLSETKCTLKSFTVEKGIYQTSNFRVQPTESIVRFPNITNLCPFGEVFNATRFASVYAWNRKRISNCVADYSFLYNSASFSTFKCYGVSPTKLNDLCFTNVYADSFVIRGDEVRQIAPGQTGKIADYNYKLPDDFTGCVIAWNSNNLDSKVGGNYNYLYRLFRKSNLKPFERDISTEIYQAGSTPCNGVEGFNCYFPLQSYGFQPTNGVGYQPYRVVVLSFELLHAPATVCGPKKSTNLVKNKCVNFNFNGLTGTGVLTESNKKFLPFQQFGRDIADTTDAVRDPQTLEILDITPCSFGGVSVITPGTNTSNQVAVLYQDVNCTEVPVAIHADQLTPTWRVYSTGSNVFQTRAGCLIGAEHVNNSYECDIPIGAGICASYQTQTNSPRRARSVASQSIIAYTMSLGAENSVAYSNNSIAIPTNFTISVTTEILPVSMTKTSVDCTMYICGDSTECSNLLLQYGSFCTQLNRALTGIAVEQDKNTQEVFAQVKQIYKTPPIKDFGGFNFSQILPDPSKPSKRSFIEDLLFNKVTLADAGFIKQYGDCLGDIAARDLICAQKFNGLTVLPPLLTDEMIAQYTSALLAGTITSGWWFGAGAALQIPFAMQMAYRFNGIGVTQNVLYENQKLIANQFNSAIGKIQDSLSSTASALGKLQDVVNQNAQALNTLVKQLSSNFGAISSVLNDILSRLDPPEAEVQIDRLITGRLQSLQTYVTQQLIRAAEIRWSANLAATKMSECVLGQSKRVDFCGKGYHLMSFPQSAPHGVVFLHVTYVPAQEKNFTTAPAICHDGKAHFPREGVFVSNGTHWFVTQRNFYEPQIITTDNTFVSGNCDVVIGIVNNTVYDPLQPELDSFKEELDKYFKNHTSPDVDLGDISGINASVVNIQKEIDRLNEVAKNLNESLIDLQELGKYEQYIKGGGSGGGQIYEGKLTAEGLRFGIVASRFNHALVDRLVEGAIDAIVRHGGREEDITLVRVPGSWEIPVAAGELARKEDIDAVIAIGVLIRGATPHFDYIASEVSKGLADLSLELRKPITFGVITADTLEQAIERAGTKHGNKGWEAALSAIEMANLFKSLR

SEQ ID NO: 3765 - protein, 1371 aa, Artificial Sequence
  SARS-CoV-2/Australia/VIC01/2020__EPI_ISL_406844 spike protein (1-1211)(K986P_V987P_T887W_A1020W) LumSynth construct
MFVFLVLLPLVSSQCVNLTTRTQLPPAYTNSFTRGVYYPDKVFRSSVLHSTQDLFLPFFSNVTWFHAIHVSGTNGTKRFDNPVLPFNDGVYFASTEKSNIIRGWIFGTTLDSKTQSLLIVNNATNVVIKVCEFQFCNDPFLGVYYHKNNKSWMESEFRVYSSANNCTFEYVSQPFLMDLEGKQGNFKNLREFVFKNIDGYFKIYSKHTPINLVRDLPQGFSALEPLVDLPIGINITRFQTLLALHRRYLTPGDSSSGWTAGAAAYYVGYLQPRTFLLKYNENGTITDAVDCALDPLSETKCTLKSFTVEKGIYQTSNFRVQPTESIVRFPNITNLCPFGEVFNATRFASVYAWNRKRISNCVADYSVLYNSASFSTFKCYGVSPTKLNDLCFTNVYADSFVIRGDEVRQIAPGQTGKIADYNYKLPDDFTGCVIAWNSNNLDSKVGGNYNYLYRLFRKSNLKPFERDISTEIYQAGSTPCNGVEGFNCYFPLQSYGFQPTNGVGYQPYRVVVLSFELLHAPATVCGPKKSTNLVKNKCVNFNFNGLTGTGVLTESNKKFLPFQQFGRDIADTTDAVRDPQTLEILDITPCSFGGVSVITPGTNTSNQVAVLYQDVNCTEVPVAIHADQLTPTWRVYSTGSNVFQTRAGCLIGAEHVNNSYECDIPIGAGICASYQTQTNSPRRARSVASQSIIAYTMSLGAENSVAYSNNSIAIPTNFTISVTTEILPVSMTKTSVDCTMYICGDSTECSNLLLQYGSFCTQLNRALTGIAVEQDKNTQEVFAQVKQIYKTPPIKDFGGFNFSQILPDPSKPSKRSFIEDLLFNKVTLADAGFIKQYGDCLGDIAARDLICAQKFNGLTVLPPLLTDEMIAQYTSALLAGTITSGWWFGAGAALQIPFAMQMAYRFNGIGVTQNVLYENQKLIANQFNSAIGKIQDSLSSTASALGKLQDVVNQNAQALNTLVKQLSSNFGAISSVLNDILSRLDPPEAEVQIDRLITGRLQSLQTYVTQQLIRAAEIRWSANLAATKMSECVLGQSKRVDFCGKGYHLMSFPQSAPHGVVFLHVTYVPAQEKNFTTAPAICHDGKAHFPREGVFVSNGTHWFVTQRNFYEPQIITTDNTFVSGNCDVVIGIVNNTVYDPLQPELDSFKEELDKYFKNHTSPDVDLGDISGINASVVNIQKEIDRLNEVAKNLNESLIDLQELGKYEQYIKGGGSGGGQIYEGKLTAEGLRFGIVASRFNHALVDRLVEGAIDAIVRHGGREEDITLVRVPGSWEIPVAAGELARKEDIDAVIAIGVLIRGATPHFDYIASEVSKGLADLSLELRKPITFGVITADTLEQAIERAGTKHGNKGWEAALSAIEMANLFKSLR

SEQ ID NO: 3766 - protein, 1371 aa, Artificial Sequence
  SARS-CoV-2/Germany/BavPat1/2020__EPI_ISL_406862 spike protein (1-1211)(K986P_V987P_T887W_A1020W) LumSynth construct
MFVFLVLLPLVSSQCVNLTTRTQLPPAYTNSFTRGVYYPDKVFRSSVLHSTQDLFLPFFSNVTWFHAIHVSGTNGTKRFDNPVLPFNDGVYFASTEKSNIIRGWIFGTTLDSKTQSLLIVNNATNVVIKVCEFQFCNDPFLGVYYHKNNKSWMESEFRVYSSANNCTFEYVSQPFLMDLEGKQGNFKNLREFVFKNIDGYFKIYSKHTPINLVRDLPQGFSALEPLVDLPIGINITRFQTLLALHRSYLTPGDSSSGWTAGAAAYYVGYLQPRTFLLKYNENGTITDAVDCALDPLSETKCTLKSFTVEKGIYQTSNFRVQPTESIVRFPNITNLCPFGEVFNATRFASVYAWNRKRISNCVADYSVLYNSASFSTFKCYGVSPTKLNDLCFTNVYADSFVIRGDEVRQIAPGQTGKIADYNYKLPDDFTGCVIAWNSNNLDSKVGGNYNYLYRLFRKSNLKPFERDISTEIYQAGSTPCNGVEGFNCYFPLQSYGFQPTNGVGYQPYRVVVLSFELLHAPATVCGPKKSTNLVKNKCVNFNFNGLTGTGVLTESNKKFLPFQQFGRDIADTTDAVRDPQTLEILDITPCSFGGVSVITPGTNTSNQVAVLYQGVNCTEVPVAIHADQLTPTWRVYSTGSNVFQTRAGCLIGAEHVNNSYECDIPIGAGICASYQTQTNSPRRARSVASQSIIAYTMSLGAENSVAYSNNSIAIPTNFTISVTTEILPVSMTKTSVDCTMYICGDSTECSNLLLQYGSFCTQLNRALTGIAVEQDKNTQEVFAQVKQIYKTPPIKDFGGFNFSQILPDPSKPSKRSFIEDLLFNKVTLADAGFIKQYGDCLGDIAARDLICAQKFNGLTVLPPLLTDEMIAQYTSALLAGTITSGWWFGAGAALQIPFAMQMAYRFNGIGVTQNVLYENQKLIANQFNSAIGKIQDSLSSTASALGKLQDVVNQNAQALNTLVKQLSSNFGAISSVLNDILSRLDPPEAEVQIDRLITGRLQSLQTYVTQQLIRAAEIRWSANLAATKMSECVLGQSKRVDFCGKGYHLMSFPQSAPHGVVFLHVTYVPAQEKNFTTAPAICHDGKAHFPREGVFVSNGTHWFVTQRNFYEPQIITTDNTFVSGNCDVVIGIVNNTVYDPLQPELDSFKEELDKYFKNHTSPDVDLGDISGINASVVNIQKEIDRLNEVAKNLNESLIDLQELGKYEQYIKGGGSGGGQIYEGKLTAEGLRFGIVASRFNHALVDRLVEGAIDAIVRHGGREEDITLVRVPGSWEIPVAAGELARKEDIDAVIAIGVLIRGATPHFDYIASEVSKGLADLSLELRKPITFGVITADTLEQAIERAGTKHGNKGWEAALSAIEMANLFKSLR

SEQ ID NO: 3767 - protein, 1371 aa, Artificial Sequence
  SARS-CoV-2/Wuhan/HBCDC-HB-02/2020__EPI_ISL_412978 spike protein (1-1211)(K986P_V987P_T887W_A1020W) LumSynth construct
MFVFLVLLPLVSSQCVNLTTRTQLPPAYTNSFTRGVYYPDKVFRSSVLHSTQDLFLPFFSNVTWFHAIHVSGTNGTKRFDNPVLPFNDGVYFASTEKSNIIRGWIFGTTLDSKTQSLLIVNNATNVVIKVCEFQFCNDPFLGVYYHKNNKSWMESEFRVYSSANNCTFEYVSQPFLMDLEGKQGNFKNLREFVFKNIDGYFKIYSKHTPINLVRDLPQGFSALEPLVDLPIGINITRFQTLLALHRSYLTPGDSSSGWTAGAAAYYVGYLQPRTFLLKYNENGTITDAVDCALDPLSETKCTLKSFTVEKGIYQTSNFRVQPTESIVRFPNITNLCPFGEVFNATRFASVYAWNRKRISNCVADYSVLYNSASFSTFKCYGVSPTKLNDLCFTNVYADSFVIRGDEVRQIAPGQTGKIADYNYKLPDDFTGCVIAWNSNNLDSKVGGNYNYLYRLFRKSNLKPFERDISTEIYQAGSTPCNGVEGFNCYFPLQSYGFQPTNGVGYQPYRVVVLSFELLHAPATVCGPKKSTNLVKNKCVNFNFNGLTGTGVLTESNKKFLPFQQFGRDIADTTDAVRDPQTLEILDITPCSFGGVSVITPGTNTSNQVAVLYQDVNCTEVPVAIHADQLTPTWRVYSTGSNVFQTRAGCLIGAEHVNNSYECDIPIGAGICASYQTQTNSPRRARSVASQSIIAYTMSLGAENSVAYSNNSIAIPTNFTISVTTEILPVSMTKTSVDCTMYICGDSTECSNFLLQYGSFCTQLNRALTGIAVEQDKNTQEVFAQVKQIYKTPPIKDFGGFNFSQILPDPSKPSKRSFIEDLLFNKVTLADAGFIKQYGDCLGDIAARDLICAQKFNGLTVLPPLLTDEMIAQYTSALLAGTITSGWWFGAGAALQIPFAMQMAYRFNGIGVTQNVLYENQKLIANQFNSAIGKIQDSLSSTASALGKLQDVVNQNAQALNTLVKQLSSNFGAISSVLNDILSRLDPPEAEVQIDRLITGRLQSLQTYVTQQLIRAAEIRWSANLAATKMSECVLGQSKRVDFCGKGYHLMSFPQSAPHGVVFLHVTYVPAQEKNFTTAPAICHDGKAHFPREGVFVSNGTHWFVTQRNFYEPQIITTDNTFVSGNCDVVIGIVNNTVYDPLQPELDSFKEELDKYFKNHTSPDVDLGDISGINASVVNIQKEIDRLNEVAKNLNESLIDLQELGKYEQYIKGGGSGGGQIYEGKLTAEGLRFGIVASRFNHALVDRLVEGAIDAIVRHGGREEDITLVRVPGSWEIPVAAGELARKEDIDAVIAIGVLIRGATPHFDYIASEVSKGLADLSLELRKPITFGVITADTLEQAIERAGTKHGNKGWEAALSAIEMANLFKSLR

SEQ ID NO: 3768 - protein, 1371 aa, Artificial Sequence
  SARS-CoV-2/Australia/QLD02/2020__EPI_ISL_407896 spike protein (1-1211)(K986P_V987P_T887W_A1020W) LumSynth construct
MFVFLVLLPLVSSQCVNLTTRTQLPPAYTNSFTRGVYYPDKVFRSSVLHSTQDLFLPFFSNVTWFHAIHVSGTNGTKRFDNPVLPFNDGVYFASTEKSNIIRGWIFGTTLDSKTQSLLIVNNATNVVIKVCEFQFCNDPFLGVYYHKNNKSWMESEFRVYSSANNCTFEYVSQPFLMDLEGKQGNFKNLREFVFKNIDGYFKIYSKHTPINLVRDLPQGFSALEPLVDLPIGINITRFQTLLALHRSYLTPGDSSSGWTAGAAAYYVGYLQPRTFLLKYNENGTITDAVDCALDPLSETKCTLKSFTVEKGIYQTSNFRVQPTESIVRFPNITNLCPFGEVFNATRFASVYAWNRKRISNCVADYSVLYNSASFSTFKCYGVSPTKLNDLCFTNVYADSFVIRGDEVRQIAPGQTGKIADYNYKLPDDFTGCVIAWNSNNLDSKVGGNYNYLYRLFRKSNLKPFERDISTEIYQAGSTPCNGVEGFNCYFPLQSYGFQPTNGVGYQPYRVVVLSFELLHAPATVCGPKKSTNLVKNKCVNFNFNGLTGTGVLTESNKKFLPFQQFGRDIADTTDAVRDPQTLEILDITPCSFGGVSVITPGTNTSNQVAVLYQDVNCTEVPVAIHADQLTPTWRVYSTGSNVFQTRAGCLIGAEHVNNSYECDIPIGAGICASYQTQTNSPRRARSVASQSIIAYTMSLGAENSVAYSNNSIAIPTNFTISVTTEILPVSMTKTSVDCTMYICGDSTECSNLLLQYGSFCTQLNRALTGIAVEQDKNTQEVFAQVKQIYKTPPIKDFGGFNFSQILPDPSKPSKRSFIEDLLFNKVTLADAGFIKQYGDCLGDIAARDLICAQKFNGLTVLPPLLTDEMIAQYTSALLAGTITSGWWFGAGAALQIPFAMQMAYRFNGIGVTQNVLYENQKLIANQFNSAIGKIQDSLSSTASALGKLQDVVNQNAQALNTLVKQLSSNFGAISSVLNDILSRLDPPEAEVQIDRLITGRLQSLQTYVTQQLIRAAEIRWSANLAATKMSECVLGQSKRVDFCGKGYHLMSFPQSAPHGVVFLHVTYVPAQEKNFTTAPAICHDGKAHFPREGVFVSNGTHWFVTQRNFYEPQIITTDNTFVSGNCDVVIGIVNNTVYDPLQLELDSFKEELDKYFKNHTSPDVDLGDISGINASVVNIQKEIDRLNEVAKNLNESLIDLQELGKYEQYIKGGGSGGGQIYEGKLTAEGLRFGIVASRFNHALVDRLVEGAIDAIVRHGGREEDITLVRVPGSWEIPVAAGELARKEDIDAVIAIGVLIRGATPHFDYIASEVSKGLADLSLELRKPITFGVITADTLEQAIERAGTKHGNKGWEAALSAIEMANLFKSLR

SEQ ID NO: 3769 - protein, 1371 aa, Artificial Sequence
  SARS-CoV-2/India/1-31/2020__EPI_ISL_413523 spike protein (1-1211)(K986P_V987P_T887W_A1020W) LumSynth construct
MFVFLVLLPLVSSQCVNLTTRTQLPPAYTNSFTRGVYYPDKVFRSSVLHSTQDLFLPFFSNVTWFHAIHVSGTNGTKRFDNPVLPFNDGVYFASTEKSNIIRGWIFGTTLDSKTQSLLIVNNATNVVIKVCEFQFCNDPFLGVYYHKNNKSWMESEFRVYSSANNCTFEYVSQPFLMDLEGKQGNFKNLREFVFKNIDGYFKIYSKHTPINLVRDLPQGFSALEPLVDLPIGINITRFQTLLALHRSYLTPGDSSSGWTAGAAAYYVGYLQPRTFLLKYNENGTITDAVDCALDPLSETKCTLKSFTVEKGIYQTSNFRVQPTESIVRFPNITNLCPFGEVFNATRFASVYAWNRKRISNCVADYSVLYNSASFSTFKCYGVSPTKLNDLCFTNVYADSFVIRGDEVRQIAPGQTGKIADYNYKLPDDFTGCVIAWNSNNLDSKVGGNYNYLYRLFRKSNLKPFERDISTEIYQAGSTPCNGVEGFNCYFPLQSYGFQPTNGVGYQPYRVVVLSFELLHAPATVCGPKKSTNLVKNKCVNFNFNGLTGTGVLTESNKKFLPFQQFGRDIADTTDAVRDPQTLEILDITPCSFGGVSVITPGTNTSNQVAVLYQDVNCTEVPVAIHADQLTPTWRVYSTGSNVFQTRAGCLIGAEHVNNSYECDIPIGAGICASYQTQTNSPRRARSVASQSIIAYTMSLGAENSVAYSNNSIAIPTNFTISVTTEILPVSMTKTSVDCTMYICGDSTECSNLLLQYGSFCTQLNRALTGIAVEQDKNTQEVFAQVKQIYKTPPIKDFGGFNFSQILPDPSKPSKRSFIEDLLFNKVTLADAGFIKQYGDCLGDIAARDLICAQKFNGLTVLPPLLTDEMIAQYTSALLAGTITSGWWFGAGAALQIPFAMQMAYRFNGIGVTQNVLYENQKLIANQFNSVIGKIQDSLSSTASALGKLQDVVNQNAQALNTLVKQLSSNFGAISSVLNDILSRLDPPEAEVQIDRLITGRLQSLQTYVTQQLIRAAEIRWSANLAATKMSECVLGQSKRVDFCGKGYHLMSFPQSAPHGVVFLHVTYVPAQEKNFTTAPAICHDGKAHFPREGVFVSNGTHWFVTQRNFYEPQIITTDNTFVSGNCDVVIGIVNNTVYDPLQPELDSFKEELDKYFKNHTSPDVDLGDISGINASVVNIQKEIDRLNEVAKNLNESLIDLQELGKYEQYIKGGGSGGGQIYEGKLTAEGLRFGIVASRFNHALVDRLVEGAIDAIVRHGGREEDITLVRVPGSWEIPVAAGELARKEDIDAVIAIGVLIRGATPHFDYIASEVSKGLADLSLELRKPITFGVITADTLEQAIERAGTKHGNKGWEAALSAIEMANLFKSLR

SEQ ID NO: 3770 - protein, 1371 aa, Artificial Sequence
  SARS-CoV-2/Guangdong/GD2020087-P0008/2020__EPI_ISL_413863 spike protein (1-1211)(K986P_V987P_T887W_A1020W) LumSynth construct
MFVFLVLLPLVSSQCVNLTTRTQLPPAYTNSFTRGVYYPDKVFRSSVLHSTQDLFLPFFSNVTWFHAIHVSGTNGTKRFDNPVLPFNDGVYFASTEKSNIIRGWIFGTTLDSKTQSLLIVNNATNVVIKVCEFQFCNDPFLGVYYHKNNKSWMESEFRVYSSANNCTFEYVSQPFLMDLEGKQGNFKNLREFVFKNIDGYFKIYSKHTPINLVRDLPQGFSALEPLVDLPIGINITRFQTLLALHRSYLTPGDSSSGWTAGAAAYYVGYLQPRTFLLKYNENGTITDAVDCALDPLSETKCTLKSFTVEKGIYQTSNFRVQPTESIVRFPNITNLCPFGEVFNATRFASVYAWNRKRISNCVADYSVLYNSASFSTFKCYGVSPTKLNDLCFTNVYADSFVIRGDEVREIAPGQTGKIADYNYKLPDDFTGCVIAWNSNNLDSKVGGNYNYLYRLFRKSNLKPFERDISTEIYQAGSTPCNGVEGFNCYFPLQSYGFQPTNGVGYQPYRVVVLSFELLHAPATVCGPKKSTNLVKNKCVNFNFNGLTGTGVLTESNKKFLPFQQFGRDIADTTDAVRDPQTLEILDITPCSFGGVSVITPGTNTSNQVAVLYQDVNCTEVPVAIHADQLTPTWRVYSTGSNVFQTRAGCLIGAEHVNNSYECDIPIGAGICASYQTQTNSPRRARSVASQSIIAYTMSLGAENSVAYSNNSIAIPTNFTISVTTEILPVSMTKTSVDCTMYICGDSTECSNLLLQYGSFCTQLNRALTGIAVEQDKNTQEVFAQVKQIYKTPPIKDFGGFNFSQILPDPSKPSKRSFIEDLLFNKVTLADAGFIKQYGDCLGDIAARDLICAQKFNGLTVLPPLLTDEMIAQYTSALLAGTITSGWWFGAGAALQIPFAMQMAYRFNGIGVTQNVLYENQKLIANQFNSAIGKIQDSLSSTASALGKLQDVVNQNAQALNTLVKQLSSNFGAISSVLNDILSRLDPPEAEVQIDRLITGRLQSLQTYVTQQLIRAAEIRWSANLAATKMSECVLGQSKRVDFCGKGYHLMSFPQSAPHGVVFLHVTYVPAQEKNFTTAPAICHDGKAHFPREGVFVSNGTHWFVTQRNFYEPQIITTDNTFVSGNCDVVIGIVNNTVYDPLQPELDSFKEELDKYFKNHTSPDVDLGDISGINASVVNIQKEIDRLNEVAKNLNESLIDLQELGKYEQYIKGGGSGGGQIYEGKLTAEGLRFGIVASRFNHALVDRLVEGAIDAIVRHGGREEDITLVRVPGSWEIPVAAGELARKEDIDAVIAIGVLIRGATPHFDYIASEVSKGLADLSLELRKPITFGVITADTLEQAIERAGTKHGNKGWEAALSAIEMANLFKSLR

SEQ ID NO: 3771 - protein, 1371 aa, Artificial Sequence
  SARS-CoV-2/Sweden/01/2020__EPI_ISL_411951 spike protein (1-1211)(K986P_V987P_T887W_A1020W) LumSynth construct
MFVFLVLLPLVSSQCVNLTTRTQLPPAYTNSFTRGVYYPDKVFRSSVLHSTQDLFLPFFSNVTWFHAIHVSGTNGTKRFDNPVLPFNDGVYFASTEKSNIIRGWIFGTTLDSKTQSLLIVNNATNVVIKVCEFQFCNDPFLGVYYHKNNKSWMESEFRVYSSANNCTFEYVSQPFLMDLEGKQGNFKNLREFVFKNIDGYFKIYSKHTPINLVRDLPQGFSALEPLVDLPIGINITRFQTLLALHRSYLTPGDSSSGWTAGAAAYYVGYLQPRTFLLKYNENGTITDAVDCALDPLSETKCTLKSFTVEKGIYQTSNFRVQPTESIVRFPNITNLCPFGEVFNATRFASVYAWNRKRISNCVADYSVLYNSASFSTFKCYGVSPTKLNDLCFTNVYADSFVIRGDEVRQIAPGQTGKIADYNYKLPDDFTGCVIAWNSNNLDSKVGGNYNYLYRLFRKSNLKPFERDISTEIYQAGSTPCNGVEGFNCYFPLQSYGFQPTNGVGYQPYRVVVLSFELLHAPATVCGPKKSTNLVKNKCVNFNFNGLTGTGVLTESNKKFLPFQQFGRDIADTTDAVRDPQTLEILDITPCSFGGVSVITPGTNTSNQVAVLYQDVNCTEVPVAIHADQLTPTWRVYSTGSNVFQTRAGCLIGAEHVNNSYECDIPIGAGICASYQTQTNSPRRARSVASQSIIAYTMSLGAENSVAYSNNSIAIPTNFTISVTTEILPVSMTKTSVDCTMYICGDSTECSNLLLQYGSFCTQLNRALTGIAVEQDKNTQEVFAQVKQIYKTPPIKDCGGFNFSQILPDPSKPSKRSFIEDLLFNKVTLADAGFIKQYGDCLGDIAARDLICAQKFNGLTVLPPLLTDEMIAQYTSALLAGTITSGWWFGAGAALQIPFAMQMAYRFNGIGVTQNVLYENQKLIANQFNSAIGKIQDSLSSTASALGKLQDVVNQNAQALNTLVKQLSSNFGAISSVLNDILSRLDPPEAEVQIDRLITGRLQSLQTYVTQQLIRAAEIRWSANLAATKMSECVLGQSKRVDFCGKGYHLMSFPQSAPHGVVFLHVTYVPAQEKNFTTAPAICHDGKAHFPREGVFVSNGTHWFVTQRNFYEPQIITTDNTFVSGNCDVVIGIVNNTVYDPLQPELDSFKEELDKYFKNHTSPDVDLGDISGINASVVNIQKEIDRLNEVAKNLNESLIDLQELGKYEQYIKGGGSGGGQIYEGKLTAEGLRFGIVASRFNHALVDRLVEGAIDAIVRHGGREEDITLVRVPGSWEIPVAAGELARKEDIDAVIAIGVLIRGATPHFDYIASEVSKGLADLSLELRKPITFGVITADTLEQAIERAGTKHGNKGWEAALSAIEMANLFKSLR

SEQ ID NO: 3772 - protein, 1371 aa, Artificial Sequence
  SARS-CoV-2/Tianmen/HBCDC-HB-07/2020__EPI_ISL_412983 spike protein (1-1211)(K986P_V987P_T887W_A1020W) LumSynth construct
MFVFLVLLPLVSSQCVNLTTRTQLPPAYTNSFTRGVYYPDKVFRSSVLHSTQDLFLPFFSNVTWFHAIHVSGTNGTKRFDNPVLPFNDGVYFASTEKSNIIRGWIFGTTLDSKTQSLLIVNNATNVVIKVCEFQFCNDPFLGVYYHKNNKSWMESEFRVYSSANNCTFEYVSQPFLMDLEGKQGNFKNLREFVFKNIDGYFKIYSKHTPINLVRDLPQGFSALEPLVDLPIGINITRFQTLLALHRSYLTPGDSSSGWTAGAAAYYVGYLQPRTFLLKYNENGTITDAVDCALDPLSETKCTLKSFTVEKGIYQTSNFRVQPTESIVRFPNITNLCPFGEVFNATRFASVYAWNRKRISNCVADYSVLYNSASFSTFKCYGVSPTKLNDLCFTNVYADSFVIRGDEVRQIAPGQTGKIADYNYKLPDDFTGCVIAWNSNNLDSKVGGNYNYLYRLFRKSNLKPFERDISTEIYQAGSTPCNGVEGFNCYFPLQSYGFQPTNGVGYQPYRVVVLSFELLHAPATVCGPKKSTNLVKNKCVNFNFNGLTGTGVLTESNKKFLPFQQFGRDIADTTDAVRDPQTLEILDITPCSFGGVSVITPGTNTSNQVAVLYQDLNCTEVPVAIHADQLTPTWRVYSTGSNVFQTRAGCLIGAEHVNNSYECDIPIGAGICASYQTQTNSPRRARSVASQSIIAYTMSLGAENSVAYSNNSIAIPTNFTISVTTEILPVSMTKTSVDCTMYICGDSTECSNLLLQYGSFCTQLNRALTGIAVEQDKNTQEVFAQVKQIYKTPPIKDFGGFNFSQILPDPSKPSKRSFIEDLLFNKVTLADAGFIKQYGDCLGDIAARDLICAQKFNGLTVLPPLLTDEMIAQYTSALLAGTITSGWWFGAGAALQIPFAMQMAYRFNGIGVTQNVLYENQKLIANQFNSAIGKIQDSLSSTASALGKLQDVVNQNAQALNTLVKQLSSNFGAISSVLNDILSRLDPPEAEVQIDRLITGRLQSLQTYVTQQLIRAAEIRWSANLAATKMSECVLGQSKRVDFCGKGYHLMSFPQSAPHGVVFLHVTYVPAQEKNFTTAPAICHDGKAHFPREGVFVSNGTHWFVTQRNFYEPQIITTDNTFVSGNCDVVIGIVNNTVYDPLQPELDSFKEELDKYFKNHTSPDVDLGDISGINASVVNIQKEIDRLNEVAKNLNESLIDLQELGKYEQYIKGGGSGGGQIYEGKLTAEGLRFGIVASRFNHALVDRLVEGAIDAIVRHGGREEDITLVRVPGSWEIPVAAGELARKEDIDAVIAIGVLIRGATPHFDYIASEVSKGLADLSLELRKPITFGVITADTLEQAIERAGTKHGNKGWEAALSAIEMANLFKSLR

SEQ ID NO: 3773 - protein, 1371 aa, Artificial Sequence
  SARS-CoV-2/Hong Kong/case42_VM20002493/2020__EPI_ISL_414527 spike protein (1-1211)(K986P_V987P_T887W_A1020W) LumSynth construct
MFVFLVLLPLVSSQCVNLTTRTQLPPAYTNSFTRGVYYPDKVFRSSVLHSTQDLFLPFFSNVTWFHAIHVSGTNGTKRFDNPVLPFNDGVYFASTEKSNIIRGWIFGTTLDSKTQSLLIVNNATNVVIKVCEFQFCNDPFLGVYYHKNNKSWMESEFRVYSSANNCTFEYVSQPFLMDLEGKQGNFKNLREFVFKNIDGYFKIYSKHTPINLVRDLPQGFSALEPLVDLPIGINITRFQTLLALHRSYLTPGDSSSGWTAGAAAYYVGYLQPRTFLLKYNENGTITDAVDCALDPLSETKCTLKSFTVEKGIYQTSNFRVQPTESIVRFPNITNLCPFGEVFNATRFASVYAWNRKRISNCVADYSVLYNSASFSTFKCYGVSPTKLNDLCFTNVYADSFVIRGDEVRQIAPGQTGKIADYNYKLPDDFTGCVIAWNSNNLDSKVGGNYNYLYRLFRKSNLKPFERDISTEIYQAGSTPCNGVEGFNCYFPLQSYGFQPTNGVGYQPYRVVVLSFELLHAPATVCGPKKSTNLVKNKCVNFNFNGLTGTGVLTESNKKFLPFQQFGRDIADTTDAVRDPQTLEILDITPCSFGGVSVITPGTNTSNQVAVLYQDVNCTEVPVAIHADQLTPTWRVYSTGSNVFQTRAGCLIGAEHVNNSYECDIPIGAGICASYQTQTNSPRRARSVASQSIIAYTMSLGAENSVAYSNNSIAIPTNFAISVTTEILPVSMTKTSVDCTMYICGDSTECSNLLLQYGSFCTQLNRALTGIAVEQDKNTQEVFAQVKQIYKTPPIKDFGGFNFSQILPDPSKPSKRSFIEDLLFNKVTLADAGFIKQYGDCLGDIAARDLICAQKFNGLTVLPPLLTDEMIAQYTSALLAGTITSGWWFGAGAALQIPFAMQMAYRFNGIGVTQNVLYENQKLIANQFNSAIGKIQDSLSSTASALGKLQDVVNQNAQALNTLVKQLSSNFGAISSVLNDILSRLDPPEAEVQIDRLITGRLQSLQTYVTQQLIRAAEIRWSANLAATKMSECVLGQSKRVDFCGKGYHLMSFPQSAPHGVVFLHVTYVPAQEKNFTTAPAICHDGKAHFPREGVFVSNGTHWFVTQRNFYEPQIITTDNTFVSGNCDVVIGIVNNTVYDPLQPELDSFKEELDKYFKNHTSPDVDLGDISGINASVVNIQKEIDRLNEVAKNLNESLIDLQELGKYEQYIKGGGSGGGQIYEGKLTAEGLRFGIVASRFNHALVDRLVEGAIDAIVRHGGREEDITLVRVPGSWEIPVAAGELARKEDIDAVIAIGVLIRGATPHFDYIASEVSKGLADLSLELRKPITFGVITADTLEQAIERAGTKHGNKGWEAALSAIEMANLFKSLR

SEQ ID NO: 3774 - protein, 1371 aa, Artificial Sequence
  SARS-CoV-2/USA/CruiseA-23/2020__EPI_ISL_414482 spike protein (1-1211)(K986P_V987P_T887W_A1020W) LumSynth construct
MFVFLVLLPLVSSQCVNLTTRTQLPPAYTNSFTRGVYYPDKVFRSSVLHSTQDLFLPFFSNVTWFHAIHVSGTNGTKRFDNPVLPFNDGVYFASTEKSNIIRGWIFGTTLDSKTQSLLIVNNATNVVIKVCEFQFCNDPFLGVYYHKNNKSWMESEFRVYSSANNCTFEYVSQPFLMDLEVKQGNFKNLREFVFKNIDGYFKIYSKHTPINLVRDLPQGFSALEPLVDLPIGINITRFQTLLALHRSYLTPGDSSSGWTAGAAAYYVGYLQPRTFLLKYNENGTITDAVDCALDPLSETKCTLKSFTVEKGIYQTSNFRVQPTESIVRFPNITNLCPFGEVFNATRFASVYAWNRKRISNCVADYSVLYNSASFSTFKCYGVSPTKLNDLCFTNVYADSFVIRGDEVRQIAPGQTGKIADYNYKLPDDFTGCVIAWNSNNLDSKVGGNYNYLYRLFRKSNLKPFERDISTEIYQAGSTPCNGVEGFNCYFPLQSYGFQPTNGVGYQPYRVVVLSFELLHAPATVCGPKKSTNLVKNKCVNFNFNGLTGTGVLTESNKKFLPFQQFGRDIADTTDAVRDPQTLEILDITPCSFGGVSVITPGTNTSNQVAVLYQDVNCTEVPVAIHADQLTPTWRVYSTGSNVFQTRAGCLIGAEHVNNSYECDIPIGAGICASYQTQTNSPRRARSVASQSIIAYTMSLGAENSVAYSNNSIAIPTNFTISVTTEILPVSMTKTSVDCTMYICGDSTECSNLLLQYGSFCTQLNRALTGIAVEQDKNTQEVFAQVKQIYKTPPIKDFGGFNFSQILPDPSKPSKRSFIEDLLFNKVTLADAGFIKQYGDCLGDIAARDLICAQKFNGLTVLPPLLTDEMIAQYTSALLAGTITSGWWFGAGAALQIPFAMQMAYRFNGIGVTQNVLYENQKLIANQFNSAIGKIQDSLSSTASALGKLQDVVNQNAQALNTLVKQLSSNFGAISSVLNDILSRLDPPEAEVQIDRLITGRLQSLQTYVTQQLIRAAEIRWSANLAATKMSECVLGQSKRVDFCGKGYHLMSFPQSAPHGVVFLHVTYVPAQEKNFTTAPAICHDGKAHFPREGVFVSNGTHWFVTQRNFYEPQIITTDNTFVSGNCDVVIGIVNNTVYDPLQPELDSFKEELDKYFKNHTSPDVDLGDISGINASVVNIQKEIDRLNEVAKNLNESLIDLQELGKYEQYIKGGGSGGGQIYEGKLTAEGLRFGIVASRFNHALVDRLVEGAIDAIVRHGGREEDITLVRVPGSWEIPVAAGELARKEDIDAVIAIGVLIRGATPHFDYIASEVSKGLADLSLELRKPITFGVITADTLEQAIERAGTKHGNKGWEAALSAIEMANLFKSLR

SEQ ID NO: 3775 - protein, 1371 aa, Artificial Sequence
  SARS-CoV-2/Hong Kong/case85_VM20002868/2020__EPI_ISL_414519 spike protein (1-1211)(K986P_V987P_T887W_A1020W) LumSynth construct
MFVFLVLVPLVSSQCVNLTTRTQLPPAYTNSFTRGVYYPDKVFRSSVLHSTQDLFLPFFSNVTWFHAIHVSGTNGTKRFDNPVLPFNDGVYFASTEKSNIIRGWIFGTTLDSKTQSLLIVNNATNVVIKVCEFQFCNDPFLGVYYHKNNKSWMESEFRVYSSANNCTFEYVSQPFLMDLEGKQGNFKNLREFVFKNIDGYFKIYSKHTPINLVRDLPQGFSALEPLVDLPIGINITRFQTLLALHRSYLTPGDSSSGWTAGAAAYYVGYLQPRTFLLKYNENGTITDAVDCALDPLSETKCTLKSFTVEKGIYQTSNFRVQPTESIVRFPNITNLCPFGEVFNATRFASVYAWNRKRISNCVADYSVLYNSASFSTFKCYGVSPTKLNDLCFTNVYADSFVIRGDEVRQIAPGQTGKIADYNYKLPDDFTGCVIAWNSNNLDSKVGGNYNYLYRLFRKSNLKPFERDISTEIYQAGSTPCNGVEGFNCYFPLQSYGFQPTNGVGYQPYRVVVLSFELLHAPATVCGPKKSTNLVKNKCVNFNFNGLTGTGVLTESNKKFLPFQQFGRDIADTTDAVRDPQTLEILDITPCSFGGVSVITPGTNTSNQVAVLYQDVNCTEVPVAIHADQLTPTWRVYSTGSNVFQTRAGCLIGAEHVNNSYECDIPIGAGICASYQTQTNSPRRARSVASQSIIAYTMSLGAENSVAYSNNSIAIPTNFTISVTTEILPVSMTKTSVDCTMYICGDSTECSNLLLQYGSFCTQLNRALTGIAVEQDKNTQEVFAQVKQIYKTPPIKDFGGFNFSQILPDPSKPSKRSFIEDLLFNKVTLADAGFIKQYGDCLGDIAARDLICAQKFNGLTVLPPLLTDEMIAQYTSALLAGTITSGWWFGAGAALQIPFAMQMAYRFNGIGVTQNVLYENQKLIANQFNSAIGKIQDSLSSTASALGKLQDVVNQNAQALNTLVKQLSSNFGAISSVLNDILSRLDPPEAEVQIDRLITGRLQSLQTYVTQQLIRAAEIRWSANLAATKMSECVLGQSKRVDFCGKGYHLMSFPQSAPHGVVFLHVTYVPAQEKNFTTAPAICHDGKAHFPREGVFVSNGTHWFVTQRNFYEPQIITTDNTFVSGNCDVVIGIVNNTVYDPLQPELDSFKEELDKYFKNHTSPDVDLGDISGINASVVNIQKEIDRLNEVAKNLNESLIDLQELGKYEQYIKGGGSGGGQIYEGKLTAEGLRFGIVASRFNHALVDRLVEGAIDAIVRHGGREEDITLVRVPGSWEIPVAAGELARKEDIDAVIAIGVLIRGATPHFDYIASEVSKGLADLSLELRKPITFGVITADTLEQAIERAGTKHGNKGWEAALSAIEMANLFKSLR

SEQ ID NO: 3776 - protein, 1371 aa, Artificial Sequence; identical to SEQ ID NO: 3766
  SARS-CoV-2/England/200990660/2020__EPI_ISL_414523 spike protein (1-1211)(K986P_V987P_T887W_A1020W) LumSynth construct

SEQ ID NO: 3777 - protein, 1371 aa, Artificial Sequence
  SARS-CoV-2/Australia/NSW09/2020__EPI_ISL_413595 spike protein (1-1211)(K986P_V987P_T887W_A1020W) LumSynth construct
MFVFLVLLPLVSSQCVNLTTRTQLPPAYTNSFTRGVYYPDKVFRSSVLHSTQDLFLPFFSNVTWFHAIHVSGTNGTKRFDNPVLPFNDGVYFASTEKSNIIRGWIFGTTLDSKTQSLLIVNNATNVVIKVCEFQFCNDPFLGVYYHKNNKSWMESEFRVYSSANNCTFEYVSQPFLMDLEGKQGNFKNLREFVFKNIDGYFKIYSKHTPINLVRDLPQGFSALEPLVDLPIGINITRFQTLLALHRSYLTPGDSSSGWTAGAAAYYVGYLQPRTFLLKYNENGTITDAVDCALDPLSETKCTLKSFTVEKGIYQTSNFRVQPTESIVRFPNITNLCPFGEVFNATRFASVYAWNRKRISNCVADYSVLYNSASFSTFKCYGVSPTKLNDLCFTNVYADSFVIRGDEVRQIAPGQTGKIADYNYKLPDDFTGCVIAWNSNNLDSKVGGNYNYLYRLFRKSNLKPFERDISTEIYQAGSTPCNGVEGFNCYFPLQSYGFQPTNGVGYQPYRVVVLSFELLHAPATVCGPKKSTNLVKNKCVNFNFNGLTGTGVLTESNKKFLPFQQFGRDIADTTDAVRDPQTLEILDITPCSFGGVSVITPGTNTSNQVAVLYQDVNCTEVPVAIHADQLTPTWRVYSTGSNVFQTRAGCLIGAEHVNNSYECDIPIGAGICASYQTQTNSPRRARSVASQSIIAYTMSLGAENSVAYSNNSIAIPTNFTISVTTEILPVSMTKTSVDCTMYICGDSTECSNLLLQYGSFCTQLNRALTGIAVEQDKNTQEVFAQVKQIYKTPPIKDFGGFNFSQILPDPSKPSKRSFIEDLLFNKVTLADAGFIKQYGDCLGDIAARDLICAQKFNGLTVLPPLLTDEMIAQYTSALLAGTITSGWWFGAGAALQIPFAMQMAYRFNGIGVTQNVLYENQKLIANQFNSAIGKIQDSLSFTASALGKLQDVVNQNAQALNTLVKQLSSNFGAISSVLNDILSRLDPPEAEVQIDRLITGRLQSLQTYVTQQLIRAAEIRWSANLAATKMSECVLGQSKRVDFCGKGYHLMSFPQSAPHGVVFLHVTYVPAQEKNFTTAPAICHDGKAHFPREGVFVSNGTHWFVTQRNFYEPQIITTDNTFVSGNCDVVIGIVNNTVYDPLQPELDSFKEELDKYFKNHTSPDVDLGDISGINASVVNIQKEIDRLNEVAKNLNESLIDLQELGKYEQYIKGGGSGGGQIYEGKLTAEGLRFGIVASRFNHALVDRLVEGAIDAIVRHGGREEDITLVRVPGSWEIPVAAGELARKEDIDAVIAIGVLIRGATPHFDYIASEVSKGLADLSLELRKPITFGVITADTLEQAIERAGTKHGNKGWEAALSAIEMANLFKSLR

SEQ ID NO: 3778 - protein, 1371 aa, Artificial Sequence; identical to SEQ ID NO: 3758
  SARS-CoV-2/Australia/NSW10/2020__EPI_ISL_413596 spike protein (1-1211)(K986P_V987P_T887W_A1020W) LumSynth construct

SEQ ID NO: 3779 - protein, 1371 aa, Artificial Sequence
  SARS-CoV-2/Switzerland/1000477797/2020__EPI_ISL_413023 spike protein (1-1211)(K986P_V987P_T887W_A1020W) LumSynth construct
MFVFLVLLPLVSSQCVNLTTRTQLPPAYTNSFTRGVYYPDKVFRSSVLHSTQDLFLPFFSNVTWFHAIHVSGTNGTKRFDNPVLPFNDGVYFASTEKSNIIRGWIFGTTLDSKTQSLLIVNNATNVVIKVCEFQFCNDPFLGVYYHKNNKSWMESEFRVYSSANNCTFEYVSQPFLMDLEGKQGNFKNLREFVFKNIDGYFNIYSKHTPINLVRDLPQGFSALEPLVDLPIGINITRFQTLLALHRSYLTPGDSSSGWTAGAAAYYVGYLQPRTFLLKYNENGTITDAVDCALDPLSETKCTLKSFTVEKGIYQTSNFRVQPTESIVRFPNITNLCPFGEVFNATRFASVYAWNRKRISNCVADYSVLYNSASFSTFKCYGVSPTKLNDLCFTNVYADSFVIRGDEVRQIAPGQTGKIADYNYKLPDDFTGCVIAWNSNNLDSKVGGNYNYLYRLFRKSNLKPFERDISTEIYQAGSTPCNGVEGFNCYFPLQSYGFQPTNGVGYQPYRVVVLSFELLHAPATVCGPKKSTNLVKNKCVNFNFNGLTGTGVLTESNKKFLPFQQFGRDIADTTDAVRDPQTLEILDITPCSFGGVSVITPGTNTSNQVAVLYQGVNCTEVPVAIHADQLTPTWRVYSTGSNVFQTRAGCLIGAEHVNNSYECDIPIGAGICASYQTQTNSPRRARSVASQSIIAYTMSLGAENSVAYSNNSIAIPTNFTISVTTEILPVSMTKTSVDCTMYICGDSTECSNLLLQYGSFCTQLNRALTGIAVEQDKNTQEVFAQVKQIYKTPPIKDFGGFNFSQILPDPSKPSKRSFIEDLLFNKVTLADAGFIKQYGDCLGDIAARDLICAQKFNGLTVLPPLLTDEMIAQYTSALLAGTITSGWWFGAGAALQIPFAMQMAYRFNGIGVTQNVLYENQKLIANQFNSAIGKIQDSLSSTASALGKLQDVVNQNAQALNTLVKQLSSNFGAISSVLNDILSRLDPPEAEVQIDRLITGRLQSLQTYVTQQLIRAAEIRWSANLAATKMSECVLGQSKRVDFCGKGYHLMSFPQSAPHGVVFLHVTYVPAQEKNFTTAPAICHDGKAHFPREGVFVSNGTHWFVTQRNFYEPQIITTDNTFVSGNCDVVIGIVNNTVYDPLQPELDSFKEELDKYFKNHTSPDVDLGDISGINASVVNIQKEIDRLNEVAKNLNESLIDLQELGKYEQYIKGGGSGGGQIYEGKLTAEGLRFGIVASRFNHALVDRLVEGAIDAIVRHGGREEDITLVRVPGSWEIPVAAGELARKEDIDAVIAIGVLIRGATPHFDYIASEVSKGLADLSLELRKPITFGVITADTLEQAIERAGTKHGNKGWEAALSAIEMANLFKSLR

SEQ ID NO: 3780 - protein, 1371 aa, Artificial Sequence
  SARS-CoV-2/Belgium/BA-02291/2020__EPI_ISL_415159 spike protein (1-1211)(K986P_V987P_T887W_A1020W) LumSynth construct
MFVFLVLLPLVSSQCVNLTTRTQLPPAYTNSFTRGVYYPDKVFRSSVLHSTQDLFLPFFSNVTWFHAIHVSGTNGTKRFDNPVLPFNDGVYFASTEKSNIIRGWIFGTTLDSKTQSLLIVNNATNVVIKVCEFQFCNDPFLGVYYHKNNKSWMESEFRVYSSANNCTFEYVSQPFLMDLEGKQGNFKNLREFVFKNIDGYFKIYSKHTPINLVRDLPQGFSALEPLVDLPIGINITRFQTLLALHRSYLTPGDSSSGWTAGAAAYYVGYLQPRTFLLKYNENGTITDAVDCALDPLSETKCTLKSFTVEKGIYQTSNFRVQPTESIVRFPNITNLCPFGEVFNATRFASVYAWNRKRISNCVADYSVLYNSASFSTFKCYGVSPTKLNDLCFTNVYADSFVIRGDEVRQIAPGQTGKIADYNYKLPDDFTGCVIAWNSNNLDSKVGGNYNYLYRLFRRSNLKPFERDISTEIYQAGSTPCNGVEGFNCYFPLQSYGFQPTNGVGYQPYRVVVLSFELLPAPATVCGPKKSTNLVKNKCVNFNFNGLTGTGVLTESNKKFLPFQQFGRDIADTTDAVRDPQTLEILDITPCSFGGVSVITPGTNTSNQVAVLYQGVNCTEVPVAIHADQLTPTWRVYSTGSNVFQTRAGCLIGAEHVNNSYECDIPIGAGICASYQTQTNSPRRARSVASQSIIAYTMSLGAENSVAYSNNSIAIPTNFTISVTTEILPVSMTKTSVDCTMYICGDSTECSNLLLQYGSFCTQLNRALTGIAVEQDKNTQEVFAQVKQIYKTPPIKDFGGFNFSQILPDPSKPSKRSFIEDLLFNKVTLADAGFIKQYGDCLGDIAARDLICAQKFNGLTVLPPLLTDEMIAQYTSALLAGTITSGWWFGAGAALQIPFAMQMAYRFNGIGVTQNVLYENQKLIANQFNSAIGKIQDSLSSAAPALGKLQDVVNQNAQALNTLVKQLSSNFGAISSVLNDILSRLDPPEAEVQIDRLITGRLQSLQTYVTQQLIRAAEIRWSANLAATKMSECVLGQSKRVDFCGKGYHLMSFPQSAPHGVVFLHVTYVPAQEKNFTTAPAICHDGKAHFPREGVFVSNGTHWFVTQRNFYEPQIITTDNTFVSGNCDVVIGIVNNTVYDPLQPELDSFKEELDKYFKNHTSPDVDLGDISGINASVVNIQKEIDRLNEVAKNLNESLIDLQELGKYEQYIKGGGSGGGQIYEGKLTAEGLRFGIVASRFNHALVDRLVEGAIDAIVRHGGREEDITLVRVPGSWEIPVAAGELARKEDIDAVIAIGVLIRGATPHFDYIASEVSKGLADLSLELRKPITFGVITADTLEQAIERAGTKHGNKGWEAALSAIEMANLFKSLR

SEQ ID NO: 3781 - protein, 1371 aa, Artificial Sequence
  SARS-CoV-2/USA/WA8-UW5/2020__EPI_ISL_413486 spike protein (1-1211)(K986P_V987P_T887W_A1020W) LumSynth construct
MFVFLVLLPLVSSQCVNLTTRTQLPPAYTNSFTRGVYYPDKVFRSSVLHSTQDLFLPFFSNVTWFHAIHVSGTNGTKRFDNPVLPFNDGVYFASTEKSNIIRGWIFGTTLDSKTQSLLIVNNATNVVIKVCEFQFCNDPFLGVYYHKNNKSWMESEFRVYSSANNCTFEYVSQPFLMDLEGKQGNFKNLREFVFKNIDGYFKIYSKHTPINLVRDLPQGFSALEPLVDLPIGINITRFQTLLALHRSYLTPGDSSSGWTAGAAAYYVGYLQPRTFLLKYNENGTITDAVDCALDPLSETKCTLKSFTVEKGIYQTSNFRVQPTESIVRFPNITNLCPFGEVFNATRFASVYAWNRKRISNCVADYSVLYNSASFSTFKCYGVSPTKLNDLCFTNVYADSFVIRGDEVRQIAPGQTGKIADYNYKLPDDFTGCVIAWNSNNLDSKVGGNYNYLYRLFRKSNLKPFERDISTEIYQAGSTPCNGVEGFNCYFPLQSYGFQPTNGVGYQPYRVVVLSFELLHAPATVCGPKKSTNLVKNKCVNFNFNGLTGTGVLTESNKKFLPFQQFGRDIADTTDAVRDPQTLEILDITPCSFGGVSVITPGTNTSNQVAVLYQDVNCTEVPVAIHADQLTPTWRVYSTGSNVFQTRAGCLIGAEYVNNSYECDIPIGAGICASYQTQTNSPRRARSVASQSIIAYTMSLGAENSVAYSNNSIAIPTNFTISVTTEILPVSMTKTSVDCTMYICGDSTECSNLLLQYGSFCTQLNRALTGIAVEQDKNTQEVFAQVKQIYKTPPIKDFGGFNFSQILPDPSKPSKRSFIEDLLFNKVTLADAGFIKQYGDCLGDIAARDLICAQKFNGLTVLPPLLTDEMIAQYTSALLAGTITSGWWFGAGAALQIPFAMQMAYRFNGIGVTQNVLYENQKLIANQFNSAIGKIQDSLSSTASALGKLQDVVNQNAQALNTLVKQLSSNFGAISSVLNDILSRLDPPEAEVQIDRLITGRLQSLQTYVTQQLIRAAEIRWSANLAATKMSECVLGQSKRVDFCGKGYHLMSFPQSAPHGVVFLHVTYVPAQEKNFTTAPAICHDGKAHFPREGVFVSNGTHWFVTQRNFYEPQIITTDNTFVSGNCDVVIGIVNNTVYDPLQPELDSFKEELDKYFKNHTSPDVDLGDISGINASVVNIQKEIDRLNEVAKNLNESLIDLQELGKYEQYIKGGGSGGGQIYEGKLTAEGLRFGIVASRFNHALVDRLVEGAIDAIVRHGGREEDITLVRVPGSWEIPVAAGELARKEDIDAVIAIGVLIRGATPHFDYIASEVSKGLADLSLELRKPITFGVITADTLEQAIERAGTKHGNKGWEAALSAIEMANLFKSLR

SEQ ID NO: 3782 - protein, 1371 aa, Artificial Sequence
  SARS-CoV-2/England/20102000506/2020__EPI_ISL_415147 spike protein (1-1211)(K986P_V987P_T887W_A1020W) LumSynth construct
MFVFLVLLPLVSSQCVNLTTRTQLPPAYTNSFTRGVYYPDKVFRSSVLHSTQDLFLPFFSNVTWFHAIHVSGTNGTKRFDNPVLPFNDGVYFASTEKSNIIRGWIFGTTLDSKTQSLLIVNNATNVVIKVCEFQFCNDPFLGVYYHKNNKSWMESEFRVYSSANNCTFEYVSQPFLMDLEGKQGNFKNLREFVFKNIDGYFKIYSKHTPINLVRDLPQGFSALEPLVDLPIGINITRFQTLLALHRSYLTPGDSSSGWTAGAAAYYVGYLQPRTFLLKYNENGTITDAVDCALDPLSETKCTLKSFTVEKGIYQTSNFRVQPTESIVRFPNITNLCPFGEVFNATRFASVYAWNRKRISNCVADYSVLYNSASFSTFKCYGVSPTKLNDLCFTNVYADSFVIRGDEVRQIAPGQTGKIADYNYKLPDDFTGCVIAWNSNNLDSKVGGNYNYLYRLFRKSNLKPFERDISTEIYQAGSTPCNGVEGFNCYFPLQSYGFQPTNGVGYQPYRVVVLSFELLHAPATVCGPKKSTNLVKNKCVNFNFNGLTGTGVLTESNKKFLPFQQFGRDIADTTDAVRDPQTLEILDITPCSFGGVSVITPGTNTSNQVAVLYQGVNCTEVPVAIHADQLTPTWRVYSTGSNVFQTRAGCLIGAEHVNNSYECDIPIGAGICASYQTQTNSPRRARSVASQSIIAYTMSLGAENSVAYSNNSIAIPTNFTISVTTEILPVSMTKTSVDCTMYICGDSTECSNLLLQYGSFCTQLNRALTGIAVEQDKNTQEVFAQVKQIYKTPPIKDFGGFNFSQILPDPSKPSKRSFIEDLLFNKVTLADAGFIKQYGYCLGDIAARDLICAQKFNGLTVLPPLLTDEMIAQYTSALLAGTITSGWWFGAGAALQIPFAMQMAYRFNGIGVTQNVLYENQKLIANQFNSAIGKIQDSLSSTASALGKLQDVVNQNAQALNTLVKQLSSNFGAISSVLNDILSRLDPPEAEVQIDRLITGRLQSLQTYVTQQLIRAAEIRWSANLAATKMSECVLGQSKRVDFCGKGYHLMSFPQSAPHGVVFLHVTYVPAQEKNFTTAPAICHDGKAHFPREGVFVSNGTHWFVTQRNFYEPQIITTDNTFVSGNCDVVIGIVNNTVYDPLQPELDSFKEELDKYFKNHTSPDVDLGDISGINASVVNIQKEIDRLNEVAKNLNESLIDLQELGKYEQYIKGGGSGGGQIYEGKLTAEGLRFGIVASRFNHALVDRLVEGAIDAIVRHGGREEDITLVRVPGSWEIPVAAGELARKEDIDAVIAIGVLIRGATPHFDYIASEVSKGLADLSLELRKPITFGVITADTLEQAIERAGTKHGNKGWEAALSAIEMANLFKSLR

SEQ ID NO: 3783 - protein, 1371 aa, Artificial Sequence
  SARS-CoV-2/Belgium/VAG-03013/2020__EPI_ISL_415155 spike protein (1-1211)(K986P_V987P_T887W_A1020W) LumSynth construct
MFVFLVLLPLVSSQCVNLTTRTQLPPAYTNSFTRGVYYPDKVFRSSVLHSTQDLFLPFFSNVTWFHAIHVSGTNGTKRFDNPVLPFNDGVYFASTEKSNIIRGWIFGTTLDSKTQSLLIVNNATNVVIKVCEFQFCNDPFLGVYYHKNNKSWMESEFRVYSSANNCTFEYVSQPFLMDLEGKQGNFKNLREFVFKNIDGYFKIYSKHTPINLVRDLPQGFSALEPLVDLPIGINITRFQTLLALHRSYLTPGDSSSGWTAGAAAYYVGYLQPRTFLLKYNENGTITDAVDCALDPLSETKCTLKSFTVEKGIYQTSNFRVQPTESIVRFPNITNLCPFGEVFNATRFASVYAWNRKRISNCVADYSVLYNSASFSTFKCYGVSPTKLNDLCFTNVYADSFVIRGDEVRQIAPGQTGKIADYNYKLPDDFTGCVIAWNSNNLDSKVGGNYNYLYRLFRKSNLKPFERDISTEIYQAGSTPCNGVEGFNCYFPLQSYGFQPTNGVGYQPYRVVVLSFELLHAPATVCGPKKSTNLVKNKCVNFNFNGLTGTGVLTESNKKFLPFQQFGRDIADTTDAVRDPQTLEILDITPCSFGGVSVITPGTNTSNQVAVLYQGVNCTEVPVAIHADQLTPTWRVYSTGSNVFQTRAGCLIGAEHVNNSYECDIPIGAGICASYQTQTNSPRRARSVASQSIIAYTMSLGAENSVAYSNNSIAIPTNFTISVTTEILPVSMTKTSVDCTMYICGDSTECSNLLLQYGSFCTQLNRALTGIAVEQDKNTQEVFAQVKQIYKTPPIKDFGGFNFSQILPDPSKPSKRSFIEDLLFNKVTLADAGFIKQYGDCLGDIAARDLICAQKFNGLTVLPPLLTDEMIAQYTSALLAGTITSGWWFGAGAALQIPFAMQMAYRFNGIGVTQNVLYENQKLIANQFNSAIGKIQDSLSSTATALGKLQDVVNQNAQALNTLVKQLSSNFGAISSVLNDILSRLDPPEAEVQIDRLITGRLQSLQTYVTQQLIRAAEIRWSANLAATKMSECVLGQSKRVDFCGKGYHLMSFPQSAPHGVVFLHVTYVPAQEKNFTTAPAICHDGKAHFPREGVFVSNGTHWFVTQRNFYEPQIITTDNTFVSGNCDVVIGIVNNTVYDPLQPELDSFKEELDKYFKNHTSPDVDLGDISGINASVVNIQKEIDRLNEVAKNLNESLIDLQELGKYEQYIKGGGSGGGQIYEGKLTAEGLRFGIVASRFNHALVDRLVEGAIDAIVRHGGREEDITLVRVPGSWEIPVAAGELARKEDIDAVIAIGVLIRGATPHFDYIASEVSKGLADLSLELRKPITFGVITADTLEQAIERAGTKHGNKGWEAALSAIEMANLFKSLR

SEQ ID NO: 3784 - protein, 1371 aa, Artificial Sequence
  SARS-CoV-2/Belgium/BC-03016/2020__EPI_ISL_415157 spike protein (1-1211)(K986P_V987P_T887W_A1020W) LumSynth construct
MFVFLVLLPLVSSQCVNLTTRTQLPPAYTNSFTRGVYYPDKVFRSSVLHSTQDLFLPFFSNVTWFHAIHVSGTNGTKRFDNPVLPFNDGVYFASTEKSNIIRGWIFGTTLDSKTQSLLIVNNATNVVIKVCEFQFCNDPFLGVYYHKNNKSWMESEFRVYSSANNCTFEYVSQPFLMDLEGKQGNFKNLREFVFKNIDGYFKIYSKHTPINLVRDLPQGFSALEPLVDLPIGINITRFQTLLALHRSYLTPGDSSSGWTAGAAAYYVGYLQPRTFLLKYNENGTITDAVDCALDPLSETKCTLKSFTVEKGIYQTSNFRVQPTESIVRFPNITNLCPFGEVFNATRFASVYAWNRKRISNCVADYSVLYNSASFSTFKCYGVSPTKLNDLCFTNVYADSFVIRGDEVRQIAPGQTGKIADYNYKLPDDFTGCVIAWNSNNLDSKVGGNYNYLYRLFRKSNLKPFERDISTEIYQAGSTPCNGVEGFNCYFPLQSYGFQPTNGVGYQPYRVVVLSFELLHAPATVCGPKKSTNLVKNKCVNFNFNGLTGTGVLTESNKKFLPFQQFGRDIADTTDAVRDPQTLEILDITPCSFGGVSVITPGTNTSNQVAVLYQGVNCTEVPVAIHADQLTPTWRVYSTGSNVFQTRAGCLIGAEHVNNSYECDIPIGAGICASYQTQTNSPRRARSVASQSIIAYTMSLGAENSVAYSNNSIAIPTNFTISVTTEILPVSMTKTSVDCTMYICGDSTECSNLLLQYGSFCTQLNRALTGIAVEQDKNTQEVFAQVKQIYKTPPIKDFGGFNFSQILPDPSKPSKRSFIEDLLFNKVTLADAGFIKQYGDCLGDIAARDLICAQKFNGLTVLPPLLTDEMIAQYTSALLAGTITSGWWFGAGAALQIPFAMQMAYRFNGIGVTQNVLYENQKLIANQFNSAIGKIQDSLSSTAPALGKLQDVVNQNAQALNTLVKQLSSNFGAISSVLNDILSRLDPPEAEVQIDRLITGRLQSLQTYVTQQLIRAAEIRWSANLAATKMSECVLGQSKRVDFCGKGYHLMSFPQSAPHGVVFLHVTYVPAQEKNFTTAPAICHDGKAHFPREGVFVSNGTHWFVTQRNFYEPQIITTDNTFVSGNCDVVIGIVNNTVYDPLQPELDSFKEELDKYFKNHTSPDVDLGDISGINASVVNIQKEIDRLNEVAKNLNESLIDLQELGKYEQYIKGGGSGGGQIYEGKLTAEGLRFGIVASRFNHALVDRLVEGAIDAIVRHGGREEDITLVRVPGSWEIPVAAGELARKEDIDAVIAIGVLIRGATPHFDYIASEVSKGLADLSLELRKPITFGVITADTLEQAIERAGTKHGNKGWEAALSAIEMANLFKSLR

SEQ ID NO: 3785 - protein, 1371 aa, Artificial Sequence
  SARS-CoV-2/Germany/BavPat3/2020__EPI_ISL_414521 spike protein (1-1211)(K986P_V987P_T887W_A1020W) LumSynth construct
MFVFLVLLPLVSSQCVNLTTRTQLPPAYTNSFTRGVYYPDKVFRSSVLHSTQDLFLPFFSNVTWFHAIHVSGTNGTKRFDNPVLPFNDGVYFASTEKSNIIRGWIFGTTLDSKTQSLLIVNNATNVVIKVCEFQFCNDPFLGVYYHKNNKSWMESEFRVYSSANNCTFEYVSQPFLMDLEGKQGNFKNLREFVFKNIDGYFKIYSKHTPINLVRDLPQGFSALEPLVDLPIGINITRFQTLLALHRSYLTPGDSSSGWTAGAAAYYVGYLQPRTFLLKYNENGTITDAVDCALDPLSETKCTLKSFTVEKGIYQTSNFRVQPTESIVRFPNITNLCPFGEVFNATRFASVYAWNRKRISNCVADYSVLYNSASFSTFKCYGVSPTKLNDLCFTNVYADSFVIRGDEVRQIAPGQTGKIADYNYKLPDDFTGCVIAWNSNNLDSKVGGNYNYLYRLFRKSNLKPFERDISTEIYQAGSTPCNGVEGFNCYFPLQSYGFQPTNGVGYQPYRVVVLSFELLHAPATVCGPKKSTNLVKNKCVNFNFNGLTGTGVLTESNKKFLPFQQFGRDIADTTDAVRDPQTLEILDITPCSFGGVSVITPGTNTSNQVAVLYQDVNCTEVPVAIHADQLTPTWRVYSTGSNVFQTRAGCLIGAEHVNNSYECDIPIGAGICASYQTQTNSPRRARSVASQSIIAYTMSLGAENSVAYSNNSIAIPTNFTISVTTEILPVSMTKTSVDCTMYICGDSTECSNLLLQYGSFCTQLNRALTGIAVEQDKNTQQVFAQVKQIYKTPPIKDFGGFNFSQILPDPSKPSKRSFIEDLLFNKVTLADAGFIKQYGDCLGDIAARDLICAQKFNGLTVLPPLLTDEMIAQYTSALLAGTITSGWWFGAGAALQIPFAMQMAYRFNGIGVTQNVLYENQKLIANQFNSAIGKIQDSLSSTASALGKLQDVVNQNAQALNTLVKQLSSNFGAISSVLNDILSRLDPPEAEVQIDRLITGRLQSLQTYVTQQLIRAAEIRWSANLAATKMSECVLGQSKRVDFCGKGYHLMSFPQSAPHGVVFLHVTYVPAQEKNFTTAPAICHDGKAHFPREGVFVSNGTHWFVTQRNFYEPQIITTDNTFVSGNCDVVIGIVNNTVYDPLQPELDSFKEELDKYFKNHTSPDVDLGDISGINASVVNIQKEIDRLNEVAKNLNESLIDLQELGKYEQYIKGGGSGGGQIYEGKLTAEGLRFGIVASRFNHALVDRLVEGAIDAIVRHGGREEDITLVRVPGSWEIPVAAGELARKEDIDAVIAIGVLIRGATPHFDYIASEVSKGLADLSLELRKPITFGVITADTLEQAIERAGTKHGNKGWEAALSAIEMANLFKSLR

SEQ ID NO: 3786 - protein, 1371 aa, Artificial Sequence
  SARS-CoV-2/France/HF1805/2020__EPI_ISL_414628 spike protein (1-1211)(K986P_V987P_T887W_A1020W) LumSynth construct
MFVFLVLLPLVSSQCVNLTTRTQLPPAYTNSFTRGVYYPDKVFRSSVLHSTQDLFLPFFSNVTWFHAIHVSGTNGTKRFDNPVLPFNDGVYFASTEKSNIIRGWIFGTTLDSKTQSLLIVNNATNVVIKVCEFQFCNDPFLGVYYHKNNKSWMESEFRVYSSANNCTFEYVSQPFLMDLEGKQGNFKNLREFVFKNIDGYFKIYSKHTPINLVRDLPQGFSALEPLVDLPIGINITRFQTLLALHRSYLTPGDSSSGWTAGAAAYYVGYLQPRTFLLKYNENGTITDAVDCALDPLSETKCTLKSFTVEKGIYQTSNFRVQPTESIVRFPNITNLCPFGEVFNATRFASVYAWNRKRISNCVADYSVLYNSASFSTFKCYGVSPTKLNDLCFTNVYADSFVIRGDEVRQIAPGQTGKIADYNYKLPDDFTGCVIAWNSNNLDSKVGGNYNYLYRLFRKSNLKPFERDISTEIYQAGSTPCNGVEGFNCYFPLQSYGFQPTNGVGYQPYRVVVLSFELLHAPATVCGPKKSTNLVKNKCVNFNFNGLTGTGVLTESNKKFLPFQQFGRDIADTTDAVRDPQTLEILDITPCSFGGVSVITPGTNTSNQVAVLYQGVNCTEVPVAIHADQLTPTWRVYSTGSNVFQTRAGCLIGAEHVNNSYECDIPIGAGICASYQTQTNSPRRARSVASQSIIAYTMSLGAENSVAYSNNSIAIPTNFTISVTTEILPVSMTKTSVDCTMYICGDSTECSNLLLQYGSFCTQLNRALTGIAVEQDKNTQEVFAQVKQIYKTPPIKDFGGFNFSQILPDPSKPSKRSFIEDLLFNKVTLADAGFIKQYGDCLGDIAARDLICAQKFNGLTVLPPLLTDEMIAQYTSALLAGTITSGWWFGAGAALQIPFAMQMAYRFNGIGVTQNVLYENQKLIANQFNSAIGKIQDSLSSTASALGKLQDVVNQNAQALNTLVKQLSSNFGAISSVLNDILSRLDPPEAEVQIDRLITGRLQSLQTYVTQQLIRAAEIRWSANLAATKMSECVLGQSKRVDFCGKGYHLMSFPQSAPHGVVFLHVTYVPAQEKNFTTAPAICHDGKAHFPREGVFVSNGTHWFVTQRNFYEPQIITTDNTFVSGNCDVVIGVVNNTVYDPLQPELDSFKEELDKYFKNHTSPDVDLGDISGINASVVNIQKEIDRLNEVAKNLNESLIDLQELGKYEQYIKGGGSGGGQIYEGKLTAEGLRFGIVASRFNHALVDRLVEGAIDAIVRHGGREEDITLVRVPGSWEIPVAAGELARKEDIDAVIAIGVLIRGATPHFDYIASEVSKGLADLSLELRKPITFGVITADTLEQAIERAGTKHGNKGWEAALSAIEMANLFKSLR

SEQ ID NO: 3787 - protein, 1371 aa, Artificial Sequence
  SARS-CoV-2/Netherlands/ZuidHolland_9/2020__EPI_ISL_414445 spike protein (1-1211)(K986P_V987P_T887W_A1020W) LumSynth construct
MFVFLVLLPLVSSQCVNLTTRTQLPPAYTNSFTRGVYYPDKVFRSSVLHSTQDLFLPFFSNVTWFHAIHVSGTNGTKRFDNPVLPFNDGVYFASTEKSNIIRGWIFGTTLDSKTQSLLIVNNATNVVIKVCEFQFCNDPFLGVYYHKNNKSWMESEFRVYSSANNCTFEYVSQPFLMDLEGKQGNFKNLREFVFKNIDGYFKIYSKHTPINLVRDLPQGFSALEPLVDLPIGINITRFQTLLALHRSYLTPGDSSSGWTAGAAAYYVGYLQPRTFLLKYNENGTITDAVDCALDPLSETKCTLKSFTVEKGIYQTSNFRVQPTESIVRFPNITNLCPFGEVFNATRFASVYAWNRKRISNCVADYSVLYNSASFSTFKCYGVSPTKLNDLCFTNVYADSFVIRGDEVRQIAPGQTGKIADYNYKLPDDFTGCVIAWNSNNLDSKVGGNYNYLYRLFRKSNLKPFERDISTEIYQAGSTPCNGVEGFNCYFPLQSYGFQPTNGVGYQPYRVVVLSFELLHAPATVCGPKKSTNLVKNKCVNFNFNGLTGTGVLTESNKKFLPFQQFGRDIADTTDAVRDPQTLEILDITPCSFGGVSVITPGTNTSNQVAVLYQGVNCTEVPVAIHADQLTPTWRVYSTGSNVFQTRAGCLIGAEHVNNSYECDIPIGAGICASYQTQTNSPRRARSVASQSIIAYTMSLGAENSVAYSNNSIAIPTNFTISVTTEILPVSMTKTSVDCTMYICGDSTECSNLLLQYGSFCTQLNRALTGIAVEQDKNTQEVFAQVKQIYKTPPIKDFGGFNFSQILPDPSKPSKRSFIEDLLFNKVTLADAGFIKQYGDCLGDIAARDLICVQKFNGLTVLPPLLTDEMIAQYTSALLAGTITSGWWFGAGAALQIPFAMQMAYRFNGIGVTQNVLYENQKLIANQFNSAIGKIQDSLSSTASALGKLQDVVNQNAQALNTLVKQLSSNFGAISSVLNDILSRLDPPEAEVQIDRLITGRLQSLQTYVTQQLIRAAEIRWSANLAATKMSECVLGQSKRVDFCGKGYHLMSFPQSAPHGVVFLHVTYVPAQEKNFTTAPAICHDGKAHFPREGVFVSNGTHWFVTQRNFYEPQIITTDNTFVSGNCDVVIGIVNNTVYDPLQPELDSFKEELDKYFKNHTSPDVDLGDISGINASVVNIQKEIDRLNEVAKNLNESLIDLQELGKYEQYIKGGGSGGGQIYEGKLTAEGLRFGIVASRFNHALVDRLVEGAIDAIVRHGGREEDITLVRVPGSWEIPVAAGELARKEDIDAVIAIGVLIRGATPHFDYIASEVSKGLADLSLELRKPITFGVITADTLEQAIERAGTKHGNKGWEAALSAIEMANLFKSLR

SEQ ID NO: 3788 - protein, 1371 aa, Artificial Sequence
  SARS-CoV-2/Finland/FIN03032020A/2020__EPI_ISL_413602 spike protein (1-1211)(K986P_V987P_T887W_A1020W) LumSynth construct
MFVFLVLLPLVSSQCVNLTTRTQLPPAYTNSFTRGVYYPDKVFRSSVLHSTQDLFLPFFSNVTWFHAIHVSGTNGTKRFDNPVLPFNDGVYFASTEKSNIIRGWIFGTTLDSKTQSLLIVNNATNVVIKVCEFQFCNDPFLGVYYHKNNKSWMESEFRVYSSANNCTFEYVSQPFLMDLEGKQGNFKNLREFVFKNIDGYFKIYSKHTPINLVRDLPQGFSALEPLVDLPIGINITRFQTLLALHRSYLTPGDSSSGWTAGAAAYYVGYLQPRTFLLKYNENGTITDAVDCALDPLSETKCTLKSFTVEKGIYQTSNFRVQPTESIVRFPNITNLCPFGEVFNATRFASVYAWNRKRISNCVADYSVLYNSASFSTFKCYGVSPTKLNDLCFTNVYADSFVIRGDEVRQIAPGQTGKIADYNYKLPDDFTGCVISWNSNNLDSKVGGNYNYLYRLFRKSNLKPFERDISTEIYQAGSTPCNGVEGFNCYFPLQSYGFQPTNGVGYQPYRVVVLSFELLHAPATVCGPKKSTNLVKNKCVNFNFNGLTGTGVLTESNKKFLPFQQFGRDIADTTDAVRDPQTLEILDITPCSFGGVSVITPGTNTSNQVAVLYQGVNCTEVPVAIHADQLTPTWRVYSTGSNVFQTRAGCLIGAEHVNNSYECDIPIGAGICASYQTQTNSPRRARSVASQSIIAYTMSLGAENSVAYSNNSIAIPTNFTISVTTEILPVSMTKTSVDCTMYICGDSTECSNLLLQYGSFCTQLNRALTGIAVEQDKNTQEVFAQVKQIYKTPPIKDFGGFNFSQILPDPSKPSKRSFIEDLLFNKVTLADAGFIKQYGDCLGDIAARDLICAQKFNGLTVLPPLLTDEMIAQYTSALLAGTITSGWWFGAGAALQIPFAMQMAYRFNGIGVTQNVLYENQKLIANQFNSAIGKIQDSLSSTASALGKLQDVVNQNAQALNTLVKQLSSNFGAISSVLNDILSRLDPPEAEVQIDRLITGRLQSLQTYVTQQLIRAAEIRWSANLAATKMSECVLGQSKRVDFCGKGYHLMSFPQSAPHGVVFLHVTYVPAQEKNFTTAPAICHDGKAHFPREGVFVSNGTHWFVTQRNFYEPQIITTDNTFVSGNCDVVIGIVNNTVYDPLQPELDSFKEELDKYFKNHTSPDVDLGDISGINASVVNIQKEIDRLNEVAKNLNESLIDLQELGKYEQYIKGGGSGGGQIYEGKLTAEGLRFGIVASRFNHALVDRLVEGAIDAIVRHGGREEDITLVRVPGSWEIPVAAGELARKEDIDAVIAIGVLIRGATPHFDYIASEVSKGLADLSLELRKPITFGVITADTLEQAIERAGTKHGNKGWEAALSAIEMANLFKSLR

SEQ ID NO: 3789 - protein, 1371 aa, Artificial Sequence
  SARS-CoV-2/France/GE1977/2020__EPI_ISL_414632 spike protein (1-1211)(K986P_V987P_T887W_A1020W) LumSynth construct
MFVFLVLLPLVSSQCVNLTTRTQLPPAYTNSFTRGVYYPDKVFRSSVLHSTQDLFLPFFSNVTWFHAIHVSGTNGTKRFDNPVLPFNDGVYFASTEKSNIIRGWIFGTTLDSKTQSLLIVNNATNVVIKVCEFQFCNDPFLGVYYHKNNKSWMESEFRVYSSANNCTFEYVSQPFLMDLEGKQGNFKNLREFVFKNIDGYFKIYSKHTPINLVRDLPQGFSALEPLVDLPIGINITRFQTLLALHRSYLTPGDSSSGWTAGAAAYYVGYLQPRTFLLKYNENGTITDAVDCALDPLSETKCTLKSFTVEKGIYQTSNFRVQPTESIVRFPNITNLCPFGEVFNATRFASVYAWNRKRISNCVADYSVLYNSASFSTFKCYGVSPTKLNDLCFTNVYADSFVIRGDEVRQIAPGQTGKIADYNYKLPDDFTGCVIAWNSNNLDSKVGGNYNYLYRLFRKSNLKPFERDISTEIYQAGSTPCNGVEGFNCYFPLQSYGFQPTNGVGYQPYRVVVLSFELLHAPATVCGPKKSTNLVKNKCVNFNFNGLTGTGVLTESNKKFLPFQQFGRDIADTTDAVRDPQTLEILDITPCSFGGVSVITPGTNTSNQVAVLYQGVNCTEVPVAIHADQLTPTWRVYSTGSNVFQTRAGCLIGAEHVNNSYECDIPIGAGICASYQTQTNSPRRARSVASQSIIAYTMSLGAENSVAYSNNSIAIPTNFTISVTTEILPVSMTKTSVDCTMYICGDSTECSNLLLQYGSFCTQLNRALTGIAVEQDKNTQEVFAQVKQIYKTPPIKDFGGFNFSQILPDPSKPSKRSFIEDLLFNKVTLADAGFIKQYGDCLGDIAARDLICAQKFNGLTVLPPLLTDEMIAQYTSALLAGTITSGWWFGAGAALQIPFAMQMAYRFNGIGVTQNVLYENQKLIANQFNSAIGKIQDSLFSTASALGKLQDVVNQNAQALNTLVKQLSSNFGAISSVLNDILSRLDPPEAEVQIDRLITGRLQSLQTYVTQQLIRAAEIRWSANLAATKMSECVLGQSKRVDFCGKGYHLMSFPQSAPHGVVFLHVTYVPAQEKNFTTAPAICHDGKAHFPREGVFVSNGTHWFVTQRNFYEPQIITTDNTFVSGNCDVVIGIVNNTVYDPLQPELDSFKEELDKYFKNHTSPDVDLGDISGINASVVNIQKEIDRLNEVAKNLNESLIDLQELGKYEQYIKGGGSGGGQIYEGKLTAEGLRFGIVASRFNHALVDRLVEGAIDAIVRHGGREEDITLVRVPGSWEIPVAAGELARKEDIDAVIAIGVLIRGATPHFDYIASEVSKGLADLSLELRKPITFGVITADTLEQAIERAGTKHGNKGWEAALSAIEMANLFKSLR

SEQ ID NO: 3790 - protein, 1371 aa, Artificial Sequence
  SARS-CoV-2/Finland/FIN-313/2020__EPI_ISL_414641 spike protein (1-1211)(K986P_V987P_T887W_A1020W) LumSynth construct
MFVFLVLLPLVSSQCVNLTTRTQLPPAYTNSFTRGVYYPDKVFRSSVLHSTQDLFLPFFSNVTWFHAIHVSGTNGTKRFDNPVLPFNDGVYFASTEKSNIIRGWIFGTTLDSKTQSLLIVNNATNVVIKVCEFQFCNDPFLGVYYHKNNKSWMESEFRVYSSANNCTFEYVSQPFLMDLEGKQGNFKNLREFVFKNIDGYFKIYSKHTPINLVRDLPQGFSALEPLVDLPIGINITRFKTLLALHRSYLTPGDSSSGWTAGAAAYYVGYLQPRTFLLKYNENGTITDAVDCALDPLSETKCTLKSFTVEKGIYQTSNFRVQPTESIVRFPNITNLCPFGEVFNATRFASVYAWNRKRISNCVADYSVLYNSASFSTFKCYGVSPTKLNDLCFTNVYADSFVIRGDEVRQIAPGQTGKIADYNYKLPDDFTGCVIAWNSNNLDSKVGGNYNYLYRLFRKSNLKPFERDISTEIYQAGSTPCNGVEGFNCYFPLQSYGFQPTNGVGYQPYRVVVLSFELLHAPATVCGPKKSTNLVKNKCVNFNFNGLTGTGVLTESNKKFLPFQQFGRDIADTTDAVRDPQTLEILDITPCSFGGVSVITPGTNTSNQVAVLYQGVNCTEVPVAIHADQLTPTWRVYSTGSNVFQTRAGCLIGAEHVNNSYECDIPIGAGICASYQTQTNSPRRARSVASQSIIAYTMSLGAENSVAYSNNSIAIPTNFTISVTTEILPVSMTKTSVDCTMYICGDSTECSNLLLQYGSFCTQLNRALTGIAVEQDKNTQEVFAQVKQIYKTPPIKDFGGFNFSQILPDPSKPSKRSFIEDLLFNKVTLADAGFIKQYGDCLGDIAARDLICAQKFNGLTVLPPLLTDEMIAQYTSALLAGTITSGWWFGAGAALQIPFAMQMAYRFNGIGVTQNVLYENQKLIANQFNSAIGKIQDSLSSTASALGKLQDVVNQNAQALNTLVKQLSSNFGAISSVLNDILSRLDPPEAEVQIDRLITGRLQSLQTYVTQQLIRAAEIRWSANLAATKMSECVLGQSKRVDFCGKGYHLMSFPQSAPHGVVFLHVTYVPAQEKNFTTAPAICHDGKAHFPREGVFVSNGTHWFVTQRNFYEPQIITTDNTFVSGNCDVVIGIVNNTVYDPLQPELDSFKEELDKYFKNHTSPDVDLGDISGINASVVNIQKEIDRLNEVAKNLNESLIDLQELGKYEQYIKGGGSGGGQIYEGKLTAEGLRFGIVASRFNHALVDRLVEGAIDAIVRHGGREEDITLVRVPGSWEIPVAAGELARKEDIDAVIAIGVLIRGATPHFDYIASEVSKGLADLSLELRKPITFGVITADTLEQAIERAGTKHGNKGWEAALSAIEMANLFKSLR

SEQ ID NO: 3791 - protein, 1371 aa, Artificial Sequence
  SARS-CoV-2/Netherlands/ZuidHolland_2/2020__EPI_ISL_414556 spike protein (1-1211)(K986P_V987P_T887W_A1020W) LumSynth construct
MFVFLVLLPLVSSQCVNLTTRTQLPPAYTNSFTRGVYYPDKVFRSSVLHSTQDLFLPFFSNVTWFHAIHVSGTNGTKRFDNPVLPFNDGVYFASTEKSNIIRGWIFGTTLDSKTQSLLIVNNATNVVIKVCEFQFCNDPFLGVYYHKNNKSWMESEFRVYSSANNCTFEYVSQPFLMDLEGKQGNFKNLREFVFKNIDGYFKIYSKHTPINLVRDLPQGFSALEPLVDLPIGINITRFQTLLALHRSYLTPGDSSSGWTAGAAAYYVGYLQPRTFLLKYNENGTITDAVDCALDPLSETKCTLKSFTVEKGIYQTSNFRVQPTESIVRFPNITNLCPFGEVFNATRFASVYAWNRKRISNCVADYSVLYNSASFSTFKCYGVSPTKLNDLCFTNVYADSFVIRGDEVRQIAPGQTGKIADYNYKLPDDFTGCVIAWNSNNLDSKVGGNYNYLYRLFRKSNLKPFERDISTEIYQAGSTPCNGVEGFNCYFPLQSYGFQPTNGVGYQPYRVVVLSFELLHAPATVCGPKKSTNLVKNKCVNFNFNGLTGTGVLTESNKKFLPFQQFGRDIADTTDAVRDPQTLEILDITPCSFGGVSVITPGTNTSNQVAVLYQGVNCTEVPVAIHADQLTPTWRVYSTGSNVFQTRAGCLIGAEHVNNSYECDIPIGAGICASYQTQTNSPRRARSVASQSIIAYTMSLGAENSVAYSNNSIAIPTNFTISVTTEILPVSMTKTSVDCTMYICGDSTECSNLLLQYGSFCTQLNRALTGIALEQDKNTQEVFAQVKQIYKTPPIKDFGGFNFSQILPDPSKPSKRSFIEDLLFNKVTLADAGFIKQYGDCLGDIAARDLICAQKFNGLTVLPPLLTDEMIAQYTSALLAGTITSGWWFGAGAALQIPFAMQMAYRFNGIGVTQNVLYENQKLIANQFNSAIGKIQDSLSSTASALGKLQDVVNQNAQALNTLVKQLSSNFGAISSVLNDILSRLDPPEAEVQIDRLITGRLQSLQTYVTQQLIRAAEIRWSANLAATKMSECVLGQSKRVDFCGKGYHLMSFPQSAPHGVVFLHVTYVPAQEKNFTTAPAICHDGKAHFPREGVFVSNGTHWFVTQRNFYEPQIITTDNTFVSGNCDVVIGIVNNTVYDPLQPELDSFKEELDKYFKNHTSPDVDLGDISGINASVVNIQKEIDRLNEVAKNLNESLIDLQELGKYEQYIKGGGSGGGQIYEGKLTAEGLRFGIVASRFNHALVDRLVEGAIDAIVRHGGREEDITLVRVPGSWEIPVAAGELARKEDIDAVIAIGVLIRGATPHFDYIASEVSKGLADLSLELRKPITFGVITADTLEQAIERAGTKHGNKGWEAALSAIEMANLFKSLR

SEQ ID NO: 3792 - protein, 1371 aa, Artificial Sequence
  SARS-CoV-2/USA/WA-UW31/2020__EPI_ISL_414618 spike protein (1-1211)(K986P_V987P_T887W_A1020W) LumSynth construct
MFVFLVLLPLVSSQCVNLTTRTQLPPAYTNSFTRGVYYPDKVFRSSVLHSTQDLFLPFFSNVTWFHAIHVSGTNGTKRFDNPVLPFNDGVYFASTEKSNIIRGWIFGTTLDSKTQSLLIVNNATNVVIKVCEFQFCNDPFLGVYYHKNNKSWMESEFRVYSSANNCTFEYVSQPFLMDLEGKQGNFKNLREFVFKNIDGYFKIYSKHTPINLVRDLPQGFSALEPLVDLPIGINITRFQTLLALHRSYLTPGDSSSGWTAGAAAYYVGYLQPRTFLLKYNENGTITDAVDCALDPLSETKCTLKSFTVEKGIYQTSNFRVQPTESIVRFPNITNLCPFGEVFNATRFASVYAWNRKRISNCVADYSVLYNSASFSTFKCYGVSPTKLNDLCFTNVYADSFVIRGDEVRQIAPGQTGKIADYNYKLPDDFTGCVIAWNSNNLDSKVGGNYNYLYRLFRKSNLKPFERDISTEIYQAGSTPCNGAEGFNCYFPLQSYGFQPTNGVGYQPYRVVVLSFELLHAPATVCGPKKSTNLVKNKCVNFNFNGLTGTGVLTESNKKFLPFQQFGRDIADTTDAVRDPQTLEILDITPCSFGGVSVITPGTNTSNQVAVLYQDVNCTEVPVAIHADQLTPTWRVYSTGSNVFQTRAGCLIGAEHVNNSYECDIPIGAGICASYQTQTNSPRRARSVASQSIIAYTMSLGAENSVAYSNNSIAIPTNFTISVTTEILPVSMTKTSVDCTMYICGDSTECSNLLLQYGSFCTQLNRALTGIAVEQDKNTQEVFAQVKQIYKTPPIKDFGGFNFSQILPDPSKPSKRSFIEDLLFNKVTLADAGFIKQYGDCLGDIAARDLICAQKFNGLTVLPPLLTDEMIAQYTSALLAGTITSGWWFGAGAALQIPFAMQMAYRFNGIGVTQNVLYENQKLIANQFNSAIGKIQDSLSSTASALGKLQDVVNQNAQALNTLVKQLSSNFGAISSVLNDILSRLDPPEAEVQIDRLITGRLQSLQTYVTQQLIRAAEIRWSANLAATKMSECVLGQSKRVDFCGKGYHLMSFPQSAPHGVVFLHVTYVPAQEKNFTTAPAICHDGKAHFPREGVFVSNGTHWFVTQRNFYEPQIITTDNTFVSGNCDVVIGIVNNTVYDPLQPELDSFKEELDKYFKNHTSPDVDLGDISGINASVVNIQKEIDRLNEVAKNLNESLIDLQELGKYEQYIKGGGSGGGQIYEGKLTAEGLRFGIVASRFNHALVDRLVEGAIDAIVRHGGREEDITLVRVPGSWEIPVAAGELARKEDIDAVIAIGVLIRGATPHFDYIASEVSKGLADLSLELRKPITFGVITADTLEQAIERAGTKHGNKGWEAALSAIEMANLFKSLR

SEQ ID NO: 3793 - protein, 1371 aa, Artificial Sequence
  SARS-CoV-2/South Korea/SNU01/2020__EPI_ISL_411929 spike protein (1-1211)(K986P_V987P_T887W_A1020W) LumSynth construct
MFVFLVLLPLVSSQCVNLTTRTQLPPAYTNSFTRGVYYPDKVFRSSVLHSTQDLFLPFFSNVTWFHAIHVSGTNGTKRFDNPVLPFNDGVYFASTEKSNIIRGWIFGTTLDSKTQSLLIVNNATNVVIKVCEFQFCNDPFLGVYYHKNNKSWMESEFRVYSSANNCTFEYVSQPFLMDLEGKQGNFKNLREFVFKNIDGYFKIYSKHTPINLVRDLPQGFWALEPLVDLPIGINITRFQTLLALHRSYLTPGDSSSGWTAGAAAYYVGYLQPRTFLLKYNENGTITDAVDCALDPLSETKCTLKSFTVEKGIYQTSNFRVQPTESIVRFPNITNLCPFGEVFNATRFASVYAWNRKRISNCVADYSVLYNSASFSTFKCYGVSPTKLNDLCFTNVYADSFVIRGDEVRQIAPGQTGKIADYNYKLPDDFTGCVIAWNSNNLDSKVGGNYNYLYRLFRKSNLKPFERDISTEIYQAGSTPCNGVEGFNCYFPLQSYGFQPTNGVGYQPYRVVVLSFELLHAPATVCGPKKSTNLVKNKCVNFNFNGLTGTGVLTESNKKFLPFQQFGRDIADTTDAVRDPQTLEILDITPCSFGGVSVITPGTNTSNQVAVLYQDVNCTEVPVAIHADQLTPTWRVYSTGSNVFQTRAGCLIGAEHVNNSYECDIPIGAGICASYQTQTNSPRRARSVASQSIIAYTMSLGAENSVAYSNNSIAIPTNFTISVTTEILPVSMTKTSVDCTMYICGDSTECSNLLLQYGSFCTQLNRALTGIAVEQDKNTQEVFAQVKQIYKTPPIKDFGGFNFSQILPDPSKPSKRSFIEDLLFNKVTLADAGFIKQYGDCLGDIAARDLICAQKFNGLTVLPPLLTDEMIAQYTSALLAGTITSGWWFGAGAALQIPFAMQMAYRFNGIGVTQNVLYENQKLIANQFNSAIGKIQDSLSSTASALGKLQDVVNQNAQALNTLVKQLSSNFGAISSVLNDILSRLDPPEAEVQIDRLITGRLQSLQTYVTQQLIRAAEIRWSANLAATKMSECVLGQSKRVDFCGKGYHLMSFPQSAPHGVVFLHVTYVPAQEKNFTTAPAICHDGKAHFPREGVFVSNGTHWFVTQRNFYEPQIITTDNTFVSGNCDVVIGIVNNTVYDPLQPELDSFKEELDKYFKNHTSPDVDLGDISGINASVVNIQKEIDRLNEVAKNLNESLIDLQELGKYEQYIKGGGSGGGQIYEGKLTAEGLRFGIVASRFNHALVDRLVEGAIDAIVRHGGREEDITLVRVPGSWEIPVAAGELARKEDIDAVIAIGVLIRGATPHFDYIASEVSKGLADLSLELRKPITFGVITADTLEQAIERAGTKHGNKGWEAALSAIEMANLFKSLR

SEQ ID NO: 3794 - protein, 1371 aa, Artificial Sequence
  SARS-CoV-2/China/WF0004/2020__EPI_ISL_413694 spike protein (1-1211)(K986P_V987P_T887W_A1020W) LumSynth construct
MFVFLVLLPLVSSQCVNLTTRTQLPPAYTNSFTRGVYYPDKVFRSSVLHSTQDLFLPFFSNVTWFHAIHVSGTNGTKRFDNPVLPFNDGVYFASTEKSNIIRGWIFGTTLDSKTQSLLIVNNATNVVIKVCEFQFCNDPFLGVYYHKNNKSWTESEFRVYSSANNCTFEYVSQPFLMDLEGKQGNFKNLREFVFKNIDGYFKIYSKHTPINLVRDLPQGFSALEPLVDLPIGINITRFQTLLALHRSYLTPGDSSSGWTAGAAAYYVGYLQPRTFLLKYNENGTITDAVDCALDPLSETKCTLKSFTVEKGIYQTSNFRVQPTESIVRFPNITNLCPFGEVFNATRFASVYAWNRKRISNCVADYSVLYNSASFSTFKCYGVSPTKLNDLCFTNVYADSFVIRGDEVRQIAPGQTGKIADYNYKLPDDFTGCVIAWNSNNLDSKVGGNYNYLYRLFRKSNLKPFERDISTEIYQAGSTPCNGVEGFNCYFPLQSYGFQPTNGVGYQPYRVVVLSFELLHAPATVCGPKKSTNLVKNKCVNFNFNGLTGTGVLTESNKKFLPFQQFGRDIADTTDAVRDPQTLEILDITPCSFGGVSVITPGTNTSNQVAVLYQDVNCTEVPVAIHADQLTPTWRVYSTGSNVFQTRAGCLIGAEHVNNSYECDIPIGAGICASYQTQTNSPRRARSVASQSIIAYTMSLGAENSVAYSNNSIAIPTNFTISVTTEILPVSMTKTSVDCTMYICGDSTECSNLLLQYGSFCTQLNRALTGIAVEQDKNTQEVFAQVKQIYKTPPIKDFGGFNFSQILPDPSKPSKRSFIEDLLFNKVTLADAGFIKQYGDCLGDIAARDLICAQKFNGLTVLPPLLTDEMIAQYTSALLAGTITSGWWFGAGAALQIPFAMQMAYRFNGIGVTQNVLYENQKLIANQFNSAIGKIQDSLSSTASALGKLQDVVNQNAQALNTLVKQLSSNFGAISSVLNDILSRLDPPEAEVQIDRLITGRLQSLQTYVTQQLIRAAEIRWSANLAATKMSECVLGQSKRFDFCGKGYHLMSFPQSAPHGVVFLHVTYVPAQEKNFTTAPAICHDGKAHFPREGVFVSNGTHWFVTQRNFYEPQIITTDNTFVSGNCDVVIGIVNNTVYDPLQPELDSFKEELDKYFKNHTSPDVDLGDISGINASVVNIQKEIDRLNEVAKNLNESLIDLQELGKYEQYIKGGGSGGGQIYEGKLTAEGLRFGIVASRFNHALVDRLVEGAIDAIVRHGGREEDITLVRVPGSWEIPVAAGELARKEDIDAVIAIGVLIRGATPHFDYIASEVSKGLADLSLELRKPITFGVITADTLEQAIERAGTKHGNKGWEAALSAIEMANLFKSLR

SEQ ID NO: 3795 - protein, 1371 aa, Artificial Sequence
  SARS-CoV-2/China/WF0028/2020__EPI_ISL_413791 spike protein (1-1211)(K986P_V987P_T887W_A1020W) LumSynth construct
MFVFLVLLPLVSSQCVNLTTRTQLPPAYTNSFTRGVYYPDKVFRSSVLHSTQDLFLPFFSNVTWFHAIHVSGTNGTKRFDNPVLPFNDGVYFASTEKSNIIRGWIFGTTLDSKTQSLLIVNNATNVVIKVCEFQFCNDPFLGVYYHKNNKSWMESEFRVYSSANNCTFEYVSQPFLMDLEGKQGNFKNLREFVFKNIDGYFKIYSKHTPINLVRDLPQGFSALEPLVDLPIGINITRFQTLLALHRSYLTPGDSSSGWTAGAAAYYVGYLQPRTFLLKYNENGTITDAVDCALDPLSETKCTLKSFTVEKGIYQTSNFRVQPTESIVRFPNITNLCPFGEVFNATRFASVYAWNRKRISNCVADYSVLYNSASFSTFKCYGVSPTKLNDLCFTNVYADSFVIRGDEVRQIAPGQTGKIADYNYKLPDDFTGCVIAWNSNNLDSKVGGNYNYLYRLFRKSNLKPFERDISTEIYQAGSTPCNGVEGFNCYFPLQSYGFQPTNGVGYQPYRVVVLSFELLHAPATVCGPKKSTNLVKNKCVNFNFNGLTGTGVLTESNKKFLPFQQFGRDIADTTDAVRDPQTLEILDITPCSFGGVSVITPGTNTSNQVAVLYQDVNCTEVPVAIHADQLTPTWRVYSTGSNVFQTRAGCLIGAEHVNNSYECDIPIGAGICASYQTQTNSPRRARSVASQSIIAYTMSLGAENSVAYSNNSIAIPTNFTISVTTEILPVSMTKTSVDCTMYICGDSTECSNLLLQYGSFCTQLNRALTGIAVEQDKNTQEVFAQVKQIYKTPPIKDFGGFNFSQILPDPSKPSKRSFIEDLLFNKVTLADAGFIKQYGDCLGDIAARDLICAQKFNGLTVLPPLLTDEMIAQYTSALLAGTITSGWWFGAGAALQIPFAMQMAYRFNGIGVTQNVLYENQKLIANQFNSAIGKIQDSLSSTASALGKLQDVVNQNAQALNTLVKQLSSNFGAISSVLNDILSRLDPPEAEVQIDRLITGRLQSLQTYVTQQLIRAAEIRWSANLAATKMSECVLGQSKRVDFCGKGYHLMSFPQSAPHGVVFLHVTYVPAQEKNFTTAPAICHDGKAHFPREGVFVSNGTHWFVTQRNFYEPQIITTDNTFVSGNCDVVIGIVNNTVYDPLQPELESFKEELDKYFKNHTSPDVDLGDISGINASVVNIQKEIDRLNEVAKNLNESLIDLQELGKYEQYIKGGGSGGGQIYEGKLTAEGLRFGIVASRFNHALVDRLVEGAIDAIVRHGGREEDITLVRVPGSWEIPVAAGELARKEDIDAVIAIGVLIRGATPHFDYIASEVSKGLADLSLELRKPITFGVITADTLEQAIERAGTKHGNKGWEAALSAIEMANLFKSLR

SEQ ID NO: 3796 - protein, 1371 aa, Artificial Sequence
  SARS-CoV-2/2019-nCoV/USA-CruiseA-18/2020__MT159716.1 spike protein (1-1211)(K986P_V987P_T887W_A1020W) LumSynth construct
MFVFLVLLPLVSSQCVNLTTRTQLPPAYTNSFTRGVYYPDKVFRSSVLHSTQDLFLPFFSNVTWFHAIHVSGTNGTKRFDNPVLPFNDGVYFASTEKSNIIRGWIFGTTLDSKTQSLLIVNNATNVVIKVCEFQFCNDPFLGVYYHKNNKSWMESELRVYSSANNCTFEYVSQPFLMDLEGKQGNFKNLREFVFKNIDGYFKIYSKHTPINLVRDLPQGFSALEPLVDLPIGINITRFQTLLALHRSYLTPGDSSSGWTAGAAAYYVGYLQPRTFLLKYNENGTITDAVDCALDPLSETKCTLKSFTVEKGIYQTSNFRVQPTESIVRFPNITNLCPFGEVFNATRFASVYAWNRKRISNCVADYSVLYNSASFSTFKCYGVSPTKLNDLCFTNVYADSFVIRGDEVRQIAPGQTGKIADYNYKLPDDFTGCVIAWNSNNLDSKVGGNYNYLYRLFRKSNLKPFERDISTEIYQAGSTPCNGVEGFNCYFPLQSYGFQPTNGVGYQPYRVVVLSFELLHAPATVCGPKKSTNLVKNKCVNFNFNGLTGTGVLTESNKKFLPFQQFGRDIADTTDAVRDPQTLEILDITPCSFGGVSVITPGTNTSNQVAVLYQDVNCTEVPVAIHADQLTPTWRVYSTGSNVFQTRAGCLIGAEHVNNSYECDIPIGAGICASYQTQTNSPRRARSVASQSIIAYTMSLGAENSVAYSNNSIAIPTNFTISVTTEILPVSMTKTSVDCTMYICGDSTECSNLLLQYGSFCTQLNRALTGIAVEQDKNTQEVFAQVKQIYKTPPIKDFGGFNFSQILPDPSKPSKRSFIEDLLFNKVTLADAGFIKQYGDCLGDIAARDLICAQKFNGLTVLPPLLTDEMIAQYTSALLAGTITSGWWFGAGAALQIPFAMQMAYRFNGIGVTQNVLYENQKLIANQFNSAIGKIQDSLSSTASALGKLQDVVNQNAQALNTLVKQLSSNFGAISSVLNDILSRLDPPEAEVQIDRLITGRLQSLQTYVTQQLIRAAEIRWSANLAATKMSECVLGQSKRVDFCGKGYHLMSFPQSAPHGVVFLHVTYVPAQEKNFTTAPAICHDGKAHFPREGVFVSNGTHWFVTQRNFYEPQIITTDNTFVSGNCDVVIGIVNNTVYDPLQPELDSFKEELDKYFKNHTSPDVDLGDISGINASVVNIQKEIDRLNEVAKNLNESLIDLQELGKYEQYIKGGGSGGGQIYEGKLTAEGLRFGIVASRFNHALVDRLVEGAIDAIVRHGGREEDITLVRVPGSWEIPVAAGELARKEDIDAVIAIGVLIRGATPHFDYIASEVSKGLADLSLELRKPITFGVITADTLEQAIERAGTKHGNKGWEAALSAIEMANLFKSLR

SEQ ID NO: 3797 - protein, 1371 aa, Artificial Sequence
  SARS-CoV-2/SARS-CoV-2/Yunnan-01/human/2020/CHN__MT049951.1 spike protein (1-1211)(K986P_V987P_T887W_A1020W) LumSynth construct
MFVFLVLLPLVSSQCVNLTTRTQLPPANTNSFTRGVYYPDKVFRSSVLHSTQDLFLPFFSNVTWFHAIHVSGTNGTKRFDNPVLPFNDGVYFASTEKSNIIRGWIFGTTLDSKTQSLLIVNNATNVVIKVCEFQFCNDPFLGVYYHKNNKSWMESEFRVYSSANNCTFEYVSQPFLMDLEGKQGNFKNLREFVFKNIDGYFKIYSKHTPINLVRDLPQGFSALEPLVDLPIGINITRFQTLLALHRSYLTPGDSSSGWTAGAAAYYVGYLQPRTFLLKYNENGTITDAVDCALDPLSETKCTLKSFTVEKGIYQTSNFRVQPTESIVRFPNITNLCPFGEVFNATRFASVYAWNRKRISNCVADYSVLYNSASFSTFKCYGVSPTKLNDLCFTNVYADSFVIRGDEVRQIAPGQTGKIADYNYKLPDDFTGCVIAWNSNNLDSKVGGNYNYLYRLFRKSNLKPFERDISTEIYQAGSTPCNGVEGFNCYFPLQSYGFQPTNGVGYQPYRVVVLSFELLHAPATVCGPKKSTNLVKNKCVNFNFNGLTGTGVLTESNKKFLPFQQFGRDIADTTDAVRDPQTLEILDITPCSFGGVSVITPGTNTSNQVAVLYQDVNCTEVPVAIHADQLTPTWRVYSTGSNVFQTRAGCLIGAEHVNNSYECDIPIGAGICASYQTQTNSPRRARSVASQSIIAYTMSLGAENSVAYSNNSIAIPTNFTISVTTEILPVSMTKTSVDCTMYICGDSTECSNLLLQYGSFCTQLNRALTGIAVEQDKNTQEVFAQVKQIYKTPPIKDFGGFNFSQILPDPSKPSKRSFIEDLLFNKVTLADAGFIKQYGDCLGDIAARDLICAQKFNGLTVLPPLLTDEMIAQYTSALLAGTITSGWWFGAGAALQIPFAMQMAYRFNGIGVTQNVLYENQKLIANQFNSAIGKIQDSLSSTASALGKLQDVVNQNAQALNTLVKQLSSNFGAISSVLNDILSRLDPPEAEVQIDRLITGRLQSLQTYVTQQLIRAAEIRWSANLAATKMSECVLGQSKRVDFCGKGYHLMSFPQSAPHGVVFLHVTYVPAQEKNFTTAPAICHDGKAHFPREGVFVSNGTHWFVTQRNFYEPQIITTDNTFVSGNCDVVIGIVNNTVYDPLQPELDSFKEELDKYFKNHTSPDVDLGDISGINASVVNIQKEIDRLNEVAKNLNESLIDLQELGKYEQYIKGGGSGGGQIYEGKLTAEGLRFGIVASRFNHALVDRLVEGAIDAIVRHGGREEDITLVRVPGSWEIPVAAGELARKEDIDAVIAIGVLIRGATPHFDYIASEVSKGLADLSLELRKPITFGVITADTLEQAIERAGTKHGNKGWEAALSAIEMANLFKSLR

SEQ ID NO: 3798 - protein, 1371 aa, Artificial Sequence
  SARS-CoV-2/USA/WA-UW292/2020__EPI_ISL_418077 spike protein (1-1211)(K986P_V987P_T887W_A1020W) LumSynth construct
MFVFLVLLPLVSSQCVNLTTRTQLPPAYTNSFTRGVYYPDKVFRSSVLHSTQDLFLPFFSNVTWFHAIHVSGTNGTKRFDNPVLPFNDGVYFASTEKSNIIRGWIFGTTLDSKTQSLLIVNNATNVVIKVCEFQFCNDPFLGVYYHKNNKSWMESEFRVYSSANNCTFEYVSQPFLMDLEGKQGNFKNLREFVFKNIDGYFKIYSKHTPINLVRDLPQGFSALEPLVDLPIGINITRFQTLLALHRSYLTPGDSSSGWTAGAAAYYVGYLQPRTFLLKYNENGTITDAVDCALDPLSETKCTLKSFTVEKGIYQTSNFRVQPTESIVRFPNITNLCPFGEVFNATRFASVYAWNRKRISNCVADYSVLYNSASFSTFKCYGVSPTKLNDLCFTNVYADSFVIRGDEVRQIAPGQTGKIADYNYKLPDDFTGCVIAWNSNNLDSKVGGNYNYLYRLFRKSNLKPFERDISTEIYQASSTPCNGVEGFNCYFPLQSYGFQPTNGVGYQPYRVVVLSFELLHAPATVCGPKKSTNLVKNKCVNFNFNGLTGTGVLTESNKKFLPFQQFGRDIADTTDAVRDPQTLEILDITPCSFGGVSVITPGTNTSNQVAVLYQDVNCTEVPVAIHADQLTPTWRVYSTGSNVFQTRAGCLIGAEHVNNSYECDIPIGAGICASYQTQTNSPRRARSVASQSIIAYTMSLGAENSVAYSNNSIAIPTNFTISVTTEILPVSMTKTSVDCTMYICGDSTECSNLLLQYGSFCTQLNRALTGIAVEQDKNTQEVFAQVKQIYKTPPIKDFGGFNFSQILPDPSKPSKRSFIEDLLFNKVTLADAGFIKQYGDCLGDIAARDLICAQKFNGLTVLPPLLTDEMIAQYTSALLAGTITSGWWFGAGAALQIPFAMQMAYRFNGIGVTQNVLYENQKLIANQFNSAIGKIQDSLSSTASALGKLQDVVNQNAQALNTLVKQLSSNFGAISSVLNDILSRLDPPEAEVQIDRLITGRLQSLQTYVTQQLIRAAEIRWSANLAATKMSECVLGQSKRVDFCGKGYHLMSFPQSAPHGVVFLHVTYVPAQEKNFTTAPAICHDGKAHFPREGVFVSNGTHWFVTQRNFYEPQIITTDNTFVSGNCDVVIGIVNNTVYDPLQPELDSFKEELDKYFKNHTSPDVDLGDISGINASVVNIQKEIDRLNEVAKNLNESLIDLQELGKYEQYIKGGGSGGGQIYEGKLTAEGLRFGIVASRFNHALVDRLVEGAIDAIVRHGGREEDITLVRVPGSWEIPVAAGELARKEDIDAVIAIGVLIRGATPHFDYIASEVSKGLADLSLELRKPITFGVITADTLEQAIERAGTKHGNKGWEAALSAIEMANLFKSLR

SEQ ID NO: 3799 - protein, 1371 aa, Artificial Sequence
  SARS-CoV-2/Iceland/192/2020__EPI_ISL_417819 spike protein (1-1211)(K986P_V987P_T887W_A1020W) LumSynth construct
MFVFFVLLPLVSSQCVNLTTRTQLPPAYTNSFTRGVYYPDKVFRSSVLHSTQDLFLPFFSNVTWFHAIHVSGTNGTKRFDNPVLPFNDGVYFASTEKSNIIRGWIFGTTLDSKTQSLLIVNNATNVVIKVCEFQFCNDPFLGVYYHKNNKSWMESEFRVYSSANNCTFEYVSQPFLMDLEGKQGNFKNLREFVFKNIDGYFKIYSKHTPINLVRDLPQGFSALEPLVDLPIGINITRFQTLLALHRSYLTPGDSSSGWTAGAAAYYVGYLQPRTFLLKYNENGTITDAVDCALDPLSETKCTLKSFTVEKGIYQTSNFRVQPTESIVRFPNITNLCPFGEVFNATRFASVYAWNRKRISNCVADYSVLYNSASFSTFKCYGVSPTKLNDLCFTNVYADSFVIRGDEVRQIAPGQTGKIADYNYKLPDDFTGCVIAWNSNNLDSKVGGNYNYLYRLFRKSNLKPFERDISTEIYQAGSTPCNGVEGFNCYFPLQSYGFQPTNGVGYQPYRVVVLSFELLHAPATVCGPKKSTNLVKNKCVNFNFNGLTGTGVLTESNKKFLPFQQFGRDIADTTDAVRDPQTLEILDITPCSFGGVSVITPGTNTSNQVAVLYQGVNCTEVPVAIHADQLTPTWRVYSTGSNVFQTRAGCLIGAEHVNNSYECDIPIGAGICASYQTQTNSPRRARSVASQSIIAYTMSLGAENSVAYSNNSIAIPTNFTISVTTEILPVSMTKTSVDCTMYICGDSTECSNLLLQYGSFCTQLNRALTGIAVEQDKNTQEVFAQVKQIYKTPPIKDFGGFNFSQILPDPSKPSKRSFIEDLLFNKVTLADAGFIKQYGDCLGDIAARDLICAQKFNGLTVLPPLLTDEMIAQYTSALLAGTITSGWWFGAGAALQIPFAMQMAYRFNGIGVTQNVLYENQKLIANQFNSAIGKIQDSLSSTASALGKLQDVVNQNAQALNTLVKQLSSNFGAISSVLNDILSRLDPPEAEVQIDRLITGRLQSLQTYVTQQLIRAAEIRWSANLAATKMSECVLGQSKRVDFCGKGYHLMSFPQSAPHGVVFLHVTYVPAQEKNFTTAPAICHDGKAHFPREGVFVSNGTHWFVTQRNFYEPQIITTDNTFVSGNCDVVIGIVNNTVYDPLQPELDSFKEELDKYFKNHTSPDVDLGDISGINASVVNIQKEIDRLNEVAKNLNESLIDLQELGKYEQYIKGGGSGGGQIYEGKLTAEGLRFGIVASRFNHALVDRLVEGAIDAIVRHGGREEDITLVRVPGSWEIPVAAGELARKEDIDAVIAIGVLIRGATPHFDYIASEVSKGLADLSLELRKPITFGVITADTLEQAIERAGTKHGNKGWEAALSAIEMANLFKSLR

SEQ ID NO: 3800 - protein, 1371 aa, Artificial Sequence
  SARS-CoV-2/Belgium/ULG-6939/2020__EPI_ISL_417020 spike protein (1-1211)(K986P_V987P_T887W_A1020W) LumSynth construct
MFVFLVLLPLVSSQCVNLTTRTQLPPAYTNSFTRGVYYPDKVFRSSVLHSTQDLFLPFFSNVTWFHAIHVSGTNGTKRFDNPVLPFNDGVYFASTEKSNIIRGWIFGTTLDSKTQSLLIVNNATNVVIKVCEFQFCNDPFLGVYYHKNNKSWMESEFRVYSSANNCTFEYVSQPFLMDLEGKQGNFKNLREFVFKNIDGYFKIYSKHTPINLVRDLPQGFSALEPLVDLPIGINITRFQTLLALHRSYLTPGDSSSGWTAGAAAYYVGYLQPRTFLLKYNENGTITDAVDCALDPLSETKCTLKSFTVEKGIYQTSNFRVQPTESIVRFPNITNLCPFGEVFNATRFASVYAWNRKRISNCVADYSVLYNSASFSTFKCYGVSPTKLNDLCFTNVYADSFVIRGDEVRQIAPGQTGKIADYNYKLPDDFTGCVIAWNSNNLDSKVGGNYNYLYRLFRKSNLKPFERDISTEIYQAGSTPCNGVEGFNCYFPLQSYGFQPTNGVGYQPYRVVVLSFELLHAPATVCGPKKSTNLVKNKCVNFNFNGLTGTGVLTESNKKFLPFQQFGRDIADTTDAVRDPQTLEILDITPCSFGGVSVITPGTNTSNQVAVLYQGVNCTEVPVAIHADQLTPTWRVYSTGSNVFQTRAGCLIGAEHVNNSYECDIPIGAGICASYQTQTNSPRRARSVASQSIIAYTMSLGAENSVVYSNNSIAIPTNFTISVTTEILPVSMTKTSVDCTMYICGDSTECSNLLLQYGSFCTQLNRALTGIAVEQDKNTQEVFAQVKQIYKTPPIKDFGGFNFSQILPDPSKPSKRSFIEDLLFNKVTLADAGFIKQYGDCLGDIAARDLICAQKFNGLTVLPPLLTDEMIAQYTSALLAGTITSGWWFGAGAALQIPFAMQMAYRFNGIGVTQNVLYENQKLIANQFNSAIGKIQDSLSSTASALGKLQDVVNQNAQALNTLVKQLSSNFGAISSVLNDILSRLDPPEAEVQIDRLITGRLQSLQTYVTQQLIRAAEIRWSANLAATKMSECVLGQSKRVDFCGKGYHLMSFPQSAPHGVVFLHVTYVPAQEKNFTTAPAICHDGKAHFPREGVFVSNGTHWFVTQRNFYEPQIITTDNTFVSGNCDVVIGIVNNTVYDPLQPELDSFKEELDKYFKNHTSPDVDLGDISGINASVVNIQKEIDRLNEVAKNLNESLIDLQELGKYEQYIKGGGSGGGQIYEGKLTAEGLRFGIVASRFNHALVDRLVEGAIDAIVRHGGREEDITLVRVPGSWEIPVAAGELARKEDIDAVIAIGVLIRGATPHFDYIASEVSKGLADLSLELRKPITFGVITADTLEQAIERAGTKHGNKGWEAALSAIEMANLFKSLR

SEQ ID NO: 3801 - protein, 1371 aa, Artificial Sequence
  SARS-CoV-2/France/HF2496/2020__EPI_ISL_418231 spike protein (1-1211)(K986P_V987P_T887W_A1020W) LumSynth construct
MFVFLVLLPLVSSQCVNLTTRTQLPPAYTNSFTRGVYYPDKVFRSSVLHSTQDLFLPFFSNVTWFHAIHVSGTNGTKRFDNPVLPFNDGVYFASTEKSNIIRGWIFGTTLDSKTQSLLIVNNATNVVIKVCEFQFCNDPFLGVYYHKNNKSWMESEFRVYSSANNCTFEYVSQPFLMDLEGKQGNFKNLREFVFKNIDGYFKIYSKHTPINLVRDLPQGFSALEPLVDLPIGINITRFQTLLALHRSYLTPGDSSSGWTAGAAAYYVGYLQPRTFLLKYNENGTITDAVDCALDPLSETKCTLKSFTVEKGIYQTSNFRVQPTESIVRFPNITNLCPFGEVFNATRFASVYAWNRKRISNCVADYSVLYNSASFSTFKCYGVSPTKLNDLCFTNVYADSFVIRGDEVRQIAPGQTGKIADYNYKLPDDFTGCVIAWNSNNLDSKVGGNYNYLYRLFRKSNLKPFERDISTEIYQAGSTPCNGVEGFNCYFPLQSYGFQPTNGVGYQPYRVVVLSFELLHAPATVCGPKKSTNLVKNKCVNFNFNGLTGTGVLTESNKKFLPFQQFGRDIADTTDAVRDPQTLEILDITPCSFGGVSVITPGTNTSNQVAVLYQGVNCTEVPVAIHADQLTPTWRVYSTGSNVFQTRAGCLIGAEHVNNSYECDIPIGAGICASYQTQTNSPRRARSVASQSIIAYTMSLGAENSVAYSNNSIAIPTNFTISVTTEILPVSMTKTSVDCTMYICGDSTECSNLLLQYGSFCTQLNRALTGIAVEQDKNTQEVFAQVKQIYKTPPIKDFGGFNFSQILPDPSKPSKRSFIEDLLFNKVTLADAGFIKQYGDCLGDIVARDLICAQKFNGLTVLPPLLTDEMIAQYTSALLAGTITSGWWFGAGAALQIPFAMQMAYRFNGIGVTQNVLYENQKLIANQFNSAIGKIQDSLSSTASALGKLQDVVNQNAQALNTLVKQLSSNFGAISSVLNDILSRLDPPEAEVQIDRLITGRLQSLQTYVTQQLIRAAEIRWSANLAATKMSECVLGQSKRVDFCGKGYHLMSFPQSAPHGVVFLHVTYVPAQEKNFTTAPAICHDGKAHFPREGVFVSNGTHWFVTQRNFYEPQIITTDNTFVSGNCDVVIGIVNNTVYDPLQPELDSFKEELDKYFKNHTSPDVDLGDISGINASVVNIQKEIDRLNEVAKNLNESLIDLQELGKYEQYIKGGGSGGGQIYEGKLTAEGLRFGIVASRFNHALVDRLVEGAIDAIVRHGGREEDITLVRVPGSWEIPVAAGELARKEDIDAVIAIGVLIRGATPHFDYIASEVSKGLADLSLELRKPITFGVITADTLEQAIERAGTKHGNKGWEAALSAIEMANLFKSLR

SEQ ID NO: 3802 - protein, 1371 aa, Artificial Sequence
  SARS-CoV-2/USA/WA-UW291/2020__EPI_ISL_418076 spike protein (1-1211)(K986P_V987P_T887W_A1020W) LumSynth construct
MFVFLVLLPLVSSQCVNLTTRTQLPPAYTNSFTRGVYYPDKVFRSSVLHSTQDLFLPFFSNVTWFHAIHVSGTNGTKRFDNPVLPFNDGVYFASTEKSNIIRGWIFGTTLDSKTQSLLIVNNATNVVIKVCEFQFCNDPFLGVYYHKNNKSWMESEFRVYSSANNCTFEYVSQPFLMDLEGKQGNFKNLREFVFKNIDGYFKIYSKHTPINLVRDLPQGFSALEPLVDLPIGINITRFQTLLALHRSYLTPGDSSSGWTAGAAAYYVGYLQPRTFLLKYNENGTITDAVDCALDPLSETKCTLKSFTVEKGIYQTSNFRVQPTESIVRFPNITNLCPFGEVFNATRFASVYAWNRKRISNCVADYSVLYNSASFSTFKCYGVSPTKLNDLCFTNVYADSFVIRGDEVRQIAPGQTGKIADYNYKLPDDFTGCVIAWNSNNLDSKVGGNYNYLYRLFRKSNLKPFERDISTEIYQAGSTPCNGVEGFNCYFPLQSYGFQPTNGVGYQPYRVVVLSFELLHAPATVCGPKKSTNLVKNKCVNFNFNGLTGTGVLTESNKKFLPFQQFGRDIADTTDAVRDPQTLEILDITPCSFGGVSVITPGTNTSNQVAVLYQGVNCTEVPVAIHADQLTPTWRVYSTGSNVFQTRAGCLIGAEHVNNSYECDIPIGAGICASYQTQTNSPRRARSVASQSIIAYTMSLGAENSVAYSNNSIAIPTNFTISVTTEILPVSMTKTSVDCTMYICGDSTECSNLLLQYGSFCTQLNRALTGIAVEQDKNTQEVFAQVKQIYKTPPIKDFGGFNFSQILPDPSKPSKRSFIEDLLFNKVTLADAGFIKQYGDCLGDIAARDLICAQKFNGLTVLPPLLTDEMIAQYTSALLAGTITSGWWFGAGAALQIPFAMQMAYRFNGIGVTQNVLYENQKLIANQFNSAIGKIQYSLSSTASALGKLQDVVNQNAQALNTLVKQLSSNFGAISSVLNDILSRLDPPEAEVQIDRLITGRLQSLQTYVTQQLIRAAEIRWSANLAATKMSECVLGQSKRVDFCGKGYHLMSFPQSAPHGVVFLHVTYVPAQEKNFTTAPAICHDGKAHFPREGVFVSNGTHWFVTQRNFYEPQIITTDNTFVSGNCDVVIGIVNNTVYDPLQPELDSFKEELDKYFKNHTSPDVDLGDISGINASVVNIQKEIDRLNEVAKNLNESLIDLQELGKYEQYIKGGGSGGGQIYEGKLTAEGLRFGIVASRFNHALVDRLVEGAIDAIVRHGGREEDITLVRVPGSWEIPVAAGELARKEDIDAVIAIGVLIRGATPHFDYIASEVSKGLADLSLELRKPITFGVITADTLEQAIERAGTKHGNKGWEAALSAIEMANLFKSLR

SEQ ID NO: 3803 - protein, 1371 aa, Artificial Sequence; identical to SEQ ID NO: 3766
  SARS-CoV-2/Portugal/PT0034/2020__EPI_ISL_418019 spike protein (1-1211)(K986P_V987P_T887W_A1020W) LumSynth construct

SEQ ID NO: 3804 - protein, 1371 aa, Artificial Sequence
  SARS-CoV-2/Iceland/202/2020__EPI_ISL_417750 spike protein (1-1211)(K986P_V987P_T887W_A1020W) LumSynth construct
MFVFLVLLPLVSSQCVNLTTRTQLPPAYTNSFTRGVYYPDKVFRSSVLHSTQDLFLPFFSNVTWFHAIHVSGTNGTKRFDNPVLPFNDGVYFASTEKSNIIRGWIFGTTLDSKTQSLLIVNNATNVVIKVCEFQFCNDPFLGVYYHKNNKSWMESEFRVYSSANNCTFEYVSQPFLMDLEGKQGNFKNLREFVFKNIDGYFKIYSKHTPINLVRDLPQGFSALEPLVDLPIGINITRFQTLLALHRSYLTPGDSSSGWTAGAAAYYVGYLQPRTFLLKYNENGTITDAVDCALDPLSETKCTLKSFTVEKGIYQTSNFRVQPTESIVRFPNITNLCPFGEVFNATRFASVYAWNRKRISNCVADYSVLYNSASFSTFKCYGVSPTKLNDLCFTNVYADSFVIRGDEVRQIAPGQTGKIADYNYKLPDDFTGCVIAWNSNNLDSKVGGNYNYLYRLFRKSNLKPFERDISTEIYQAGSTPCNGVEGFNCYFPLQSYGFQPTNGVGYQPYRVVVLSFELLHAPATVCGPKKSTNLVKNKCVNFNFNGLTGTGVLTESNKKFLPFQQFGRDIADTTDAVRDPQTLEILDITPCSFGGVSVITPGTNTSNQVAVLYQDVNCTEVPVAIHADQLTPTWRVYSTGSNVFQTRAGCLIGAEHVNNSYECDIPIGAGICASYQTQTNSPRRARSVASQSIIAYTMSLGAENSVAYSNNSIAIPTNFTISVTTEILPVSMTKTSVDCTMYICGDSTECSNLLLQYGSFCTQLNRALTGIAVEQDKNTQEVFAQVKQIYKTPPIKDFGGFNFSQILPDPSKPSKRSFIEDLLFNKVTLADAGFIKQYGDCLGDIAARDLICAQKFNGLTVLPPLLTDEMIAQYTSALLAGTITSGWWFGAGAALQIPFAMQMAYRFNGIGVTQNVLYENQKLIANQFNSAIGKIQDSLSSTASALGKLQDVVNQNAQALNTLVKQLSSNFGAISSVLNDILSRLDPPEAEVQIDRLITGRLQSLQTYVTQQLIRAAEIRWSANLAATKMSECVLGQSKRVDFCGKGYHLMSFPQSAPHGVVFLHVTYVPAQEKNFTTAPAICHDGKAHFPREGVFVSNGTHWFVTQRNFYEPQIITTDNTFVSGNCDVVIGIVNNTVYDPLQPELDSFKEELDKYFKNHTSPDVDLGDIPGINASVVNIQKEIDRLNEVAKNLNESLIDLQELGKYEQYIKGGGSGGGQIYEGKLTAEGLRFGIVASRFNHALVDRLVEGAIDAIVRHGGREEDITLVRVPGSWEIPVAAGELARKEDIDAVIAIGVLIRGATPHFDYIASEVSKGLADLSLELRKPITFGVITADTLEQAIERAGTKHGNKGWEAALSAIEMANLFKSLR

SEQ ID NO: 3805 - protein, 1371 aa, Artificial Sequence
  SARS-CoV-2/USA/WA-UW261/2020__EPI_ISL_418046 spike protein (1-1211)(K986P_V987P_T887W_A1020W) LumSynth construct
MFVFLVLLPLVSSQCVNLTTRTQLPPAYTNSFTRGVYYPDKVFRSSVLHSTQDLFLPFFSNVTWFHAIHVSGTNGTKRFDNPVLPFNDGVYFASTEKSNIIRGWIFGTTLDSKTQSLLIVNNATNVVIKVCEFQFCNDPFLGVYYHKNNKSWMESEFRVYSSANNCTFEYVSQPFLMDLEGKQGNFKNLREFVFKNIDGYFKIYSKHTPINLVRDLPQGFSALEPLVDLPIGINITRFQTLLALHRSYLTPGDSSSGWTAGAAAYYVGYLQPRTFLLKYNENGTITDAVDCALDPLSETKCTLKSFTVEKGIYQTSNFRVQPTESIVRFPNITNLCPFGEVFNATRFTSVYAWNRKRISNCVADYSVLYNSASFSTFKCYGVSPTKLNDLCFTNVYADSFVIRGDEVRQIAPGQTGKIADYNYKLPDDFTGCVIAWNSNNLDSKVGGNYNYLYRLFRKSNLKPFERDISTEIYQAGSTPCNGVEGFNCYFPLQSYGFQPTNGVGYQPYRVVVLSFELLHAPATVCGPKKSTNLVKNKCVNFNFNGLTGTGVLTESNKKFLPFQQFGRDIADTTDAVRDPQTLEILDITPCSFGGVSVITPGTNTSNQVAVLYQDVNCTEVPVAIHADQLTPTWRVYSTGSNVFQTRAGCLIGAEHVNNSYECDIPIGAGICASYQTQTNSPRRARSVASQSIIAYTMSLGAENSVAYSNNSIAIPTNFTISVTTEILPVSMTKTSVDCTMYICGDSTECSNLLLQYGSFCTQLNRALTGIAVEQDKNTQEVFAQVKQIYKTPPIKDFGGFNFSQILPDPSKPSKRSFIEDLLFNKVTLADAGFIKQYGDCLGDIAARDLICAQKFNGLTVLPPLLTDEMIAQYTSALLAGTITSGWWFGAGAALQIPFAMQMAYRFNGIGVTQNVLYENQKLIANQFNSAIGKIQDSLSSTASALGKLQDVVNQNAQALNTLVKQLSSNFGAISSVLNDILSRLDPPEAEVQIDRLITGRLQSLQTYVTQQLIRAAEIRWSANLAATKMSECVLGQSKRVDFCGKGYHLMSFPQSAPHGVVFLHVTYVPAQEKNFTTAPAICHDGKAHFPREGVFVSNGTHWFVTQRNFYEPQIITTDNTFVSGNCDVVIGIVNNTVYDPLQPELDSFKEELDKYFKNHTSPDVDLGDISGINASVVNIQKEIDRLNEVAKNLNESLIDLQELGKYEQYIKGGGSGGGQIYEGKLTAEGLRFGIVASRFNHALVDRLVEGAIDAIVRHGGREEDITLVRVPGSWEIPVAAGELARKEDIDAVIAIGVLIRGATPHFDYIASEVSKGLADLSLELRKPITFGVITADTLEQAIERAGTKHGNKGWEAALSAIEMANLFKSLR

SEQ ID NO: 3806 - protein, 1371 aa, Artificial Sequence
  SARS-CoV-2/Portugal/PT0035/2020__EPI_ISL_418020 spike protein (1-1211)(K986P_V987P_T887W_A1020W) LumSynth construct
MFVFLVLLPLVSSQCVNLTTRTQLPPAYTNSFTRGVYYPDKVFRSSVLHSTQDLFLPFFSNVTWFHAIHVSGTNGTKRFDNPVLPFNDGVYFASTEKSNIIRGWIFGTTLDSKTQSLLIVNNATNVVIKVCEFQFCNDPFLGVYYHKNNKSWMESEFRVYSSANNCTFEYVSQPFLMDLEGKQGNFKNLREFVFKNIDGYFKIYSKHTPINLVRDLPQGFSALEPLVDLPIGINITRFQTLLALHRSYLTPGDSSSGWTAGAAAYYVGYLQPRTFLLKYNENGTITDAVDCALDPLSETKCTLKSFTVEKGIYQTSNFRVQPTESIVRFPNITNLCPFGEVFNATRFASVYAWNRKRISNCVADYSVLYNSASFSTFKCYGVSPTKLNDLCFTNVYADSFVIRGDEVRQIAPGQTGKIADYNYKLPDDFTGCVIAWNSNNLDSKVGGNYNYLYRLFRKSNLKPFERDISTEIYQAGSTPCNGVEGFNCYFPLQSYGFQPTNGVGYQPYRVVVLSFELLHAPATVCGPKKSTNLVKNKCVNFNFNGLTGTGVLTESNKKFLPFQQFGRDIADTTDAVRDPQTLEILDITPCSFGGVSVITPGTNTSNQVAVLYQDVNCTEVPVAIHADQLTPTWRVYSTGSNVFQTRAGCLIGAEHVNNSYECDIPIGAGICASYQTQTNSPRRARSVASQSIIAYTMSLGAENSVAYSNNSIAIPTNFTISVTTEILPVSMTKTSVDCTMYICGDSTECSNLLLQYGSFCTQLNRALTGIAVEQDKNTQEVFAQVKQIYKTPPIKDFGGFNFSQILPDPSKPSKRSFIEDLLFNKVTLADAGFIKQYGDCLGDISARDLICAQKFNGLTVLPPLLTDEMIAQYTSALLAGTITSGWWFGAGAALQIPFAMQMAYRFNGIGVTQNVLYENQKLIANQFNSAIGKIQDSLSSTASALGKLQDVVNQNAQALNTLVKQLSSNFGAISSVLNDILSRLDPPEAEVQIDRLITGRLQSLQTYVTQQLIRAAEIRWSANLAATKMSECVLGQSKRVDFCGKGYHLMSFPQSAPHGVVFLHVTYVPAQEKNFTTAPAICHDGKAHFPREGVFVSNGTHWFVTQRNFYEPQIITTDNTFVSGNCDVVIGIVNNTVYDPLQPELDSFKEELDKYFKNHTSPDVDLGDISGINASVVNIQKEIDRLNEVAKNLNESLIDLQELGKYEQYIKGGGSGGGQIYEGKLTAEGLRFGIVASRFNHALVDRLVEGAIDAIVRHGGREEDITLVRVPGSWEIPVAAGELARKEDIDAVIAIGVLIRGATPHFDYIASEVSKGLADLSLELRKPITFGVITADTLEQAIERAGTKHGNKGWEAALSAIEMANLFKSLR

SEQ ID NO: 3807 - protein, 1371 aa, Artificial Sequence
  SARS-CoV-2/USA/NY-NYUMC7/2020__EPI_ISL_418192 spike protein (1-1211)(K986P_V987P_T887W_A1020W) LumSynth construct
MFVFLVLLPLVSSQCVNLTTRTQLPPAYTNSFTRGVYYPDKVFRSSVLHSTQDLFLPFFSNVTWFHAIHVSGTNGTKRFDNPVLPFNDGVYFASTEKSNIIRGWIFGTTLDSKTQSLLIVNNATNVVIKVCEFQFCNDPFLGVYHHKNNKSWMESEFRVYSSANNCTFEYVSQPFLMDLEGKQGNFKNLREFVFKNIDGYFKIYSKHTPINLVRDLPQGFSALEPLVDLPIGINITRFQTLLALHRSYLTPGDSSSGWTAGAAAYYVGYLQPRTFLLKYNENGTITDAVDCALDPLSETKCTLKSFTVEKGIYQTSNFRVQPTESIVRFPNITNLCPFGEVFNATRFASVYAWNRKRISNCVADYSVLYNSASFSTFKCYGVSPTKLNDLCFTNVYADSFVIRGDEVRQIAPGQTGKIADYNYKLPDDFTGCVIAWNSNNLDSKVGGNYNYLYRLFRKSNLKPFERDISTEIYQAGSTPCNGVEGFNCYFPLQSYGFQPTNGVGYQPYRVVVLSFELLHAPATVCGPKKSTNLVKNKCVNFNFNGLTGTGVLTESNKKFLPFQQFGRDIADTTDAVRDPQTLEILDITPCSFGGVSVITPGTNTSNQVAVLYQGVNCTEVPVAIHADQLTPTWRVYSTGSNVFQTRAGCLIGAEHVNNSYECDIPIGAGICASYQTQTNSPRRARSVASQSIIAYTMSLGAENSVAYSNNSIAIPTNFTISVTTEILPVSMTKTSVDCTMYICGDSTECSNLLLQYGSFCTQLNRALTGIAVEQDKNTQEVFAQVKQIYKTPPIKDFGGFNFSQILPDPSKPSKRSFIEDLLFNKVTLADAGFIKQYGDCLGDIAARDLICAQKFNGLTVLPPLLTDEMIAQYTSALLAGTITSGWWFGAGAALQIPFAMQMAYRFNGIGVTQNVLYENQKLIANQFNSAIGKIQDSLSSTASALGKLQDVVNQNAQALNTLVKQLSSNFGAISSVLNDILSRLDPPEAEVQIDRLITGRLQSLQTYVTQQLIRAAEIRWSANLAATKMSECVLGQSKRVDFCGKGYHLMSFPQSAPHGVVFLHVTYVPAQEKNFTTAPAICHDGKAHFPREGVFVSNGTHWFVTQRNFYEPQIITTDNTFVSGNCDVVIGIVNNTVYDPLQPELDSFKEELDKYFKNHTSPDVDLGDISGINASVVNIQKEIDRLNEVAKNLNESLIDLQELGKYEQYIKGGGSGGGQIYEGKLTAEGLRFGIVASRFNHALVDRLVEGAIDAIVRHGGREEDITLVRVPGSWEIPVAAGELARKEDIDAVIAIGVLIRGATPHFDYIASEVSKGLADLSLELRKPITFGVITADTLEQAIERAGTKHGNKGWEAALSAIEMANLFKSLR

SEQ ID NO: 3808 - protein, 1371 aa, Artificial Sequence
  SARS-CoV-2/Iceland/189/2020__EPI_ISL_417709 spike protein (1-1211)(K986P_V987P_T887W_A1020W) LumSynth construct
MFVFLVLLPLVSSQCVNLTTRTQLPPAYTNSFTRGVYYPDKVFRSSVLHSTQDLFLPFFSNVTWFHAIHVSGTNGTKRFDNPVLPFNDGVYFASTEKSNIIRGWIFGTTLDSKTQSLLIVNNATNVVIKVCEFQFCNDPFLGVYYHKNNKSWMESEFRVYSSANNCTFEYVSQPFLMDLEGKQGNFKNLREFVFKNIDGYFKIYSKHTPINLVRDLPQGFSALEPLVDLPIGINITRFQTLLALHRSYLTPGDSSSGWTAGAAAYYVGYLQPRTFLLKYNENGTITDAVDCALDPLSETKCTLKSFTVEKGIYQTSNFRVQPTESIVRFPNITNLCPFGEVFNATRFASVYAWNRKRISNCVADYSVLYNSASFSTFKCYGVSPTKLNDLCFTNVYADSFVIRGDEVRQIAPGQTGKIADYNYKLPDDFTGCVIAWNSNNLDSKVGGNYNYLYRLFRKSNLKPFERDISTEIYQAGSTPCNGVEGFNCYFPLQSYGFQPTNGVGYQPYRVVVLSFELLHAPATVCGPKKSTNLVKNKCVNFNFNGLTGTGVLTESNKKFLPFQQFGRDIADTTDAVRDPQTLEILDITPCSFGGVSVITPGTNTSNQVAVLYQGVNCTEVPVAIHADQLTPTWRVYSTGSNVFQTRAGCLIGAEHVNNSYECDIPIGAGICASYQTQTNSPRRARSVASQSIIAYTMSLGAENSVAYSNNSIAIPTNFTISVTTEILPVSMTKTSVDCTMYICGDSTECSNLLLQYGSFCTQLNRALTGIAVEQDKNTQEVFAQVKQIYKTPPIKDFGGFNFSQILPDPSKPSKRSFIEDLLFNKVTLADAGFTKQYGDCLGDIAARDLICAQKFNGLTVLPPLLTDEMIAQYTSALLAGTITSGWWFGAGAALQIPFAMQMAYRFNGIGVTQNVLYENQKLIANQFNSAIGKIQDSLSSTASALGKLQDVVNQNAQALNTLVKQLSSNFGAISSVLNDILSRLDPPEAEVQIDRLITGRLQSLQTYVTQQLIRAAEIRWSANLAATKMSECVLGQSKRVDFCGKGYHLMSFPQSAPHGVVFLHVTYVPAQEKNFTTAPAICHDGKAHFPREGVFVSNGTHWFVTQRNFYEPQIITTDNTFVSGNCDVVIGIVNNTVYDPLQPELDSFKEELDKYFKNHTSPDVDLGDISGINASVVNIQKEIDRLNEVAKNLNESLIDLQELGKYEQYIKGGGSGGGQIYEGKLTAEGLRFGIVASRFNHALVDRLVEGAIDAIVRHGGREEDITLVRVPGSWEIPVAAGELARKEDIDAVIAIGVLIRGATPHFDYIASEVSKGLADLSLELRKPITFGVITADTLEQAIERAGTKHGNKGWEAALSAIEMANLFKSLR

SEQ ID NO: 3809 - protein, 1371 aa, Artificial Sequence
  SARS-CoV-2/Australia/NSW56/2020__EPI_ISL_417408 spike protein (1-1211)(K986P_V987P_T887W_A1020W) LumSynth construct
MFVFLVLLPLVSSQCVNLTTRTQLPPAYTNSFTRGVYYPDKVFRSSVLHSTQDLFLPFFSNVTWFHAIHVSGTNGTKRFDNPVLPFNDGVYFASTEKSNIIRGWIFGTTLDSKTQSLLIVNNATNVVIKVCEFQFCNDPFLGVYYHKNNKSWMESEFRVYSSANNCTFEYVSQPFLMDLEGKQGNFKNLREFVFKNIDGYFKIYSKHTPINLVRDLPQGFSALEPLVDLPIGINITRFQTLLALHRSYLTPGDSSSGWTAGAAAYYVGYLQPRTFLLKYNENGTITDAVDCALDPLSETKCTLKSFTVEKGIYQTSNFRVQPTESIVRFPNITNLCPFGEVFNATRFASVYAWNRKRISNCVADYSVLYNSASFSTFKCYGVSPTKLNDLCFTNVYADSFVIRGDEVRQIAPGQTGKIADYNYKLPDDFTGCVIAWNSNNLDSKVGGNYNYLYRLFRKSNLKPFERDISTEIYQAGSTPCNGVEGFNCYFPLQSYGFQPTNGVGYQPYRVVVLSFELLHAPATVCGPKKSTNLVKNKCVNFNFNGLTGTGVLTESNKKFLPFQQFGRDIADTTDAVRDPQTLEILDITPCSFGGVSVITPGTNTSNQVAVLYQDVNCTEVPVAIHADQLTPTWRVYSTGSNVFQTRAGCLIGAEHVNNSYECDIPIGAGICASYQTQTNSPRRARSVASQSIIAYTMSLGAENSVAYSNNSIAIPTNFTISVTTEILPVSMTKTSVDCTMYICGDSTECSNLLLQYGSFCTQLNRALTGIAVEQDKNTQEVFAQVKQIYKTPPIKDFGGFNFSQILPDSSKPSKRSFIEDLLFNKVTLADAGFIKQYGDCLGDIAARDLICAQKFNGLTVLPPLLTDEMIAQYTSALLAGTITSGWWFGAGAALQIPFAMQMAYRFNGIGVTQNVLYENQKLIANQFNSAIGKIQDSLSSTASALGKLQDVVNQNAQALNTLVKQLSSNFGAISSVLNDILSRLDPPEAEVQIDRLITGRLQSLQTYVTQQLIRAAEIRWSANLAATKMSECVLGQSKRVDFCGKGYHLMSFPQSAPHGVVFLHVTYVPAQEKNFTTAPAICHDGKAHFPREGVFVSNGTHWFVTQRNFYEPQIITTDNTFVSGNCDVVIGIVNNTVYDPLQPELDSFKEELDKYFKNHTSPDVDLGDISGINASVVNIQKEIDRLNEVAKNLNESLIDLQELGKYEQYIKGGGSGGGQIYEGKLTAEGLRFGIVASRFNHALVDRLVEGAIDAIVRHGGREEDITLVRVPGSWEIPVAAGELARKEDIDAVIAIGVLIRGATPHFDYIASEVSKGLADLSLELRKPITFGVITADTLEQAIERAGTKHGNKGWEAALSAIEMANLFKSLR

SEQ ID NO: 3810 - protein, 1371 aa, Artificial Sequence
  SARS-CoV-2/Iceland/280/2020__EPI_ISL_417608 spike protein (1-1211)(K986P_V987P_T887W_A1020W) LumSynth construct
MFVFLVLLPLVSSQCVNLTTRTQLPPAYTNSFTRGVYYPDKVFRSSVLHSTQDLFLPFFSNVTWFHAIHVSGTNGTKRFDNPVLPFNDGVYFASTEKSNIIRGWIFGTTLDSKTQSLLIVNNATNVVIKVCEFQFCNDPFLGVYYHKNNKSWMESEFRVYSSANNCTFEYVSQPFLMDLEGKQGNFKNLREFVFKNIDGYFKIYSKHTPINLVRDLPQGFSALEPLVDLPIGINITRFQTLLALHRSYLTPGDSSSGWTAGAAAYYVGYLQPRTFLLKYNENGTITDAVDCALDPLSETKCTLKSFTVEKGIYQTSNFRVQPTESIVRFPNITNLCPFGEVFNATRFASVYAWNRKRISNCVADYSVLYNSASFSTFKCYGVSPTKLNDLCFTNVYADSFVIRGDEVRQIAPGQTGKIADYNYKLPDDFTGCVIAWNSNNLDSKVGGNYNYLYRLFRKSNLKPFERDISTEIYQAGSTPCNGVEGFNCYFPLQSYGFQPTNGVGYQPYRVVVLSFELLHAPATVCGPKKSTNLVKNKCVNFNFNGLTGTGVLTESNKKFLPFQQFGRDIADTTDAVRDPQTLEILDITPCSFGGVSVITPGTNTSNQVAVLYQGVNCTEVPVAIHADQLTPTWRVYSTGSNVFQTRAGCLIGAEHVNNSYECDIPIGAGICASYHTQTNSPRRARSVASQSIIAYTMSLGAENSVAYSNNSIAIPTNFTISVTTEILPVSMTKTSVDCTMYICGDSTECSNLLLQYGSFCTQLNRALTGIAVEQDKNTQEVFAQVKQIYKTPPIKDFGGFNFSQILPDPSKPSKRSFIEDLLFNKVTLADAGFIKQYGDCLGDIAARDLICAQKFNGLTVLPPLLTDEMIAQYTSALLAGTITSGWWFGAGAALQIPFAMQMAYRFNGIGVTQNVLYENQKLIANQFNSAIGKIQDSLSSTASALGKLQDVVNQNAQALNTLVKQLSSNFGAISSVLNDILSRLDPPEAEVQIDRLITGRLQSLQTYVTQQLIRAAEIRWSANLAATKMSECVLGQSKRVDFCGKGYHLMSFPQSAPHGVVFLHVTYVPAQEKNFTTAPAICHDGKAHFPREGVFVSNGTHWFVTQRNFYEPQIITTDNTFVSGNCDVVIGIVNNTVYDPLQPELDSFKEELDKYFKNHTSPDVDLGDISGINASVVNIQKEIDRLNEVAKNLNESLIDLQELGKYEQYIKGGGSGGGQIYEGKLTAEGLRFGIVASRFNHALVDRLVEGAIDAIVRHGGREEDITLVRVPGSWEIPVAAGELARKEDIDAVIAIGVLIRGATPHFDYIASEVSKGLADLSLELRKPITFGVITADTLEQAIERAGTKHGNKGWEAALSAIEMANLFKSLR

SEQ ID NO: 3811 - protein, 1371 aa, Artificial Sequence; identical to SEQ ID NO: 3766
  SARS-CoV-2/Iceland/247/2020__EPI_ISL_417575 spike protein (1-1211)(K986P_V987P_T887W_A1020W) LumSynth construct

SEQ ID NO: 3812 - protein, 1371 aa, Artificial Sequence
  SARS-CoV-2/Iceland/238/2020__EPI_ISL_417566 spike protein (1-1211)(K986P_V987P_T887W_A1020W) LumSynth construct
MFVFLVLLPLVSSQCVNLTTRTQLPPAYTNSFTRGVYYPDKVFRSSVLHSTQDLFLPFFSNVTWFHAIHVSGTNGTKRFDNPVLPFNDGVYFASTEKSNIIRGWIFGTTLDSKTQSLLIVNNATNVVIKVCEFQFCNDPFLGVYYHKNNKSWMESEFRVYSSANNCTFEYVSQPFLMDLEGKQGNFKNLREFVFKNIDGYFKIYSKHTPINLVRDLPQGFSALEPLVDLPIGINITRFQTLLALHRSYLTPGDSSSGWTAGAAAYYVGYLQPRTFLLKYNENGTITDAVDCALDPLSETKCTLKSFTVEKGIYQTSNFRVQPTESIVRFPNITNLCPFGEVFNATRFASVYAWNRKRISNCVADYSVLYNSASFSTFKCYGVSPTKLNDLCFTNVYADSFVIRGDEVRQIAPGQTGKIADYNYKLPDDFTGCVIAWNSNNLDSKVGGNYNYLYRLFRKSNLKPFERDISTEIYQAGSTPCNGVEGFNCYFPLQSYGFQPTNGVGYQPYRVVVLSFELLHAPATVCGPKKSTNLVKNKCVNFNFNGLTGTGVLTESNKKFLPFQQFGRDIADTTDAVRDPQTLEILDITPCSFGGVSVITPGTNTSNQVAVLYQGVNCTEVPVAIHADQLTPTWRVYSTGSNVFQTRAGCLIGAEHVNNSYECDIPIGAGICASYQTQTNSPRRARSVASQSIIAYTMSLGAENSVAYSNNSIAIPTNFTISVTTEILPVSMTKTSVDCTMYICGDSTECSNLLLQYGSFCTQLNRALTGIAVEQDKNTQEVFAQVKQIYKTPPIKDFGGFNFSQILPDPSKPSKRSFIEDLLFNKVTLADVGFIKQYGDCLGDIAARDLICAQKFNGLTVLPPLLTDEMIAQYTSALLAGTITSGWWFGAGAALQIPFAMQMAYRFNGIGVTQNVLYENQKLIANQFNSAIGKIQDSLSSTASALGKLQDVVNQNAQALNTLVKQLSSNFGAISSVLNDILSRLDPPEAEVQIDRLITGRLQSLQTYVTQQLIRAAEIRWSANLAATKMSECVLGQSKRVDFCGKGYHLMSFPQSAPHGVVFLHVTYVPAQEKNFTTAPAICHDGKAHFPREGVFVSNGTHWFVTQRNFYEPQIITTDNTFVSGNCDVVIGIVNNTVYDPLQPELDSFKEELDKYFKNHTSPDVDLGDISGINASVVNIQKEIDRLNEVAKNLNESLIDLQELGKYEQYIKGGGSGGGQIYEGKLTAEGLRFGIVASRFNHALVDRLVEGAIDAIVRHGGREEDITLVRVPGSWEIPVAAGELARKEDIDAVIAIGVLIRGATPHFDYIASEVSKGLADLSLELRKPITFGVITADTLEQAIERAGTKHGNKGWEAALSAIEMANLFKSLR

SEQ ID NO: 3813 - protein, 1371 aa, Artificial Sequence
  SARS-CoV-2/Greece/16/2020__EPI_ISL_418265 spike protein (1-1211)(K986P_V987P_T887W_A1020W) LumSynth construct
MFVFLVLLPLVSSQCVNLTTRTQLPPAYTNSFTRGVYYPDKVFRSSVLHSTQDLFLPFFSNVTWFHAIHVSGTNGTKRFDNPVLPFNDGVYFASTEKSNIIRGWIFGTTLDSKTQSLLIVNNATNVVIKVCEFQFCNDPFLGVYYHKNNKSWMESEFRVYSSANNCTFEYVSQPFLMDLEGKQGNFKNLREFVFKNVDGYFKIYSKHTPINLVRDLPQGFSALEPLVDLPIGINITRFQTLLALHRSYLTPGDSSSGWTAGAAAYYVGYLQPRTFLLKYNENGTITDAVDCALDPLSETKCTLKSFTVEKGIYQTSNFRVQPTESIVRFPNITNLCPFGEVFNATRFASVYAWNRKRISNCVADYSVLYNSASFSTFKCYGVSPTKLNDLCFTNVYADSFVIRGDEVRQIAPGQTGKIADYNYKLPDDFTGCVIAWNSNNLDSKVGGNYNYLYRLFRKSNLKPFERDISTEIYQAGSTPCNGVEGFNCYFPLQSYGFQPTNGVGYQPYRVVVLSFELLHAPATVCGPKKSTNLVKNKCVNFNFNGLTGTGVLTESNKKFLPFQQFGRDIADTTDAVRDPQTLEILDITPCSFGGVSVITPGTNTSNQVAVLYQDVNCTEVPVAIHADQLTPTWRVYSTGSNVFQTRAGCLIGAEHVNNSYECDIPIGAGICASYQTQTNSPRRARSVASQSIIAYTMSLGAENSVAYSNNSIAIPTNFTISVTTEILPVSMTKTSVDCTMYICGDSTECSNLLLQYGSFCTQLNRALTGIAVEQDKNTQEVFAQVKQIYKTPPIKDFGGFNFSQILPDPSKPSKRSFIEDLLFNKVTLADAGFIKQYGDCLGDIAARDLICAQKFNGLTVLPPLLTDEMIAQYTSALLAGTITSGWWFGAGAALQIPFAMQMAYRFNGIGVTQNVLYENQKLIANQFNSAIGKIQDSLSSTASALGKLQDVVNQNAQALNTLVKQLSSNFGAISSVLNDILSRLDPPEAEVQIDRLITGRLQSLQTYVTQQLIRAAEIRWSANLAATKMSECVLGQSKRVDFCGKGYHLMSFPQSAPHGVVFLHVTYVPAQEKNFTTAPAICHDGKAHFPREGVFVSNGTHWFVTQRNFYEPQIITTDNTFVSGNCDVVIGIVNNTVYDPLQPELDSFKEELDKYFKNHTSPDVDLGDISGINASVVNIQKEIDRLNEVAKNLNESLIDLQELGKYEQYIKGGGSGGGQIYEGKLTAEGLRFGIVASRFNHALVDRLVEGAIDAIVRHGGREEDITLVRVPGSWEIPVAAGELARKEDIDAVIAIGVLIRGATPHFDYIASEVSKGLADLSLELRKPITFGVITADTLEQAIERAGTKHGNKGWEAALSAIEMANLFKSLR

SEQ ID NO: 3814 - protein, 1371 aa, Artificial Sequence
  SARS-CoV-2/Iceland/319/2020__EPI_ISL_417648 spike protein (1-1211)(K986P_V987P_T887W_A1020W) LumSynth construct
MFVFLVLLPLVSSQCVNLTTRTQLPPAYTNSFTRGVYYPDKVFRSSVLHSTQDLFLPFFSNVTWFHAIHVSGTNGTKRFDNPVLPFNDGVYFASTEKSNIIRGWIFGTTLDSKTQSLLIVNNATNVVIKVCEFQFCNDPFLGVYYHKNNKSWMESEFRVYSSANNCTFEYVSQPFLIDLEGKQGNFKNLREFVFKNIDGYFKIYSKHTPINLVRDLPQGFSALEPLVDLPIGINITRFQTLLALHRSYLTPGDSSSGWTAGAAAYYVGYLQPRTFLLKYNENGTITDAVDCALDPLSETKCTLKSFTVEKGIYQTSNFRVQPTESIVRFPNITNLCPFGEVFNATRFASVYAWNRKRISNCVADYSVLYNSASFSTFKCYGVSPTKLNDLCFTNVYADSFVIRGDEVRQIAPGQTGKIADYNYKLPDDFTGCVIAWNSNNLDSKVGGNYNYLYRLFRKSNLKPFERDISTEIYQAGSTPCNGVEGFNCYFPLQSYGFQPTNGVGYQPYRVVVLSFELLHAPATVCGPKKSTNLVKNKCVNFNFNGLTGTGVLTESNKKFLPFQQFGRDIADTTDAVRDPQTLEILDITPCSFGGVSVITPGTNTSNQVAVLYQGVNCTEVPVAIHADQLTPTWRVYSTGSNVFQTRAGCLIGAEHVNNSYECDIPIGAGICASYQTQTNSPRRARSVASQSIIAYTMSLGAENSVAYSNNSIAIPTNFTISVTTEILPVSMTKTSVDCTMYICGDSTECSNLLLQYGSFCTQLNRALTGIAVEQDKNTQEVFAQVKQIYKTPPIKDFGGFNFSQILPDPSKPSKRSFIEDLLFNKVTLADAGFIKQYGDCLGDIAARDLICAQKFNGLTVLPPLLTDEMIAQYTSALLAGTITSGWWFGAGAALQIPFAMQMAYRFNGIGVTQNVLYENQKLIANQFNSAIGKIQDSLSSTASALGKLQDVVNQNAQALNTLVKQLSSNFGAISSVLNDILSRLDPPEAEVQIDRLITGRLQSLQTYVTQQLIRAAEIRWSANLAATKMSECVLGQSKRVDFCGKGYHLMSFPQSAPHGVVFLHVTYVPAQEKNFTTAPAICHDGKAHFPREGVFVSNGTHWFVTQRNFYEPQIITTDNTFVSGNCDVVIGIVNNTVYDPLQPELDSFKEELDKYFKNHTSPDVDLGDISGINASVVNIQKEIDRLNEVAKNLNESLIDLQELGKYEQYIKGGGSGGGQIYEGKLTAEGLRFGIVASRFNHALVDRLVEGAIDAIVRHGGREEDITLVRVPGSWEIPVAAGELARKEDIDAVIAIGVLIRGATPHFDYIASEVSKGLADLSLELRKPITFGVITADTLEQAIERAGTKHGNKGWEAALSAIEMANLFKSLR

SEQ ID NO: 3815 - protein, 1371 aa, Artificial Sequence
  SARS-CoV-2/Congo/94/2020__EPI_ISL_417947 spike protein (1-1211)(K986P_V987P_T887W_A1020W) LumSynth construct
MFVFLVLLPLVSSQCVNLTTRTQLPPAYTNSFTRGVYYPDKVFRSSVLHSTQDLFLPFFSNVTWFHAIHVSGTNGTKRFDNPVLPFNDGVYFASTEKSNIIRGWIFGTTLDSKTQSLLIVNNATNVVIKVCEFQFCNDPFLGVYYHKNNKSWMESEFRVYSSANNCTFEYVSQPFLMDLEGKQGNFKNLREFVFKNIDGYFKIYSKHTPINLVRDLPQGFSALEPLVDLPIGINITRFQTLLALHRSYLTPGDSSSGWTAGAAAYYVGYLQPRTFLLKYNENGTITDAVDCALDPLSETKCTLKSFTVEKGIYQTSNFRVQPTESIVRFPNITNLCPFGEVFNATRFASVYAWNRKRISNCVADYSVLYNSASFSTFKCYGVSPTKLNDLCFTNVYADSFVIRGDEVRQIAPGQTGKIADYNYKLPDDFTGCVIAWNSNNLDSKVGGNYNYLYRLFRKSNLKPFERDISTEIYQAGSTPCNGVEGFNCYFPLQSYGFQPTNGVGYQPYRVVVLSFELLHAPATVCGPKKSTNLVKNKCVNFNFNGLTGTGVLTESNKKFLPFQQFGRDIADTTDAVRDPQTLEILDITPCSFGGVSVITPGTNTSNQVAVLYQGVNCTEVPVAIHADQLTPTWRVYSTGSNVFQTRAGCLIGAEHVNNSYECDIPIGAGICASYQTQTNSPRRARSVASQSIIAYTMSLGAENSVAYSNNSIAIPTNFTISVTTEILPVSMTKTSVDCTMYICGDSTECSNLLLQYGSFCTQLNRALTGIAVEQDKNTQEVFAQVKQIYKTPPIKDFGGFNFSQILPDPSKPSKRSFIEDILFNKVTLADAGFIKQYGDCLGDIAARDLICAQKFNGLTVLPPLLTDEMIAQYTSALLAGTITSGWWFGAGAALQIPFAMQMAYRFNGIGVTQNVLYENQKLIANQFNSAIGKIQDSLSSTASALGKLQDVVNQNAQALNTLVKQLSSNFGAISSVLNDILSRLDPPEAEVQIDRLITGRLQSLQTYVTQQLIRAAEIRWSANLAATKMSECVLGQSKRVDFCGKGYHLMSFPQSAPHGVVFLHVTYVPAQEKNFTTAPAICHDGKAHFPREGVFVSNGTHWFVTQRNFYEPQIITTDNTFVSGNCDVVIGIVNNTVYDPLQPELDSFKEELDKYFKNHTSPDVDLGDISGINASVVNIQKEIDRLNEVAKNLNESLIDLQELGKYEQYIKGGGSGGGQIYEGKLTAEGLRFGIVASRFNHALVDRLVEGAIDAIVRHGGREEDITLVRVPGSWEIPVAAGELARKEDIDAVIAIGVLIRGATPHFDYIASEVSKGLADLSLELRKPITFGVITADTLEQAIERAGTKHGNKGWEAALSAIEMANLFKSLR

SEQ ID NO: 3816 - protein, 1371 aa, Artificial Sequence
  SARS-CoV-2/Congo/158/2020__EPI_ISL_417950 spike protein (1-1211)(K986P_V987P_T887W_A1020W) LumSynth construct
MFVFLVLLPLVSSQCVNLTTRTQLPPAYTNSFTRGVYYPDKVFRSSVLHSTQDLFLPFFSNVTWFHAIHVSGTNGTKRFDNPVLPFNDGVYFASTEKSNIIRGWIFGTTLDSKTQSLLIVNNATNVVIKVCEFQFCNDPFLGVYYHKNNKSWMESEFRVYSSANNCTFEYVSQPFLMDLEGKQGNFKNLREFVFKNIDGYFKIYSKHTPINLVRDLPQGFSALEPLVDLPIGINITRFQTLLALHRSYLTPGDSSSGWTAGAAAYYVGYLQPRTFLLKYNENGTITDAVDCALDPLSETKCTLKSFTVEKGIYQTSNFRVQPTESIVRFPNITNLCPFGEVFNATRFASVYAWNRKRISNCVADYSVLYNSASFSTFKCYGVSPTKLNDLCFTNVYADSFVIRGDEVRQIAPGQTGKIADYNYKLPDDFTGCVIAWNSNNLDSKVGGNYNYLYRLFRKSNLKPFERDISTEIYQAGSTPCNGVEGFNCYFPLQSYGFQPTNGVGYQPYRVVVLSFELLHAPATVCGPKKSTNLVKNKCVNFNFNGLTGTGVLTESNKKFLPFQQFGRDIADTTDAVRDPQTLEILDITPCSFGGVSVITPGTNTSNQVAVLYQDVNCTEVPVAIHADQLTPTWRVYSTGSNVFQTRAGCLIGAEHVNNSYECDIPIGAGICASYQTQTNSPRRARSVASQSIIAYTMSLGAENSVAYSNNSIAIPTNFTISVTTEILPVSMTKTSVDCTMYICGDSTECSNLLLQYGSFCTQLNRALTGIAVEQDKNTQEVFAQVKQIYKTPPIKDFGGFNFSQILPDPSKPSKRSFIEDLLFNKVTLADAGFIKQYGDCLGDIAARDLICAQKFNGLTVLPPLLTDEMIAQYTSALLAGTITSGWWFGAGAALQIPFAMQMAYRFNGIGVTQNVLYENQKLIANQFNSAIGKIQDSLSSTASALGKLQDVVNQNAQALNTLVKQLSSNFGAISSVLNDILSRLDPPEAEVQIDRLITGRLQSLQTYVTQQLIRAAEIRWSANLAATKMSECVLGQSKRVDFCGKGYHLMSFPQSAPHGVVFLHVTYVPAQEKNFTTAPAICHDGKAHFPREGVFVSNGTHWFVTQRNFYEPQIITTDNTFLSGNCDVVIGIVNNTVYDPLQPELDSFKEELDKYFKNHTSPDVDLGDISGINASVVNIQKEIDRLNEVAKNLNESLIDLQELGKYEQYIKGGGSGGGQIYEGKLTAEGLRFGIVASRFNHALVDRLVEGAIDAIVRHGGREEDITLVRVPGSWEIPVAAGELARKEDIDAVIAIGVLIRGATPHFDYIASEVSKGLADLSLELRKPITFGVITADTLEQAIERAGTKHGNKGWEAALSAIEMANLFKSLR

SEQ ID NO: 3817 - protein, 1371 aa, Artificial Sequence
  SARS-CoV-2/USA/UT-00034/2020__EPI_ISL_417977 spike protein (1-1211)(K986P_V987P_T887W_A1020W) LumSynth construct
MFVFLVLLPLVSSQCVNLTTRTQLPPAYTNSFTRGVYYPDKVFRSSVLHSTQDLFLPFFSNVTWFHAIHVSGTNGTKRFDNPVLPFNDGVYFASTEKSNIIRGWIFGTTLDSKTQSLLIVNNATNVVIKVCEFQFCNDPFLGVYYYKNNKSWMESEFRVYSSANNCTFEYVSQPFLMDLEGKQGNFKNLREFVFKNIDGYFKIYSKHTPINLVRDLPQGFSALEPLVDLPIGINITRFQTLLALHRSYLTPGDSSSGWTAGAAAYYVGYLQPRTFLLKYNENGTITDAVDCALDPLSETKCTLKSFTVEKGIYQTSNFRVQPTESIVRFPNITNLCPFGEVFNATRFASVYAWNRKRISNCVADYSVLYNSASFSTFKCYGVSPTKLNDLCFTNVYADSFVIRGDEVRQIAPGQTGKIADYNYKLPDDFTGCVIAWNSNNLDSKVGGNYNYLYRLFRKSNLKPFERDISTEIYQAGSTPCNGVEGFNCYFPLQSYGFQPTNGVGYQPYRVVVLSFELLHAPATVCGPKKSTNLVKNKCVNFNFNGLTGTGVLTESNKKFLPFQQFGRDIADTTDAVRDPQTLEILDITPCSFGGVSVITPGTNTSNQVAVLYQGVNCTEVPVAIHADQLTPTWRVYSTGSNVFQTRAGCLIGAEHVNNSYECDIPIGAGICASYQTQTNSPRRARSVASQSIIAYTMSLGAENSVAYSNNSIAIPTNFTISVTTEILPVSMTKTSVDCTMYICGDSTECSNLLLQYGSFCTQLNRALTGIAVEQDKNTQEVFAQVKQIYKTPPIKDFGGFNFSQILPDPSKPSKRSFIEDLLFNKVTLADAGFIKQYGDCLGDIAARDLICAQKFNGLTVLPPLLTDEMIAQYTSALLAGTITSGWWFGAGAALQIPFAMQMAYRFNGIGVTQNVLYENQKLIANQFNSAIGKIQDSLSSTASALGKLQDVVNQNAQALNTLVKQLSSNFGAISSVLNDILSRLDPPEAEVQIDRLITGRLQSLQTYVTQQLIRAAEIRWSANLAATKMSECVLGQSKRVDFCGKGYHLMSFPQSAPHGVVFLHVTYVPAQEKNFTTAPAICHDGKAHFPREGVFVSNGTHWFVTQRNFYEPQIITTDNTFVSGNCDVVIGIVNNTVYDPLQPELDSFKEELDKYFKNHTSPDVDLGDISGINASVVNIQKEIDRLNEVAKNLNESLIDLQELGKYEQYIKGGGSGGGQIYEGKLTAEGLRFGIVASRFNHALVDRLVEGAIDAIVRHGGREEDITLVRVPGSWEIPVAAGELARKEDIDAVIAIGVLIRGATPHFDYIASEVSKGLADLSLELRKPITFGVITADTLEQAIERAGTKHGNKGWEAALSAIEMANLFKSLR

SEQ ID NO: 3818 - protein, 1371 aa, Artificial Sequence
  SARS-CoV-2/USA/UT-00033/2020__EPI_ISL_417976 spike protein (1-1211)(K986P_V987P_T887W_A1020W) LumSynth construct
MFVFLVLLPLVSSQCVNLTTRTQLPPAYTNSFTRGVYYPDKVFRSSVLHSTQDLFLPFFSNVTWFHAIHVSGTNGTKRFDNPVLPFNDGVYFASTEKSNIIRGWIFGTTLDSKTQSLLIVNNATNVVIKVCEFQFCNDPFLGVYYHKNNKSWMESEFRVYSSANNCTFEYVSQPFLMDLEGKQGNFKNLREFVFKNIDGYFKIYSKHTPINLVRDLPQGFSALEPLVDLPIGINITRFQTLLALHRSYLTPGDSSSGLTAGAAAYYVGYLQPRTFLLKYNENGTITDAVDCALDPLSETKCTLKSFTVEKGIYQTSNFRVQPTESIVRFPNITNLCPFGEVFNATRFASVYAWNRKRISNCVADYSVLYNSASFSTFKCYGVSPTKLNDLCFTNVYADSFVIRGDEVRQIAPGQTGKIADYNYKLPDDFTGCVIAWNSNNLDSKVGGNYNYLYRLFRKSNLKPFERDISTEIYQAGSTPCNGVEGFNCYFPLQSYGFQPTNGVGYQPYRVVVLSFELLHAPATVCGPKKSTNLVKNKCVNFNFNGLTGTGVLTESNKKFLPFQQFGRDIADTTDAVRDPQTLEILDITPCSFGGVSVITPGTNTSNQVAVLYQGVNCTEVPVAIHADQLTPTWRVYSTGSNVFQTRAGCLIGAEHVNNSYECDIPIGAGICASYQTQTNSPRRARSVASQSIIAYTMSLGAENSVAYSNNSIAIPTNFTISVTTEILPVSMTKTSVDCTMYICGDSTECSNLLLQYGSFCTQLNRALTGIAVEQDKNTQEVFAQVKQIYKTPPIKDFGGFNFSQILPDPSKPSKRSFIEDLLFNKVTLADAGFIKQYGDCLGDIAARDLICAQKFNGLTVLPPLLTDEMIAQYTSALLAGTITSGWWFGAGAALQIPFAMQMAYRFNGIGVTQNVLYENQKLIANQFNSAIGKIQDSLSSTASALGKLQDVVNQNAQALNTLVKQLSSNFGAISSVLNDILSRLDPPEAEVQIDRLITGRLQSLQTYVTQQLIRAAEIRWSANLAATKMSECVLGQSKRVDFCGKGYHLMSFPQSAPHGVVFLHVTYVPAQEKNFTTAPAICHDGKAHFPREGVFVSNGTHWFVTQRNFYEPQIITTDNTFVSGNCDVVIGIVNNTVYDPLQPELDSFKEELDKYFKNHTSPDVDLGDISGINASVVNIQKEIDRLNEVAKNLNESLIDLQELGKYEQYIKGGGSGGGQIYEGKLTAEGLRFGIVASRFNHALVDRLVEGAIDAIVRHGGREEDITLVRVPGSWEIPVAAGELARKEDIDAVIAIGVLIRGATPHFDYIASEVSKGLADLSLELRKPITFGVITADTLEQAIERAGTKHGNKGWEAALSAIEMANLFKSLR

SEQ ID NO: 3819 - protein, 1371 aa, Artificial Sequence
  SARS-CoV-2/USA/WI-13/2020__EPI_ISL_417516 spike protein (1-1211)(K986P_V987P_T887W_A1020W) LumSynth construct
MFVFLVLLPLVSSQCVNLTTRTQLPPAYTNSFTRGVYYPDKVFRSSVLHSTQDLFLPFFSNVTWFHAIHVSGTNGTKRFDNPVLPFNDGVYFASTEKSNIIRGWIFGTTLDSKTQSLLIVNNATNVVIKVCEFQFCNDPFLGVYYHKNNKSWMESEFRVYSSANNCTFEYVSQPFLMDLEGKQGNFKNLREFVFKNIDGYFKIYSKHTPINLVRDLPQGFSALEPLVDLPIGINITRFQTLLALHRSYLTPGDSSSGWTAGAAAYYVGYLQPRTFLLKYNENGTITDAVDCALDPLSETKCTLKSFTVEKGIYQTSNFRVLPTESIVRFPNITNLCPFGEVFNATRFASVYAWNRKRISNCVADYSVLYNSASFSTFKCYGVSPTKLNDLCFTNVYADSFVIRGDEVRQIAPGQTGKIADYNYKLPDDFTGCVIAWNSNNLDSKVGGNYNYLYRLFRKSNLKPFERDISTEIYQAGSTPCNGVEGFNCYFPLQSYGFQPTNGVGYQPYRVVVLSFELLHAPATVCGPKKSTNLVKNKCVNFNFNGLTGTGVLTESNKKFLPFQQFGRDIADTTDAVRDPQTLEILDITPCSFGGVSVITPGTNTSNQVAVLYQGVNCTEVPVAIHADQLTPTWRVYSTGSNVFQTRAGCLIGAEHVNNSYECDIPIGAGICASYQTQTNSPRRARSVASQSIIAYTMSLGAENSVAYSNNSIAIPTNFTISVTTEILPVSMTKTSVDCTMYICGDSTECSNLLLQYGSFCTQLNRALTGIAVEQDKNTQEVFAQVKQIYKTPPIKDFGGFNFSQILPDPSKPSKRSFIEDLLFNKVTLADAGFIKQYGDCLGDIAARDLICAQKFNGLTVLPPLLTDEMIAQYTSALLAGTITSGWWFGAGAALQIPFAMQMAYRFNGIGVTQNVLYENQKLIANQFNSAIGKIQDSLSSTASALGKLQDVVNQNAQALNTLVKQLSSNFGAISSVLNDILSRLDPPEAEVQIDRLITGRLQSLQTYVTQQLIRAAEIRWSANLAATKMSECVLGQSKRVDFCGKGYHLMSFPQSAPHGVVFLHVTYVPAQEKNFTTAPAICHDGKAHFPREGVFVSNGTHWFVTQRNFYEPQIITTDNTFVSGNCDVVIGIVNNTVYDPLQPELDSFKEELDKYFKNHTSPDVDLGDISGINASVVNIQKEIDRLNEVAKNLNESLIDLQELGKYEQYIKGGGSGGGQIYEGKLTAEGLRFGIVASRFNHALVDRLVEGAIDAIVRHGGREEDITLVRVPGSWEIPVAAGELARKEDIDAVIAIGVLIRGATPHFDYIASEVSKGLADLSLELRKPITFGVITADTLEQAIERAGTKHGNKGWEAALSAIEMANLFKSLR

SEQ ID NO: 3820 - protein, 1370 aa, Artificial Sequence
  SARS-CoV-2/India/1-27/2020__EPI_ISL_413522 spike protein (1-1210)(K985P_V986P_T886W_A1019W) LumSynth construct
MFVFLVLLPLVSSQCVNLTTRTQLPPAYTNSFTRGVYYPDKVFRSSVLHSTQDLFLPFFSNVTWFHAIHVSGTNGTKRFDNPVLPFNDGVYFASTEKSNIIRGWIFGTTLDSKTQSLLIVNNATNVVIKVCEFQFCNDPFLGVYHKNNKSWMESEFRVYSSANNCTFEYVSQPFLMDLEGKQGNFKNLREFVFKNIDGYFKIYSKHTPINLVRDLPQGFSALEPLVDLPIGINITRFQTLLALHRSYLTPGDSSSGWTAGAAAYYVGYLQPRTFLLKYNENGTITDAVDCALDPLSETKCTLKSFTVEKGIYQTSNFRVQPTESIVRFPNITNLCPFGEVFNATRFASVYAWNRKRISNCVADYSVLYNSASFSTFKCYGVSPTKLNDLCFTNVYADSFVIRGDEVIQIAPGQTGKIADYNYKLPDDFTGCVIAWNSNNLDSKVGGNYNYLYRLFRKSNLKPFERDISTEIYQAGSTPCNGVEGFNCYFPLQSYGFQPTNGVGYQPYRVVVLSFELLHAPATVCGPKKSTNLVKNKCVNFNFNGLTGTGVLTESNKKFLPFQQFGRDIADTTDAVRDPQTLEILDITPCSFGGVSVITPGTNTSNQVAVLYQDVNCTEVPVAIHADQLTPTWRVYSTGSNVFQTRAGCLIGAEHVNNSYECDIPIGAGICASYQTQTNSPRRARSVASQSIIAYTMSLGAENSVAYSNNSIAIPTNFTISVTTEILPVSMTKTSVDCTMYICGDSTECSNLLLQYGSFCTQLNRALTGIAVEQDKNTQEVFAQVKQIYKTPPIKDFGGFNFSQILPDPSKPSKRSFIEDLLFNKVTLADAGFIKQYGDCLGDIAARDLICAQKFNGLTVLPPLLTDEMIAQYTSALLAGTITSGWWFGAGAALQIPFAMQMAYRFNGIGVTQNVLYENQKLIANQFNSAIGKIQDSLSSTASALGKLQDVVNQNAQALNTLVKQLSSNFGAISSVLNDILSRLDPPEAEVQIDRLITGRLQSLQTYVTQQLIRAAEIRWSANLAATKMSECVLGQSKRVDFCGKGYHLMSFPQSAPHGVVFLHVTYVPAQEKNFTTAPAICHDGKAHFPREGVFVSNGTHWFVTQRNFYEPQIITTDNTFVSGNCDVVIGIVNNTVYDPLQPELDSFKEELDKYFKNHTSPDVDLGDISGINASVVNIQKEIDRLNEVAKNLNESLIDLQELGKYEQYIKGGGSGGGQIYEGKLTAEGLRFGIVASRFNHALVDRLVEGAIDAIVRHGGREEDITLVRVPGSWEIPVAAGELARKEDIDAVIAIGVLIRGATPHFDYIASEVSKGLADLSLELRKPITFGVITADTLEQAIERAGTKHGNKGWEAALSAIEMANLFKSLR

SEQ ID NO: 3821 - protein, 1365 aa, Artificial Sequence
  SARS-CoV-2/pangolin/Guangxi/P4L/2017__EPI_ISL_410538 spike protein (1-1205)(K980P_V981P_T881W_A1014W) LumSynth construct
MFVFLFVLPLVSSQCVNLTTRTGIPPGYTNSSTRGVYYPDKVFRSSILHLTQDLFLPFFSNVTWFNTINYQGGFKKFDNPVLPFNDGVYFASTEKSNIIRGWIFGTTLDARTQSLLIVNNATNVVIKVCEFQFCTDPFLGVYYHNNNKTWVENEFRVYSSANNCTFEYISQPFLMDLEGKQGNFKNLREFVFKNVDGYFKIYSKHTPIDLVRDLPRGFAALEPLVDLPIGINITRFQTLLALHRSYLTPGNLESGWTTGAAAYYVGYLQQRTFLLSYNQNGTITDAVDCSLDPLSETKCTLKSLTVEKGIYQTSNFRVQPTISIVRFPNITNLCPFGEVFNASKFASVYAWNRKRISNCVADYSVLYNSTSFSTFKCYGVSPTKLNDLCFTNVYADSFVVKGDEVRQIAPGQTGVIADYNYKLPDDFTGCVIAWNSVKQDALTGGNYGYLYRLFRKSKLKPFERDISTEIYQAGSTPCNGQVGLNCYYPLERYGFHPTTGVNYQPFRVVVLSFELLNGPATVCGPKLSTTLVKDKCVNFNFNGLTGTGVLTTSKKQFLPFQQFGRDISDTTDAVRDPQTLEILDITPCSFGGVSVITPGTNTSNQVAVLYQDVNCTEVPMAIHAEQLTPAWRVYSAGANVFQTRAGCLVGAEHVNNSYECDIPVGAGICASYHSMSSLRSVNQRSIIAYTMSLGAENSVAYSNNSIAIPTNFTISVTTEILPVSMTKTSVDCTMYICGDSIECSNLLLQYGSFCTQLNRALTGIAVEQDKNTQEVFAQVKQIYKTPPIKDFGGFNFSQILPDPSKPSKRSFIEDLLFNKVTLADAGFIKQYGDCLGDIAARDLICAQKFNGLTVLPPLLTDEMIAQYTSALLAGTITSGWWFGAGAALQIPFAMQMAYRFNGIGVTQNVLYENQKLIANQFNSAIGKIQDSLSSTASALGKLQDVVNQNAQALNTLVKQLSSNFGAISSVLNDILSRLDPPEAEVQIDRLITGRLQSLQTYVTQQLIRAAEIRWSANLAATKMSECVLGQSKRVDFCGKGYHLMSFPQSAPHGVVFLHVTYVPAQEKNFTTAPAICHEGKAHFPREGVFVSNGTHWFITQRNFYEPQIITTDNTFVSGSCDVVIGIVNNTVYDPLQPELDSFKEELDKYFKNHTSPDVDLGDISGINASVVNIQKEIDRLNEVAKNLNESPIDLQELGKYEQYIKGGGSGGGQIYEGKLTAEGLRFGIVASRFNHALVDRLVEGAIDAIVRHGGREEDITLVRVPGSWEIPVAAGELARKEDIDAVIAIGVLIRGATPHFDYIASEVSKGLADLSLELRKPITFGVITADTLEQAIERAGTKHGNKGWEAALSAIEMANLFKSLR

SEQ ID NO: 3822 - protein, 1365 aa, Artificial Sequence
  SARS-CoV-2/pangolin/Guangxi/P5L/2017__EPI_ISL_410540 spike protein (1-1205)(K980P_V981P_T881W_A1014W) LumSynth construct
MFVFLFVLPLVSSQCVNLTTRTGIPPGYTNSSTRGVYYPDKVFRSSILHLTQDLFLPFFSNVTWFNTINYQGGFKKFDNPVLPFNDGVYFASTEKSNIIRGWIFGTTLDARTQSLLIVNNATNVVIKVCEFQFCTDPFLGVYYHNNNKTWVENEFRVYSSANNCTFEYISQPFLMDLEGKQGNFKNLREFVFKNVDGYFKIYSKHTPIDLVRDLPRGFAALEPLVDLPIGINITRFQTLLALHRSYLTPGKLESGWTTGAAAYYVGYLQQRTFLLSYNQNGTITDAVDCSLDPLSETKCTLKSLTVEKGIYQTSNFRVQPTISIVRFPNITNLCPFGEVFNASKFASVYAWNRKRISNCVADYSVLYNSTSFSTFKCYGVSPTKLNDLCFTNVYADSFVVKGDEVRQIAPGQTGVIADYNYKLPDDFTGCVIAWNSVKQDALTGGNYGYLYRLFRKSKLKPFERDISTEIYQAGSTPCNGQVGLNCYYPLERYGFHPTTGVNYQPFRVVVLSFELLNGPATVCGPKLSTTLVKDKCVNFNFNGLTGTGVLTTSKKQFLPFQQFGRDISDTTDAVRDPQTLEILDITPCSFGGVSVITPGTNTSNQVAVLYQDVNCTEVPMAIHAEQLTPAWRVYSAGANVFQTRAGCLVGAEHVNNSYECDIPVGAGICASYHSMSSFRSVNQRSIIAYTMSLGAENSVAYSNNSIAIPTNFTISVTTEILPVSMTKTSVDCTMYICGDSIECSNLLLQYGSFCTQLNRALTGIAVEQDKNTQEVFAQVKQIYKTPPIKDFGGFNFSQILPDPSKPSKRSFIEDLLFNKVTLADAGFIKQYGDCLGDIAARDLICAQKFNGLTVLPPLLTDEMIAQYTSALLAGTITSGWWFGAGAALQIPFAMQMAYRFNGIGVTQNVLYENQKLIANQFNSAIGKIQDSLSSTASALGKLQDVVNQNAQALNTLVKQLSSNFGAISSVLNDILSRLDPPEAEVQIDRLITGRLQSLQTYVTQQLIRAAEIRWSANLAATKMSECVLGQSKRVDFCGKGYHLMSFPQSAPHGVVFLHVTYVPAQEKNFTTAPAICHEGKAHFPREGVFVSNGTHWFITQRNFYEPQIITTDNTFVSGSCDVVIGIVNNTVYDPLQPELDSFKEELDKYFKNHTSPDVDLGDISGINASVVNIQKEIDRLNEVAKNLNESLIDLQELGKYEQYIKGGGSGGGQIYEGKLTAEGLRFGIVASRFNHALVDRLVEGAIDAIVRHGGREEDITLVRVPGSWEIPVAAGELARKEDIDAVIAIGVLIRGATPHFDYIASEVSKGLADLSLELRKPITFGVITADTLEQAIERAGTKHGNKGWEAALSAIEMANLFKSLR

SEQ ID NO: 3823 - protein, 1365 aa, Artificial Sequence
  SARS-CoV-2/pangolin/Guangxi/P5E/2017__EPI_ISL_410541 spike protein (1-1205)(K980P_V981P_T881W_A1014W) LumSynth construct
MFVFLFVLPLVSSQCVNLTTRTGIPPGYTNSSTRGVYYPDKVFRSSILHLTQDLFLPFFSNVTWFNTITYQGGSKKFDNPVLPFNDGVYFASTEKSNIIRGWIFGTTLDARTQSLLIVNNATNVVIKVCEFQFCTDPFLGVYYHNNNKTWVENEFRVYSSANNCTFEYISQPFLMDLEGKQGNFKNLREFVFKNVDGYFKIYSKHTPIDLVRDLPRGFAALEPLVDLPIGINITRFQTLLALHRSYLTPGKLESGWTTGAAAYYVGYLQQRTFLLSYNQNGTITDAVDCSLDPLSETKCTLKSLTVEKGIYQTSNFRVQPTISIVRFPNITNLCPFGEVFNASKFASVYAWNRKRISNCVADYSVLYNSTSFSTFKCYGVSPTKLNDLCFTNVYADSFVVKGDEVRQIAPGQTGVIADYNYKLPDDFTGCVIAWNSVKQDALTGDNYGYLYRLFRKSKLKPFERDISTEIYQAGSTPCNGQVGLNCYYPLERYGFHPTTGVNYQPFRVVVLSFELLNGPATVCGPKLSTTLVKDKCVNFNFNGLTGTGVLTTSKKQFLPFQQFGRDISDTTDAVRDPQTLEILDITPCSFGGVSVITPGTNTSNQVAVLYQDVNCTEVPMAIHAEQLTPAWRVYSAGANVFQTRAGCLVGAEHVNNSYECDIPVGAGICASYHSMSSFRSVNQRSIIAYTMSLGAENSVAYSNNSIAIPTNFTISVTTEILPVSMTKTSVDCTMYICGDSIECSNLLLQYGSFCTQLNRALTGIAVEQDKNTQEVFAQVKQIYKTPPIKDFGGFNFSQILPDPSKPSKRSFIEDLLFNKVTLADAGFIKQYGDCLGDIAARDLICAQKFNGLTVLPPLLTDEMIAQYTSALLAGTITSGWWFGAGAALQIPFAMQMAYRFNGIGVTQNVLYENQKLIANQFNSAIGKIQDSLSSTASALGKLQDVVNQNAQALNTLVKQLSSNFGAISSVLNDILSRLDPPEAEVQIDRLITGRLQSLQTYVTQQLIRAAEIRWSANLAATKMSECVLGQSKRVDFCGKGYHLMSFPQSAPHGVVFLHVTYVPAQEKNFTTAPAICHEGKAHFPREGVFVSNGTHWFITQRNFYEPQIITTDNTFVSGSCDVVIGIVNNTVYDPLQPELDSFKEELDKYFKNHTSPDVDLGDISGINASVVNIQKEIDRLNEVAKNLNESLIDLQELGKYEQYIKGGGSGGGQIYEGKLTAEGLRFGIVASRFNHALVDRLVEGAIDAIVRHGGREEDITLVRVPGSWEIPVAAGELARKEDIDAVIAIGVLIRGATPHFDYIASEVSKGLADLSLELRKPITFGVITADTLEQAIERAGTKHGNKGWEAALSAIEMANLFKSLR

SEQ ID NO: 3824 - protein, 1363 aa, Artificial Sequence
  SARS-CoV-2/pangolin/Guangxi/P1E/2017__EPI_ISL_410539 spike protein (1-1203)(K978P_V979P_T879W_A1012W) LumSynth construct
MFVFLFVLPLVSSQCVNLTTRTGIQPGYTNSSTRGVYYPDKVFRSSILHLTQDLFLPFFSNVTWFNTINYQGGFKKFDNPVLPFNDGVYFASTEKSNIIRGWIFGTTLDARTQSLLIVNNATNVVIKVCEFQFCTDPFLGVYYHNNNKTWVENEFRVYSSANNCTFEYISQPFLMDLEGKQGNFKNLREFVFKNVDGYFKIYSKHTPIDLVRDLPRGFAALEPLVDLPIGINITRFQTLLALHRSYLTPGKLESGWTTGAAAYYVGYLQQRTFLLSYNQNGTITDAVDCSLDPLSETKCTLKSLTVEKGIYQTSNFRVQPTISIVRFPNITNLCPFGEVFNASKFASVYAWNRKRISNCVADYSVLYNSTSFSTFKCYGVSPTKLNDLCFTNVYADSFVVKGDEVRQIAPGQTGVIADYNYKLPDDFTGCVIAWNSVKQDALTGGNYLYRLFRKSKLKPFERDISTEIYQAGSTPCNGQVGLNCYYPLERYGFHPTTGVNYQPFRVVVLSFELLNGPATVCGPKLSTTLVKDKCVNFNFNGLTGTGVLTTSKKQFLPFQQFGRDISDTTDAVRDPQTLEILDITPCSFGGVSVITPGTNTSNQVAVLYQDVNCTEVPMAIHAEQLTPAWRVYSAGANVFQTRAGCLVGAEHVNNSYECDIPVGAGICASYHSMSSLRSVNQRSIIAYTMSLGAENSVAYSNNSIAIPTNFTISVTTEILPVSMTKTSVDCTMYICGDSIECSNLLLQYGSFCTQLNRALTGIAVEQDKNTQEVFAQVKQIYKTPPIKDFGGFNFSQILPDPSKPSKRSFIEDLLFNKVTLADAGFIKQYGDCLGDIAARDLICAQKFNGLTVLPPLLTDEMIAQYTSALLAGTITSGWWFGAGAALQIPFAMQMAYRFNGIGVTQNVLYENQKLIANQFNSAIGKIQDSLSSTASALGKLQDVVNQNAQALNTLVKQLSSNFGAISSVLNDILSRLDPPEAEVQIDRLITGRLQSLQTYVTQQLIRAAEIRWSANLAATKMSECVLGQSKRVDFCGKGYHLMSFPQSAPHGVVFLHVTYVPAQEKNFTTAPAICHEGKAHFPREGVFVSNGTHWFITQRNFYEPQIITTDNTFVSGSCDVVIGIVNNTVYDPLQPELDSFKEELDKYFKNHTSPDVDLGDISGINASVVNIQKEIDRLNEVAKNLNESLIDLQELGKYEQYIKGGGSGGGQIYEGKLTAEGLRFGIVASRFNHALVDRLVEGAIDAIVRHGGREEDITLVRVPGSWEIPVAAGELARKEDIDAVIAIGVLIRGATPHFDYIASEVSKGLADLSLELRKPITFGVITADTLEQAIERAGTKHGNKGWEAALSAIEMANLFKSLR

SEQ ID NO: 3825 - protein, 1371 aa, Artificial Sequence
  SARS-CoV-2/Wuhan/WIV05/2019__EPI_ISL_402128 spike protein (1-1211)(K986P_V987P_P1069F) LumSynth construct
MFVFLVLLPLVSSQCVNLTTRTQLPPAYTNSFTRGVYYPDKVFRSSVLHSTQDLFLPFFSNVTWFHAIHVSGTNGTKRFDNPVLPFNDGVYFASTEKSNIIRGWIFGTTLDSKTQSLLIVNNATNVVIKVCEFQFCNDPFLGVYYHKNNKSWMESEFRVYSSANNCTFEYVSQPFLMDLEGKQGNFKNLREFVFKNIDGYFKIYSKHTPINLVRDLPQGFSALEPLVDLPIGINITRFQTLLALHRSYLTPGDSSSGWTAGAAAYYVGYLQPRTFLLKYNENGTITDAVDCALDPLSETKCTLKSFTVEKGIYQTSNFRVQPTESIVRFPNITNLCPFGEVFNATRFASVYAWNRKRISNCVADYSVLYNSASFSTFKCYGVSPTKLNDLCFTNVYADSFVIRGDEVRQIAPGQTGKIADYNYKLPDDFTGCVIAWNSNNLDSKVGGNYNYLYRLFRKSNLKPFERDISTEIYQAGSTPCNGVEGFNCYFPLQSYGFQPTNGVGYQPYRVVVLSFELLHAPATVCGPKKSTNLVKNKCVNFNFNGLTGTGVLTESNKKFLPFQQFGRDIADTTDAVRDPQTLEILDITPCSFGGVSVITPGTNTSNQVAVLYQDVNCTEVPVAIHADQLTPTWRVYSTGSNVFQTRAGCLIGAEHVNNSYECDIPIGAGICASYQTQTNSPRRARSVASQSIIAYTMSLGAENSVAYSNNSIAIPTNFTISVTTEILPVSMTKTSVDCTMYICGDSTECSNLLLQYGSFCTQLNRALTGIAVEQDKNTQEVFAQVKQIYKTPPIKDFGGFNFSQILPDPSKPSKRSFIEDLLFNKVTLADAGFIKQYGDCLGDIAARDLICAQKFNGLTVLPPLLTDEMIAQYTSALLAGTITSGWTFGAGAALQIPFAMQMAYRFNGIGVTQNVLYENQKLIANQFNSAIGKIQDSLSSTASALGKLQDVVNQNAQALNTLVKQLSSNFGAISSVLNDILSRLDPPEAEVQIDRLITGRLQSLQTYVTQQLIRAAEIRASANLAATKMSECVLGQSKRVDFCGKGYHLMSFPQSAPHGVVFLHVTYVFAQEKNFTTAPAICHDGKAHFPREGVFVSNGTHWFVTQRNFYEPQIITTDNTFVSGNCDVVIGIVNNTVYDPLQPELDSFKEELDKYFKNHTSPDVDLGDISGINASVVNIQKEIDRLNEVAKNLNESLIDLQELGKYEQYIKGGGSGGGQIYEGKLTAEGLRFGIVASRFNHALVDRLVEGAIDAIVRHGGREEDITLVRVPGSWEIPVAAGELARKEDIDAVIAIGVLIRGATPHFDYIASEVSKGLADLSLELRKPITFGVITADTLEQAIERAGTKHGNKGWEAALSAIEMANLFKSLR

SEQ ID NO: 3826 - protein, 1367 aa, Artificial Sequence
  SARS-CoV-2/bat/Yunnan/RaTG13/2013__EPI_ISL_402131 spike protein (1-1207)(K982P_V983P_P1065F) LumSynth construct
MFVFLVLLPLVSSQCVNLTTRTQLPPAYTNSSTRGVYYPDKVFRSSVLHLTQDLFLPFFSNVTWFHAIHVSGTNGIKRFDNPVLPFNDGVYFASTEKSNIIRGWIFGTTLDSKTQSLLIVNNATNVVIKVCEFQFCNDPFLGVYYHKNNKSWMESEFRVYSSANNCTFEYVSQPFLMDLEGKQGNFKNLREFVFKNIDGYFKIYSKHTPINLVRDLPPGFSALEPLVDLPIGINITRFQTLLALHRSYLTPGDSSSGWTAGAAAYYVGYLQPRTFLLKYNENGTITDAVDCALDPLSETKCTLKSFTVEKGIYQTSNFRVQPTDSIVRFPNITNLCPFGEVFNATTFASVYAWNRKRISNCVADYSVLYNSTSFSTFKCYGVSPTKLNDLCFTNVYADSFVITGDEVRQIAPGQTGKIADYNYKLPDDFTGCVIAWNSKHIDAKEGGNFNYLYRLFRKANLKPFERDISTEIYQAGSKPCNGQTGLNCYYPLYRYGFYPTDGVGHQPYRVVVLSFELLNAPATVCGPKKSTNLVKNKCVNFNFNGLTGTGVLTESNKKFLPFQQFGRDIADTTDAVRDPQTLEILDITPCSFGGVSVITPGTNASNQVAVLYQDVNCTEVPVAIHADQLTPTWRVYSTGSNVFQTRAGCLIGAEHVNNSYECDIPIGAGICASYQTQTNSRSVASQSIIAYTMSLGAENSVAYSNNSIAIPTNFTISVTTEILPVSMTKTSVDCTMYICGDSTECSNLLLQYGSFCTQLNRALTGIAVEQDKNTQEVFAQVKQIYKTPPIKDFGGFNFSQILPDPSKPSKRSFIEDLLFNKVTLADAGFIKQYGDCLGDIAARDLICAQKFNGLTVLPPLLTDEMIAQYTSALLAGTITSGWTFGAGAALQIPFAMQMAYRFNGIGVTQNVLYENQKLIANQFNSAIGKIQDSLSSTASALGKLQDVVNQNAQALNTLVKQLSSNFGAISSVLNDILSRLDPPEAEVQIDRLITGRLQSLQTYVTQQLIRAAEIRASANLAATKMSECVLGQSKRVDFCGKGYHLMSFPQSAPHGVVFLHVTYVFAQEKNFTTAPAICHDGKAHFPREGVFVSNGTHWFVTQRNFYEPQIITTDNTFVSGSCDVVIGIVNNTVYDPLQPELDSFKEELDKYFKNHTSPDVDLGDISGINASVVNIQKEIDRLNEVAKNLNESLIDLQELGKYEQYIKGGGSGGGQIYEGKLTAEGLRFGIVASRFNHALVDRLVEGAIDAIVRHGGREEDITLVRVPGSWEIPVAAGELARKEDIDAVIAIGVLIRGATPHFDYIASEVSKGLADLSLELRKPITFGVITADTLEQAIERAGTKHGNKGWEAALSAIEMANLFKSLR

SEQ ID NO: 3827 - protein, 1371 aa, Artificial Sequence
  SARS-CoV-2/Wuhan/HBCDC-HB-01/2019__EPI_ISL_402132 spike protein (1-1211)(K986P_V987P_P1069F) LumSynth construct
MFVFLVLLPLVSSQCVNLTTRTQLPPAYTNSITRGVYYPDKVFRSSVLHSTQDLFLPFFSNVTWFHAIHVSGTNGTKRFDNPVLPFNDGVYFASTEKSNIIRGWIFGTTLDSKTQSLLIVNNATNVVIKVCEFQFCNDPFLGVYYHKNNKSWMESEFRVYSSANNCTFEYVSQPFLMDLEGKQGNFKNLREFVFKNIDGYFKIYSKHTPINLVRDLPQGFSALEPLVDLPIGINITRFQTLLALHRSYLTPGDSSSGWTAGAAAYYVGYLQPRTFLLKYNENGTITDAVDCALDPLSETKCTLKSFTVEKGIYQTSNFRVQPTESIVRFPNITNLCPFGEVFNATRFASVYAWNRKRISNCVADYSVLYNSASFSTFKCYGVSPTKLNDLCFTNVYADSFVIRGDEVRQIAPGQTGKIADYNYKLPDDFTGCVIAWNSNNLDSKVGGNYNYLYRLFRKSNLKPFERDISTEIYQAGSTPCNGVEGFNCYFPLQSYGFQPTNGVGYQPYRVVVLSFELLHAPATVCGPKKSTNLVKNKCVNFNFNGLTGTGVLTESNKKFLPFQQFGRDIADTTDAVRDPQTLEILDITPCSFGGVSVITPGTNTSNQVAVLYQDVNCTEVPVAIHADQLTPTWRVYSTGSNVFQTRAGCLIGAEHVNNSYECDIPIGAGICASYQTQTNSPRRARSVASQSIIAYTMSLGAENSVAYSNNSIAIPTNFTISVTTEILPVSMTKTSVDCTMYICGDSTECSNLLLQYGSFCTQLNRALTGIAVEQDKNTQEVFAQVKQIYKTPPIKDFGGFNFSQILPDPSKPSKRSFIEDLLFNKVTLADAGFIKQYGDCLGDIAARDLICAQKFNGLTVLPPLLTDEMIAQYTSALLAGTITSGWTFGAGAALQIPFAMQMAYRFNGIGVTQNVLYENQKLIANQFNSAIGKIQDSLSSTASALGKLQDVVNQNAQALNTLVKQLSSNFGAISSVLNDILSRLDPPEAEVQIDRLITGRLQSLQTYVTQQLIRAAEIRASANLAATKMSECVLGQSKRVDFCGKGYHLMSFPQSAPHGVVFLHVTYVFAQEKNFTTAPAICHDGKAHFPREGVFVSNGTHWFVTQRNFYEPQIITTDNTFVSGNCDVVIGIVNNTVYDPLQPELDSFKEELDKYFKNHTSPDVDLGDISGINASVVNIQKEIDRLNEVAKNLNESLIDLQELGKYEQYIKGGGSGGGQIYEGKLTAEGLRFGIVASRFNHALVDRLVEGAIDAIVRHGGREEDITLVRVPGSWEIPVAAGELARKEDIDAVIAIGVLIRGATPHFDYIASEVSKGLADLSLELRKPITFGVITADTLEQAIERAGTKHGNKGWEAALSAIEMANLFKSLR

SEQ ID NO: 3828 - protein, 1371 aa, Artificial Sequence
  SARS-CoV-2/Guangdong/20SF028/2020__EPI_ISL_403936 spike protein (1-1211)(K986P_V987P_P1069F) LumSynth construct
MFVFLVLLPLVSSQCVNLTTRTQLPPAYTNSFTRGVYYPDKVFRSSVLYSTQDLFLPFFSNVTWFHAIHVSGTNGTKRFDNPVLPFNDGVYFASTEKSNIIRGWIFGTTLDSKTQSLLIVNNATNVVIKVCEFQFCNDPFLGVYYHKNNKSWMESEFRVYSSANNCTFEYVSQPFLMDLEGKQGNFKNLREFVFKNIDGYFKIYSKHTPINLVRDLPQGFSALEPLVDLPIGINITRFQTLLALHRSYLTPGDSSSGWTAGAAAYYVGYLQPRTFLLKYNENGTITDAVDCALDPLSETKCTLKSFTVEKGIYQTSNFRVQPTESIVRFPNITNLCPFGEVFNATRFASVYAWNRKRISNCVADYSVLYNSASFSTFKCYGVSPTKLNDLCFTNVYADSFVIRGDEVRQIAPGQTGKIADYNYKLPDDFTGCVIAWNSNNLDSKVGGNYNYLYRLFRKSNLKPFERDISTEIYQAGSTPCNGVEGFNCYFPLQSYGFQPTNGVGYQPYRVVVLSFELLHAPATVCGPKKSTNLVKNKCVNFNFNGLTGTGVLTESNKKFLPFQQFGRDIADTTDAVRDPQTLEILDITPCSFGGVSVITPGTNTSNQVAVLYQDVNCTEVPVAIHADQLTPTWRVYSTGSNVFQTRAGCLIGAEHVNNSYECDIPIGAGICASYQTQTNSPRRARSVASQSIIAYTMSLGAENSVAYSNNSIAIPTNFTISVTTEILPVSMTKTSVDCTMYICGDSTECSNLLLQYGSFCTQLNRALTGIAVEQDKNTQEVFAQVKQIYKTPPIKDFGGFNFSQILPDPSKPSKRSFIEDLLFNKVTLADAGFIKQYGDCLGDIAARDLICAQKFNGLTVLPPLLTDEMIAQYTSALLAGTITSGWTFGAGAALQIPFAMQMAYRFNGIGVTQNVLYENQKLIANQFNSAIGKIQDSLSSTASALGKLQDVVNQNAQALNTLVKQLSSNFGAISSVLNDILSRLDPPEAEVQIDRLITGRLQSLQTYVTQQLIRAAEIRASANLAATKMSECVLGQSKRVDFCGKGYHLMSFPQSAPHGVVFLHVTYVFAQEKNFTTAPAICHDGKAHFPREGVFVSNGTHWFVTQRNFYEPQIITTDNTFVSGNCDVVIGIVNNTVYDPLQPELDSFKEELDKYFKNHTSPDVDLGDISGINASVVNIQKEIDRLNEVAKNLNESLIDLQELGKYEQYIKGGGSGGGQIYEGKLTAEGLRFGIVASRFNHALVDRLVEGAIDAIVRHGGREEDITLVRVPGSWEIPVAAGELARKEDIDAVIAIGVLIRGATPHFDYIASEVSKGLADLSLELRKPITFGVITADTLEQAIERAGTKHGNKGWEAALSAIEMANLFKSLR

SEQ ID NO: 3829 - protein, 1371 aa, Artificial Sequence
  SARS-CoV-2/Shenzhen/SZTH-001/2020__EPI_ISL_406592 spike protein (1-1211)(K986P_V987P_P1069F) LumSynth construct
MFVFLVLLPLVSSQCVNLTTRTQLPPAYTNSFTRGVYYPDKVFRSSVLHSTQDLFLPFFSNVTWFHAIHVSGTNGTKRFDNPVLPFNDGVYFASTEKSNIIRGWIFGTTLDSKTQSLLIVNNATNVVIKVCEFQFCNDPFLGVYYHKNNKSWMESEFRVYSSANNCTFEYVSQPFLMDLEGKQGNFKNLREFVFKNIDGYFKIYSKHTPINLVRDLPQGFSALEPLVDLPIGINITRFQTLLALHRSYLTPGDSSSGWTAGAAAYYVGYLQPRTFLLKYNENGTITDAVDCALDPLSETKCTLKSFTVEKGIYQTSNFRVQPTESIVRFPNITNLCPFGEVFNATRFASVYAWNRKRISNCVADYSVLYNSASFSTFKCYGVSPTKLNDLCFTNVYADSFVIRGDEVRQIAPGQTGKIADYNYKLPDDFTGCVIAWNSNNLDSKVGGNYNYLYRLFRKSNLKPFERDISTEIYQAGSTPCNGVEGFNCYFPLQSYGFQPTNGVGYQPYRVVVLSFELLHAPATVCGPKKSTNLVKNKCVNFNFNGLTGTGVLTESNKKFLPFQQFGRDIADTTDAVRDPQTLEILDITPCSFGGVSVITPGTNTSNQVAVLYQDVNCTEVPVAIHADQLTPTWRVYSTGSNVFQTRAGCLIGAEHVNNSYECDIPIGAGICASYQTQTNSPRRARSVASQSIIAYTMSLGAENSVAYSNNSIAIPTNFTISVTTEILPVSMTKTSVDCTMYICGDSTECSNLLLQYGSFCTQLNRALTGIAVEQDKNTQEVFAQVKQIYKTPPIKDFGGFNFSQILPDPSKPSKRSFIEDLLFNKVTLADAGFIKQYGDCLGDIAARDLICAQKFNGLTVLPPLLTDEMIAQYTSALLAGTITSGWTFGAGAALQIPFAMQMAYRFNGIGVTQNVLYENQKLIANQFNSAIGKIQDSLSSTASALGKLQDVVNQNAQALNTLVKQLSSNFGAISSVLNDILSRLDPPEAEVQIDRLITGRLQSLQTYVTQQLIRAAEIRASANLAATKMSECVLGQSKRVDFCGKGYHLMSFPQSAPHGVVFLHVTYVFAQEKNFTTAPAICHDGKAHFPREGVFVSNGTHWFVTQRNFYEPQIITTDNTFVSGNCDVLIGIVNNTVYDPLQPELDSFKEELDKYFKNHTSPDVDLGDISGINASVVNIQKEIDRLNEVAKNLNESLIDLQELGKYEQYIKGGGSGGGQIYEGKLTAEGLRFGIVASRFNHALVDRLVEGAIDAIVRHGGREEDITLVRVPGSWEIPVAAGELARKEDIDAVIAIGVLIRGATPHFDYIASEVSKGLADLSLELRKPITFGVITADTLEQAIERAGTKHGNKGWEAALSAIEMANLFKSLR

SEQ ID NO: 3830 - protein, 1371 aa, Artificial Sequence
  SARS-CoV-2/Shenzhen/SZTH-004/2020__EPI_ISL_406595 spike protein (1-1211)(K986P_V987P_P1069F) LumSynth construct
MFVFLVLLPLVSSQCVNLTTRTQLPPAYTNSFTRGVYYPDKVFRSSVLHSTQDLFLPFFSNVTWFHAIHVSGTNGTKRFDNPVLPFNDGVYFASTEKSNIIRGWIFGTTLDSKTQSLLIVNNATNVVIKVCEFQFCNDPFLGVYYHKNNKSWMESEFRVYSSANNCTFEYVSQPFLMDLEGKQGNFKNLREFVFKNIDGYFKIYSKHTPINLVRDLPQGFSALEPLVDLPIGINITRFQTLLALHRSYLTPGDSSSGWTAGAAAYYVGYLQPRTFLLKYNENGTITDAVDCALDPLSETKCTLKSFTVEKGIYQTSNFRVQPTESIVRFPNITNLCPFGEVFNATRFASVYAWDRKRISNCVAYYSVLYNSASFSTFKCYGVSPTKLNDLCFTNVYADSFVIRGDEVRQIAPGQTGKIADYNYKLPDDFTGCVIAWNSNNLDSKVGGNYNYLYRLFRKSNLKPFERDISTEIYQAGSTPCNGVEGFNCYFPLQSYGFQPTNGVGYQPYRVVVLSFELLHAPATVCGPKKSTNLVKNKCVNFNFNGLTGTGVLTESNKKFLPFQQFGRDIADTTDAVRDPQTLEILDITPCSFGGVSVITPGTNTSNQVAVLYQDVNCTEVPVAIHADQLTPTWRVYSTGSNVFQTRAGCLIGAEHVNNSYECDIPIGAGICASYQTQTNSPRRARSVASQSIIAYTMSLGAENSVAYSNNSIAIPTNFTISVTTEILPVSMTKTSVDCTMYICGDSTECSNLLLQYGSFCTQLNRALTGIAVEQDKNTQEVFAQVKQIYKTPPIKDFGGFNFSQILPDPSKPSKRSFIEDLLFNKVTLADAGFIKQYGDCLGDIAARDLICAQKFNGLTVLPPLLTDEMIAQYTSALLAGTITSGWTFGAGAALQIPFAMQMAYRFNGIGVTQNVLYENQKLIANQFNSAIGKIQDSLSSTASALGKLQDVVNQNAQALNTLVKQLSSNFGAISSVLNDILSRLDPPEAEVQIDRLITGRLQSLQTYVTQQLIRAAEIRASANLAATKMSECVLGQSKRVDFCGKGYHLMSFPQSAPHGVVFLHVTYVFAQEKNFTTAPAICHDGKAHFPREGVFVSNGTHWFVTQRNFYEPQIITTDNTFVSGNCDVVIGIVNNTVYDPLQPELDSFKEELDKYFKNHTSPDVDLGDISGINASVVNIQKEIDRLNEVAKNLNESLIDLQELGKYEQYIKGGGSGGGQIYEGKLTAEGLRFGIVASRFNHALVDRLVEGAIDAIVRHGGREEDITLVRVPGSWEIPVAAGELARKEDIDAVIAIGVLIRGATPHFDYIASEVSKGLADLSLELRKPITFGVITADTLEQAIERAGTKHGNKGWEAALSAIEMANLFKSLR

SEQ ID NO: 3831 - protein, 1371 aa, Artificial Sequence
  SARS-CoV-2/France/IDF0372/2020__EPI_ISL_406596 spike protein (1-1211)(K986P_V987P_P1069F) LumSynth construct
MFVFLVLLPLVSSQCVNLTTRTQLPPAYTNSFTRGVYYPDKVFRSSVLHSTQDLFLPFFSNVTWFHAIHVSGTNGTKRFDNPVLPFNDGVYFASTEKSNIIRGWIFGTTLDSKTQSLLIVNNATNVVIKVCEFQFCNDPFLGVYYHKNNKSWMESEFRVYSSANNCTFEYVSQPFLMDLEGKQGNFKNLREFVFKNIDGYFKIYSKHTPINLVRDLPQGFSALEPLVDLPIGINITRFQTLLALHRSYLTPGDSSSGWTAGAAAYYVGYLQPRTFLLKYNENGTITDAVDCALDPLSETKCTLKSFTVEKGIYQTSNFRVQPTESIVRFPNITNLCPFGEVFNATRFASVYAWNRKRISNCVADYSFLYNSASFSTFKCYGVSPTKLNDLCFTNVYADSFVIRGDEVRQIAPGQTGKIADYNYKLPDDFTGCVIAWNSNNLDSKVGGNYNYLYRLFRKSNLKPFERDISTEIYQAGSTPCNGVEGFNCYFPLQSYGFQPTNGVGYQPYRVVVLSFELLHAPATVCGPKKSTNLVKNKCVNFNFNGLTGTGVLTESNKKFLPFQQFGRDIADTTDAVRDPQTLEILDITPCSFGGVSVITPGTNTSNQVAVLYQDVNCTEVPVAIHADQLTPTWRVYSTGSNVFQTRAGCLIGAEHVNNSYECDIPIGAGICASYQTQTNSPRRARSVASQSIIAYTMSLGAENSVAYSNNSIAIPTNFTISVTTEILPVSMTKTSVDCTMYICGDSTECSNLLLQYGSFCTQLNRALTGIAVEQDKNTQEVFAQVKQIYKTPPIKDFGGFNFSQILPDPSKPSKRSFIEDLLFNKVTLADAGFIKQYGDCLGDIAARDLICAQKFNGLTVLPPLLTDEMIAQYTSALLAGTITSGWTFGAGAALQIPFAMQMAYRFNGIGVTQNVLYENQKLIANQFNSAIGKIQDSLSSTASALGKLQDVVNQNAQALNTLVKQLSSNFGAISSVLNDILSRLDPPEAEVQIDRLITGRLQSLQTYVTQQLIRAAEIRASANLAATKMSECVLGQSKRVDFCGKGYHLMSFPQSAPHGVVFLHVTYVFAQEKNFTTAPAICHDGKAHFPREGVFVSNGTHWFVTQRNFYEPQIITTDNTFVSGNCDVVIGIVNNTVYDPLQPELDSFKEELDKYFKNHTSPDVDLGDISGINASVVNIQKEIDRLNEVAKNLNESLIDLQELGKYEQYIKGGGSGGGQIYEGKLTAEGLRFGIVASRFNHALVDRLVEGAIDAIVRHGGREEDITLVRVPGSWEIPVAAGELARKEDIDAVIAIGVLIRGATPHFDYIASEVSKGLADLSLELRKPITFGVITADTLEQAIERAGTKHGNKGWEAALSAIEMANLFKSLR

SEQ ID NO: 3832 - protein, 1371 aa, Artificial Sequence
  SARS-CoV-2/Australia/VIC01/2020__EPI_ISL_406844 spike protein (1-1211)(K986P_V987P_P1069F) LumSynth construct
MFVFLVLLPLVSSQCVNLTTRTQLPPAYTNSFTRGVYYPDKVFRSSVLHSTQDLFLPFFSNVTWFHAIHVSGTNGTKRFDNPVLPFNDGVYFASTEKSNIIRGWIFGTTLDSKTQSLLIVNNATNVVIKVCEFQFCNDPFLGVYYHKNNKSWMESEFRVYSSANNCTFEYVSQPFLMDLEGKQGNFKNLREFVFKNIDGYFKIYSKHTPINLVRDLPQGFSALEPLVDLPIGINITRFQTLLALHRRYLTPGDSSSGWTAGAAAYYVGYLQPRTFLLKYNENGTITDAVDCALDPLSETKCTLKSFTVEKGIYQTSNFRVQPTESIVRFPNITNLCPFGEVFNATRFASVYAWNRKRISNCVADYSVLYNSASFSTFKCYGVSPTKLNDLCFTNVYADSFVIRGDEVRQIAPGQTGKIADYNYKLPDDFTGCVIAWNSNNLDSKVGGNYNYLYRLFRKSNLKPFERDISTEIYQAGSTPCNGVEGFNCYFPLQSYGFQPTNGVGYQPYRVVVLSFELLHAPATVCGPKKSTNLVKNKCVNFNFNGLTGTGVLTESNKKFLPFQQFGRDIADTTDAVRDPQTLEILDITPCSFGGVSVITPGTNTSNQVAVLYQDVNCTEVPVAIHADQLTPTWRVYSTGSNVFQTRAGCLIGAEHVNNSYECDIPIGAGICASYQTQTNSPRRARSVASQSIIAYTMSLGAENSVAYSNNSIAIPTNFTISVTTEILPVSMTKTSVDCTMYICGDSTECSNLLLQYGSFCTQLNRALTGIAVEQDKNTQEVFAQVKQIYKTPPIKDFGGFNFSQILPDPSKPSKRSFIEDLLFNKVTLADAGFIKQYGDCLGDIAARDLICAQKFNGLTVLPPLLTDEMIAQYTSALLAGTITSGWTFGAGAALQIPFAMQMAYRFNGIGVTQNVLYENQKLIANQFNSAIGKIQDSLSSTASALGKLQDVVNQNAQALNTLVKQLSSNFGAISSVLNDILSRLDPPEAEVQIDRLITGRLQSLQTYVTQQLIRAAEIRASANLAATKMSECVLGQSKRVDFCGKGYHLMSFPQSAPHGVVFLHVTYVFAQEKNFTTAPAICHDGKAHFPREGVFVSNGTHWFVTQRNFYEPQIITTDNTFVSGNCDVVIGIVNNTVYDPLQPELDSFKEELDKYFKNHTSPDVDLGDISGINASVVNIQKEIDRLNEVAKNLNESLIDLQELGKYEQYIKGGGSGGGQIYEGKLTAEGLRFGIVASRFNHALVDRLVEGAIDAIVRHGGREEDITLVRVPGSWEIPVAAGELARKEDIDAVIAIGVLIRGATPHFDYIASEVSKGLADLSLELRKPITFGVITADTLEQAIERAGTKHGNKGWEAALSAIEMANLFKSLR

SEQ ID NO: 3833 - protein, 1371 aa, Artificial Sequence
  SARS-CoV-2/Germany/BavPat1/2020__EPI_ISL_406862 spike protein (1-1211)(K986P_V987P_P1069F) LumSynth construct
MFVFLVLLPLVSSQCVNLTTRTQLPPAYTNSFTRGVYYPDKVFRSSVLHSTQDLFLPFFSNVTWFHAIHVSGTNGTKRFDNPVLPFNDGVYFASTEKSNIIRGWIFGTTLDSKTQSLLIVNNATNVVIKVCEFQFCNDPFLGVYYHKNNKSWMESEFRVYSSANNCTFEYVSQPFLMDLEGKQGNFKNLREFVFKNIDGYFKIYSKHTPINLVRDLPQGFSALEPLVDLPIGINITRFQTLLALHRSYLTPGDSSSGWTAGAAAYYVGYLQPRTFLLKYNENGTITDAVDCALDPLSETKCTLKSFTVEKGIYQTSNFRVQPTESIVRFPNITNLCPFGEVFNATRFASVYAWNRKRISNCVADYSVLYNSASFSTFKCYGVSPTKLNDLCFTNVYADSFVIRGDEVRQIAPGQTGKIADYNYKLPDDFTGCVIAWNSNNLDSKVGGNYNYLYRLFRKSNLKPFERDISTEIYQAGSTPCNGVEGFNCYFPLQSYGFQPTNGVGYQPYRVVVLSFELLHAPATVCGPKKSTNLVKNKCVNFNFNGLTGTGVLTESNKKFLPFQQFGRDIADTTDAVRDPQTLEILDITPCSFGGVSVITPGTNTSNQVAVLYQGVNCTEVPVAIHADQLTPTWRVYSTGSNVFQTRAGCLIGAEHVNNSYECDIPIGAGICASYQTQTNSPRRARSVASQSIIAYTMSLGAENSVAYSNNSIAIPTNFTISVTTEILPVSMTKTSVDCTMYICGDSTECSNLLLQYGSFCTQLNRALTGIAVEQDKNTQEVFAQVKQIYKTPPIKDFGGFNFSQILPDPSKPSKRSFIEDLLFNKVTLADAGFIKQYGDCLGDIAARDLICAQKFNGLTVLPPLLTDEMIAQYTSALLAGTITSGWTFGAGAALQIPFAMQMAYRFNGIGVTQNVLYENQKLIANQFNSAIGKIQDSLSSTASALGKLQDVVNQNAQALNTLVKQLSSNFGAISSVLNDILSRLDPPEAEVQIDRLITGRLQSLQTYVTQQLIRAAEIRASANLAATKMSECVLGQSKRVDFCGKGYHLMSFPQSAPHGVVFLHVTYVFAQEKNFTTAPAICHDGKAHFPREGVFVSNGTHWFVTQRNFYEPQIITTDNTFVSGNCDVVIGIVNNTVYDPLQPELDSFKEELDKYFKNHTSPDVDLGDISGINASVVNIQKEIDRLNEVAKNLNESLIDLQELGKYEQYIKGGGSGGGQIYEGKLTAEGLRFGIVASRFNHALVDRLVEGAIDAIVRHGGREEDITLVRVPGSWEIPVAAGELARKEDIDAVIAIGVLIRGATPHFDYIASEVSKGLADLSLELRKPITFGVITADTLEQAIERAGTKHGNKGWEAALSAIEMANLFKSLR

SEQ ID NO: 3834 - protein, 1371 aa, Artificial Sequence
  SARS-CoV-2/Wuhan/HBCDC-HB-02/2020__EPI_ISL_412978 spike protein (1-1211)(K986P_V987P_P1069F) LumSynth construct
MFVFLVLLPLVSSQCVNLTTRTQLPPAYTNSFTRGVYYPDKVFRSSVLHSTQDLFLPFFSNVTWFHAIHVSGTNGTKRFDNPVLPFNDGVYFASTEKSNIIRGWIFGTTLDSKTQSLLIVNNATNVVIKVCEFQFCNDPFLGVYYHKNNKSWMESEFRVYSSANNCTFEYVSQPFLMDLEGKQGNFKNLREFVFKNIDGYFKIYSKHTPINLVRDLPQGFSALEPLVDLPIGINITRFQTLLALHRSYLTPGDSSSGWTAGAAAYYVGYLQPRTFLLKYNENGTITDAVDCALDPLSETKCTLKSFTVEKGIYQTSNFRVQPTESIVRFPNITNLCPFGEVFNATRFASVYAWNRKRISNCVADYSVLYNSASFSTFKCYGVSPTKLNDLCFTNVYADSFVIRGDEVRQIAPGQTGKIADYNYKLPDDFTGCVIAWNSNNLDSKVGGNYNYLYRLFRKSNLKPFERDISTEIYQAGSTPCNGVEGFNCYFPLQSYGFQPTNGVGYQPYRVVVLSFELLHAPATVCGPKKSTNLVKNKCVNFNFNGLTGTGVLTESNKKFLPFQQFGRDIADTTDAVRDPQTLEILDITPCSFGGVSVITPGTNTSNQVAVLYQDVNCTEVPVAIHADQLTPTWRVYSTGSNVFQTRAGCLIGAEHVNNSYECDIPIGAGICASYQTQTNSPRRARSVASQSIIAYTMSLGAENSVAYSNNSIAIPTNFTISVTTEILPVSMTKTSVDCTMYICGDSTECSNFLLQYGSFCTQLNRALTGIAVEQDKNTQEVFAQVKQIYKTPPIKDFGGFNFSQILPDPSKPSKRSFIEDLLFNKVTLADAGFIKQYGDCLGDIAARDLICAQKFNGLTVLPPLLTDEMIAQYTSALLAGTITSGWTFGAGAALQIPFAMQMAYRFNGIGVTQNVLYENQKLIANQFNSAIGKIQDSLSSTASALGKLQDVVNQNAQALNTLVKQLSSNFGAISSVLNDILSRLDPPEAEVQIDRLITGRLQSLQTYVTQQLIRAAEIRASANLAATKMSECVLGQSKRVDFCGKGYHLMSFPQSAPHGVVFLHVTYVFAQEKNFTTAPAICHDGKAHFPREGVFVSNGTHWFVTQRNFYEPQIITTDNTFVSGNCDVVIGIVNNTVYDPLQPELDSFKEELDKYFKNHTSPDVDLGDISGINASVVNIQKEIDRLNEVAKNLNESLIDLQELGKYEQYIKGGGSGGGQIYEGKLTAEGLRFGIVASRFNHALVDRLVEGAIDAIVRHGGREEDITLVRVPGSWEIPVAAGELARKEDIDAVIAIGVLIRGATPHFDYIASEVSKGLADLSLELRKPITFGVITADTLEQAIERAGTKHGNKGWEAALSAIEMANLFKSLR

SEQ ID NO: 3835 - protein, 1371 aa, Artificial Sequence
  SARS-CoV-2/Australia/QLD02/2020__EPI_ISL_407896 spike protein (1-1211)(K986P_V987P_P1069F) LumSynth construct
MFVFLVLLPLVSSQCVNLTTRTQLPPAYTNSFTRGVYYPDKVFRSSVLHSTQDLFLPFFSNVTWFHAIHVSGTNGTKRFDNPVLPFNDGVYFASTEKSNIIRGWIFGTTLDSKTQSLLIVNNATNVVIKVCEFQFCNDPFLGVYYHKNNKSWMESEFRVYSSANNCTFEYVSQPFLMDLEGKQGNFKNLREFVFKNIDGYFKIYSKHTPINLVRDLPQGFSALEPLVDLPIGINITRFQTLLALHRSYLTPGDSSSGWTAGAAAYYVGYLQPRTFLLKYNENGTITDAVDCALDPLSETKCTLKSFTVEKGIYQTSNFRVQPTESIVRFPNITNLCPFGEVFNATRFASVYAWNRKRISNCVADYSVLYNSASFSTFKCYGVSPTKLNDLCFTNVYADSFVIRGDEVRQIAPGQTGKIADYNYKLPDDFTGCVIAWNSNNLDSKVGGNYNYLYRLFRKSNLKPFERDISTEIYQAGSTPCNGVEGFNCYFPLQSYGFQPTNGVGYQPYRVVVLSFELLHAPATVCGPKKSTNLVKNKCVNFNFNGLTGTGVLTESNKKFLPFQQFGRDIADTTDAVRDPQTLEILDITPCSFGGVSVITPGTNTSNQVAVLYQDVNCTEVPVAIHADQLTPTWRVYSTGSNVFQTRAGCLIGAEHVNNSYECDIPIGAGICASYQTQTNSPRRARSVASQSIIAYTMSLGAENSVAYSNNSIAIPTNFTISVTTEILPVSMTKTSVDCTMYICGDSTECSNLLLQYGSFCTQLNRALTGIAVEQDKNTQEVFAQVKQIYKTPPIKDFGGFNFSQILPDPSKPSKRSFIEDLLFNKVTLADAGFIKQYGDCLGDIAARDLICAQKFNGLTVLPPLLTDEMIAQYTSALLAGTITSGWTFGAGAALQIPFAMQMAYRFNGIGVTQNVLYENQKLIANQFNSAIGKIQDSLSSTASALGKLQDVVNQNAQALNTLVKQLSSNFGAISSVLNDILSRLDPPEAEVQIDRLITGRLQSLQTYVTQQLIRAAEIRASANLAATKMSECVLGQSKRVDFCGKGYHLMSFPQSAPHGVVFLHVTYVFAQEKNFTTAPAICHDGKAHFPREGVFVSNGTHWFVTQRNFYEPQIITTDNTFVSGNCDVVIGIVNNTVYDPLQLELDSFKEELDKYFKNHTSPDVDLGDISGINASVVNIQKEIDRLNEVAKNLNESLIDLQELGKYEQYIKGGGSGGGQIYEGKLTAEGLRFGIVASRFNHALVDRLVEGAIDAIVRHGGREEDITLVRVPGSWEIPVAAGELARKEDIDAVIAIGVLIRGATPHFDYIASEVSKGLADLSLELRKPITFGVITADTLEQAIERAGTKHGNKGWEAALSAIEMANLFKSLR

SEQ ID NO: 3836 - protein, 1371 aa, Artificial Sequence
  SARS-CoV-2/India/1-31/2020__EPI_ISL_413523 spike protein (1-1211)(K986P_V987P_P1069F) LumSynth construct
MFVFLVLLPLVSSQCVNLTTRTQLPPAYTNSFTRGVYYPDKVFRSSVLHSTQDLFLPFFSNVTWFHAIHVSGTNGTKRFDNPVLPFNDGVYFASTEKSNIIRGWIFGTTLDSKTQSLLIVNNATNVVIKVCEFQFCNDPFLGVYYHKNNKSWMESEFRVYSSANNCTFEYVSQPFLMDLEGKQGNFKNLREFVFKNIDGYFKIYSKHTPINLVRDLPQGFSALEPLVDLPIGINITRFQTLLALHRSYLTPGDSSSGWTAGAAAYYVGYLQPRTFLLKYNENGTITDAVDCALDPLSETKCTLKSFTVEKGIYQTSNFRVQPTESIVRFPNITNLCPFGEVFNATRFASVYAWNRKRISNCVADYSVLYNSASFSTFKCYGVSPTKLNDLCFTNVYADSFVIRGDEVRQIAPGQTGKIADYNYKLPDDFTGCVIAWNSNNLDSKVGGNYNYLYRLFRKSNLKPFERDISTEIYQAGSTPCNGVEGFNCYFPLQSYGFQPTNGVGYQPYRVVVLSFELLHAPATVCGPKKSTNLVKNKCVNFNFNGLTGTGVLTESNKKFLPFQQFGRDIADTTDAVRDPQTLEILDITPCSFGGVSVITPGTNTSNQVAVLYQDVNCTEVPVAIHADQLTPTWRVYSTGSNVFQTRAGCLIGAEHVNNSYECDIPIGAGICASYQTQTNSPRRARSVASQSIIAYTMSLGAENSVAYSNNSIAIPTNFTISVTTEILPVSMTKTSVDCTMYICGDSTECSNLLLQYGSFCTQLNRALTGIAVEQDKNTQEVFAQVKQIYKTPPIKDFGGFNFSQILPDPSKPSKRSFIEDLLFNKVTLADAGFIKQYGDCLGDIAARDLICAQKFNGLTVLPPLLTDEMIAQYTSALLAGTITSGWTFGAGAALQIPFAMQMAYRFNGIGVTQNVLYENQKLIANQFNSVIGKIQDSLSSTASALGKLQDVVNQNAQALNTLVKQLSSNFGAISSVLNDILSRLDPPEAEVQIDRLITGRLQSLQTYVTQQLIRAAEIRASANLAATKMSECVLGQSKRVDFCGKGYHLMSFPQSAPHGVVFLHVTYVFAQEKNFTTAPAICHDGKAHFPREGVFVSNGTHWFVTQRNFYEPQIITTDNTFVSGNCDVVIGIVNNTVYDPLQPELDSFKEELDKYFKNHTSPDVDLGDISGINASVVNIQKEIDRLNEVAKNLNESLIDLQELGKYEQYIKGGGSGGGQIYEGKLTAEGLRFGIVASRFNHALVDRLVEGAIDAIVRHGGREEDITLVRVPGSWEIPVAAGELARKEDIDAVIAIGVLIRGATPHFDYIASEVSKGLADLSLELRKPITFGVITADTLEQAIERAGTKHGNKGWEAALSAIEMANLFKSLR

SEQ ID NO: 3837 - protein, 1371 aa, Artificial Sequence
  SARS-CoV-2/Guangdong/GD2020087-P0008/2020__EPI_ISL_413863 spike protein (1-1211)(K986P_V987P_P1069F) LumSynth construct
MFVFLVLLPLVSSQCVNLTTRTQLPPAYTNSFTRGVYYPDKVFRSSVLHSTQDLFLPFFSNVTWFHAIHVSGTNGTKRFDNPVLPFNDGVYFASTEKSNIIRGWIFGTTLDSKTQSLLIVNNATNVVIKVCEFQFCNDPFLGVYYHKNNKSWMESEFRVYSSANNCTFEYVSQPFLMDLEGKQGNFKNLREFVFKNIDGYFKIYSKHTPINLVRDLPQGFSALEPLVDLPIGINITRFQTLLALHRSYLTPGDSSSGWTAGAAAYYVGYLQPRTFLLKYNENGTITDAVDCALDPLSETKCTLKSFTVEKGIYQTSNFRVQPTESIVRFPNITNLCPFGEVFNATRFASVYAWNRKRISNCVADYSVLYNSASFSTFKCYGVSPTKLNDLCFTNVYADSFVIRGDEVREIAPGQTGKIADYNYKLPDDFTGCVIAWNSNNLDSKVGGNYNYLYRLFRKSNLKPFERDISTEIYQAGSTPCNGVEGFNCYFPLQSYGFQPTNGVGYQPYRVVVLSFELLHAPATVCGPKKSTNLVKNKCVNFNFNGLTGTGVLTESNKKFLPFQQFGRDIADTTDAVRDPQTLEILDITPCSFGGVSVITPGTNTSNQVAVLYQDVNCTEVPVAIHADQLTPTWRVYSTGSNVFQTRAGCLIGAEHVNNSYECDIPIGAGICASYQTQTNSPRRARSVASQSIIAYTMSLGAENSVAYSNNSIAIPTNFTISVTTEILPVSMTKTSVDCTMYICGDSTECSNLLLQYGSFCTQLNRALTGIAVEQDKNTQEVFAQVKQIYKTPPIKDFGGFNFSQILPDPSKPSKRSFIEDLLFNKVTLADAGFIKQYGDCLGDIAARDLICAQKFNGLTVLPPLLTDEMIAQYTSALLAGTITSGWTFGAGAALQIPFAMQMAYRFNGIGVTQNVLYENQKLIANQFNSAIGKIQDSLSSTASALGKLQDVVNQNAQALNTLVKQLSSNFGAISSVLNDILSRLDPPEAEVQIDRLITGRLQSLQTYVTQQLIRAAEIRASANLAATKMSECVLGQSKRVDFCGKGYHLMSFPQSAPHGVVFLHVTYVFAQEKNFTTAPAICHDGKAHFPREGVFVSNGTHWFVTQRNFYEPQIITTDNTFVSGNCDVVIGIVNNTVYDPLQPELDSFKEELDKYFKNHTSPDVDLGDISGINASVVNIQKEIDRLNEVAKNLNESLIDLQELGKYEQYIKGGGSGGGQIYEGKLTAEGLRFGIVASRFNHALVDRLVEGAIDAIVRHGGREEDITLVRVPGSWEIPVAAGELARKEDIDAVIAIGVLIRGATPHFDYIASEVSKGLADLSLELRKPITFGVITADTLEQAIERAGTKHGNKGWEAALSAIEMANLFKSLR

SEQ ID NO: 3838 - protein, 1371 aa, Artificial Sequence
  SARS-CoV-2/Sweden/01/2020__EPI_ISL_411951 spike protein (1-1211)(K986P_V987P_P1069F) LumSynth construct
MFVFLVLLPLVSSQCVNLTTRTQLPPAYTNSFTRGVYYPDKVFRSSVLHSTQDLFLPFFSNVTWFHAIHVSGTNGTKRFDNPVLPFNDGVYFASTEKSNIIRGWIFGTTLDSKTQSLLIVNNATNVVIKVCEFQFCNDPFLGVYYHKNNKSWMESEFRVYSSANNCTFEYVSQPFLMDLEGKQGNFKNLREFVFKNIDGYFKIYSKHTPINLVRDLPQGFSALEPLVDLPIGINITRFQTLLALHRSYLTPGDSSSGWTAGAAAYYVGYLQPRTFLLKYNENGTITDAVDCALDPLSETKCTLKSFTVEKGIYQTSNFRVQPTESIVRFPNITNLCPFGEVFNATRFASVYAWNRKRISNCVADYSVLYNSASFSTFKCYGVSPTKLNDLCFTNVYADSFVIRGDEVRQIAPGQTGKIADYNYKLPDDFTGCVIAWNSNNLDSKVGGNYNYLYRLFRKSNLKPFERDISTEIYQAGSTPCNGVEGFNCYFPLQSYGFQPTNGVGYQPYRVVVLSFELLHAPATVCGPKKSTNLVKNKCVNFNFNGLTGTGVLTESNKKFLPFQQFGRDIADTTDAVRDPQTLEILDITPCSFGGVSVITPGTNTSNQVAVLYQDVNCTEVPVAIHADQLTPTWRVYSTGSNVFQTRAGCLIGAEHVNNSYECDIPIGAGICASYQTQTNSPRRARSVASQSIIAYTMSLGAENSVAYSNNSIAIPTNFTISVTTEILPVSMTKTSVDCTMYICGDSTECSNLLLQYGSFCTQLNRALTGIAVEQDKNTQEVFAQVKQIYKTPPIKDCGGFNFSQILPDPSKPSKRSFIEDLLFNKVTLADAGFIKQYGDCLGDIAARDLICAQKFNGLTVLPPLLTDEMIAQYTSALLAGTITSGWTFGAGAALQIPFAMQMAYRFNGIGVTQNVLYENQKLIANQFNSAIGKIQDSLSSTASALGKLQDVVNQNAQALNTLVKQLSSNFGAISSVLNDILSRLDPPEAEVQIDRLITGRLQSLQTYVTQQLIRAAEIRASANLAATKMSECVLGQSKRVDFCGKGYHLMSFPQSAPHGVVFLHVTYVFAQEKNFTTAPAICHDGKAHFPREGVFVSNGTHWFVTQRNFYEPQIITTDNTFVSGNCDVVIGIVNNTVYDPLQPELDSFKEELDKYFKNHTSPDVDLGDISGINASVVNIQKEIDRLNEVAKNLNESLIDLQELGKYEQYIKGGGSGGGQIYEGKLTAEGLRFGIVASRFNHALVDRLVEGAIDAIVRHGGREEDITLVRVPGSWEIPVAAGELARKEDIDAVIAIGVLIRGATPHFDYIASEVSKGLADLSLELRKPITFGVITADTLEQAIERAGTKHGNKGWEAALSAIEMANLFKSLR

SEQ ID NO: 3839 - protein, 1371 aa, Artificial Sequence
  SARS-CoV-2/Tianmen/HBCDC-HB-07/2020__EPI_ISL_412983 spike protein (1-1211)(K986P_V987P_P1069F) LumSynth construct
MFVFLVLLPLVSSQCVNLTTRTQLPPAYTNSFTRGVYYPDKVFRSSVLHSTQDLFLPFFSNVTWFHAIHVSGTNGTKRFDNPVLPFNDGVYFASTEKSNIIRGWIFGTTLDSKTQSLLIVNNATNVVIKVCEFQFCNDPFLGVYYHKNNKSWMESEFRVYSSANNCTFEYVSQPFLMDLEGKQGNFKNLREFVFKNIDGYFKIYSKHTPINLVRDLPQGFSALEPLVDLPIGINITRFQTLLALHRSYLTPGDSSSGWTAGAAAYYVGYLQPRTFLLKYNENGTITDAVDCALDPLSETKCTLKSFTVEKGIYQTSNFRVQPTESIVRFPNITNLCPFGEVFNATRFASVYAWNRKRISNCVADYSVLYNSASFSTFKCYGVSPTKLNDLCFTNVYADSFVIRGDEVRQIAPGQTGKIADYNYKLPDDFTGCVIAWNSNNLDSKVGGNYNYLYRLFRKSNLKPFERDISTEIYQAGSTPCNGVEGFNCYFPLQSYGFQPTNGVGYQPYRVVVLSFELLHAPATVCGPKKSTNLVKNKCVNFNFNGLTGTGVLTESNKKFLPFQQFGRDIADTTDAVRDPQTLEILDITPCSFGGVSVITPGTNTSNQVAVLYQDLNCTEVPVAIHADQLTPTWRVYSTGSNVFQTRAGCLIGAEHVNNSYECDIPIGAGICASYQTQTNSPRRARSVASQSIIAYTMSLGAENSVAYSNNSIAIPTNFTISVTTEILPVSMTKTSVDCTMYICGDSTECSNLLLQYGSFCTQLNRALTGIAVEQDKNTQEVFAQVKQIYKTPPIKDFGGFNFSQILPDPSKPSKRSFIEDLLFNKVTLADAGFIKQYGDCLGDIAARDLICAQKFNGLTVLPPLLTDEMIAQYTSALLAGTITSGWTFGAGAALQIPFAMQMAYRFNGIGVTQNVLYENQKLIANQFNSAIGKIQDSLSSTASALGKLQDVVNQNAQALNTLVKQLSSNFGAISSVLNDILSRLDPPEAEVQIDRLITGRLQSLQTYVTQQLIRAAEIRASANLAATKMSECVLGQSKRVDFCGKGYHLMSFPQSAPHGVVFLHVTYVFAQEKNFTTAPAICHDGKAHFPREGVFVSNGTHWFVTQRNFYEPQIITTDNTFVSGNCDVVIGIVNNTVYDPLQPELDSFKEELDKYFKNHTSPDVDLGDISGINASVVNIQKEIDRLNEVAKNLNESLIDLQELGKYEQYIKGGGSGGGQIYEGKLTAEGLRFGIVASRFNHALVDRLVEGAIDAIVRHGGREEDITLVRVPGSWEIPVAAGELARKEDIDAVIAIGVLIRGATPHFDYIASEVSKGLADLSLELRKPITFGVITADTLEQAIERAGTKHGNKGWEAALSAIEMANLFKSLR

SEQ ID NO: 3840 - protein, 1371 aa, Artificial Sequence
  SARS-CoV-2/Hong Kong/case42_VM20002493/2020__EPI_ISL_414527 spike protein (1-1211)(K986P_V987P_P1069F) LumSynth construct
MFVFLVLLPLVSSQCVNLTTRTQLPPAYTNSFTRGVYYPDKVFRSSVLHSTQDLFLPFFSNVTWFHAIHVSGTNGTKRFDNPVLPFNDGVYFASTEKSNIIRGWIFGTTLDSKTQSLLIVNNATNVVIKVCEFQFCNDPFLGVYYHKNNKSWMESEFRVYSSANNCTFEYVSQPFLMDLEGKQGNFKNLREFVFKNIDGYFKIYSKHTPINLVRDLPQGFSALEPLVDLPIGINITRFQTLLALHRSYLTPGDSSSGWTAGAAAYYVGYLQPRTFLLKYNENGTITDAVDCALDPLSETKCTLKSFTVEKGIYQTSNFRVQPTESIVRFPNITNLCPFGEVFNATRFASVYAWNRKRISNCVADYSVLYNSASFSTFKCYGVSPTKLNDLCFTNVYADSFVIRGDEVRQIAPGQTGKIADYNYKLPDDFTGCVIAWNSNNLDSKVGGNYNYLYRLFRKSNLKPFERDISTEIYQAGSTPCNGVEGFNCYFPLQSYGFQPTNGVGYQPYRVVVLSFELLHAPATVCGPKKSTNLVKNKCVNFNFNGLTGTGVLTESNKKFLPFQQFGRDIADTTDAVRDPQTLEILDITPCSFGGVSVITPGTNTSNQVAVLYQDVNCTEVPVAIHADQLTPTWRVYSTGSNVFQTRAGCLIGAEHVNNSYECDIPIGAGICASYQTQTNSPRRARSVASQSIIAYTMSLGAENSVAYSNNSIAIPTNFAISVTTEILPVSMTKTSVDCTMYICGDSTECSNLLLQYGSFCTQLNRALTGIAVEQDKNTQEVFAQVKQIYKTPPIKDFGGFNFSQILPDPSKPSKRSFIEDLLFNKVTLADAGFIKQYGDCLGDIAARDLICAQKFNGLTVLPPLLTDEMIAQYTSALLAGTITSGWTFGAGAALQIPFAMQMAYRFNGIGVTQNVLYENQKLIANQFNSAIGKIQDSLSSTASALGKLQDVVNQNAQALNTLVKQLSSNFGAISSVLNDILSRLDPPEAEVQIDRLITGRLQSLQTYVTQQLIRAAEIRASANLAATKMSECVLGQSKRVDFCGKGYHLMSFPQSAPHGVVFLHVTYVFAQEKNFTTAPAICHDGKAHFPREGVFVSNGTHWFVTQRNFYEPQIITTDNTFVSGNCDVVIGIVNNTVYDPLQPELDSFKEELDKYFKNHTSPDVDLGDISGINASVVNIQKEIDRLNEVAKNLNESLIDLQELGKYEQYIKGGGSGGGQIYEGKLTAEGLRFGIVASRFNHALVDRLVEGAIDAIVRHGGREEDITLVRVPGSWEIPVAAGELARKEDIDAVIAIGVLIRGATPHFDYIASEVSKGLADLSLELRKPITFGVITADTLEQAIERAGTKHGNKGWEAALSAIEMANLFKSLR

SEQ ID NO: 3841 - protein, 1371 aa, Artificial Sequence
  SARS-CoV-2/USA/CruiseA-23/2020__EPI_ISL_414482 spike protein (1-1211)(K986P_V987P_P1069F) LumSynth construct
MFVFLVLLPLVSSQCVNLTTRTQLPPAYTNSFTRGVYYPDKVFRSSVLHSTQDLFLPFFSNVTWFHAIHVSGTNGTKRFDNPVLPFNDGVYFASTEKSNIIRGWIFGTTLDSKTQSLLIVNNATNVVIKVCEFQFCNDPFLGVYYHKNNKSWMESEFRVYSSANNCTFEYVSQPFLMDLEVKQGNFKNLREFVFKNIDGYFKIYSKHTPINLVRDLPQGFSALEPLVDLPIGINITRFQTLLALHRSYLTPGDSSSGWTAGAAAYYVGYLQPRTFLLKYNENGTITDAVDCALDPLSETKCTLKSFTVEKGIYQTSNFRVQPTESIVRFPNITNLCPFGEVFNATRFASVYAWNRKRISNCVADYSVLYNSASFSTFKCYGVSPTKLNDLCFTNVYADSFVIRGDEVRQIAPGQTGKIADYNYKLPDDFTGCVIAWNSNNLDSKVGGNYNYLYRLFRKSNLKPFERDISTEIYQAGSTPCNGVEGFNCYFPLQSYGFQPTNGVGYQPYRVVVLSFELLHAPATVCGPKKSTNLVKNKCVNFNFNGLTGTGVLTESNKKFLPFQQFGRDIADTTDAVRDPQTLEILDITPCSFGGVSVITPGTNTSNQVAVLYQDVNCTEVPVAIHADQLTPTWRVYSTGSNVFQTRAGCLIGAEHVNNSYECDIPIGAGICASYQTQTNSPRRARSVASQSIIAYTMSLGAENSVAYSNNSIAIPTNFTISVTTEILPVSMTKTSVDCTMYICGDSTECSNLLLQYGSFCTQLNRALTGIAVEQDKNTQEVFAQVKQIYKTPPIKDFGGFNFSQILPDPSKPSKRSFIEDLLFNKVTLADAGFIKQYGDCLGDIAARDLICAQKFNGLTVLPPLLTDEMIAQYTSALLAGTITSGWTFGAGAALQIPFAMQMAYRFNGIGVTQNVLYENQKLIANQFNSAIGKIQDSLSSTASALGKLQDVVNQNAQALNTLVKQLSSNFGAISSVLNDILSRLDPPEAEVQIDRLITGRLQSLQTYVTQQLIRAAEIRASANLAATKMSECVLGQSKRVDFCGKGYHLMSFPQSAPHGVVFLHVTYVFAQEKNFTTAPAICHDGKAHFPREGVFVSNGTHWFVTQRNFYEPQIITTDNTFVSGNCDVVIGIVNNTVYDPLQPELDSFKEELDKYFKNHTSPDVDLGDISGINASVVNIQKEIDRLNEVAKNLNESLIDLQELGKYEQYIKGGGSGGGQIYEGKLTAEGLRFGIVASRFNHALVDRLVEGAIDAIVRHGGREEDITLVRVPGSWEIPVAAGELARKEDIDAVIAIGVLIRGATPHFDYIASEVSKGLADLSLELRKPITFGVITADTLEQAIERAGTKHGNKGWEAALSAIEMANLFKSLR

SEQ ID NO: 3842 - protein, 1371 aa, Artificial Sequence
  SARS-CoV-2/Hong Kong/case85_VM20002868/2020__EPI_ISL_414519 spike protein (1-1211)(K986P_V987P_P1069F) LumSynth construct
MFVFLVLVPLVSSQCVNLTTRTQLPPAYTNSFTRGVYYPDKVFRSSVLHSTQDLFLPFFSNVTWFHAIHVSGTNGTKRFDNPVLPFNDGVYFASTEKSNIIRGWIFGTTLDSKTQSLLIVNNATNVVIKVCEFQFCNDPFLGVYYHKNNKSWMESEFRVYSSANNCTFEYVSQPFLMDLEGKQGNFKNLREFVFKNIDGYFKIYSKHTPINLVRDLPQGFSALEPLVDLPIGINITRFQTLLALHRSYLTPGDSSSGWTAGAAAYYVGYLQPRTFLLKYNENGTITDAVDCALDPLSETKCTLKSFTVEKGIYQTSNFRVQPTESIVRFPNITNLCPFGEVFNATRFASVYAWNRKRISNCVADYSVLYNSASFSTFKCYGVSPTKLNDLCFTNVYADSFVIRGDEVRQIAPGQTGKIADYNYKLPDDFTGCVIAWNSNNLDSKVGGNYNYLYRLFRKSNLKPFERDISTEIYQAGSTPCNGVEGFNCYFPLQSYGFQPTNGVGYQPYRVVVLSFELLHAPATVCGPKKSTNLVKNKCVNFNFNGLTGTGVLTESNKKFLPFQQFGRDIADTTDAVRDPQTLEILDITPCSFGGVSVITPGTNTSNQVAVLYQDVNCTEVPVAIHADQLTPTWRVYSTGSNVFQTRAGCLIGAEHVNNSYECDIPIGAGICASYQTQTNSPRRARSVASQSIIAYTMSLGAENSVAYSNNSIAIPTNFTISVTTEILPVSMTKTSVDCTMYICGDSTECSNLLLQYGSFCTQLNRALTGIAVEQDKNTQEVFAQVKQIYKTPPIKDFGGFNFSQILPDPSKPSKRSFIEDLLFNKVTLADAGFIKQYGDCLGDIAARDLICAQKFNGLTVLPPLLTDEMIAQYTSALLAGTITSGWTFGAGAALQIPFAMQMAYRFNGIGVTQNVLYENQKLIANQFNSAIGKIQDSLSSTASALGKLQDVVNQNAQALNTLVKQLSSNFGAISSVLNDILSRLDPPEAEVQIDRLITGRLQSLQTYVTQQLIRAAEIRASANLAATKMSECVLGQSKRVDFCGKGYHLMSFPQSAPHGVVFLHVTYVFAQEKNFTTAPAICHDGKAHFPREGVFVSNGTHWFVTQRNFYEPQIITTDNTFVSGNCDVVIGIVNNTVYDPLQPELDSFKEELDKYFKNHTSPDVDLGDISGINASVVNIQKEIDRLNEVAKNLNESLIDLQELGKYEQYIKGGGSGGGQIYEGKLTAEGLRFGIVASRFNHALVDRLVEGAIDAIVRHGGREEDITLVRVPGSWEIPVAAGELARKEDIDAVIAIGVLIRGATPHFDYIASEVSKGLADLSLELRKPITFGVITADTLEQAIERAGTKHGNKGWEAALSAIEMANLFKSLR

SEQ ID NO: 3843 - protein, 1371 aa, Artificial Sequence; identical to SEQ ID NO: 3833
  SARS-CoV-2/England/200990660/2020__EPI_ISL_414523 spike protein (1-1211)(K986P_V987P_P1069F) LumSynth construct

SEQ ID NO: 3844 - protein, 1371 aa, Artificial Sequence
  SARS-CoV-2/Australia/NSW09/2020__EPI_ISL_413595 spike protein (1-1211)(K986P_V987P_P1069F) LumSynth construct
MFVFLVLLPLVSSQCVNLTTRTQLPPAYTNSFTRGVYYPDKVFRSSVLHSTQDLFLPFFSNVTWFHAIHVSGTNGTKRFDNPVLPFNDGVYFASTEKSNIIRGWIFGTTLDSKTQSLLIVNNATNVVIKVCEFQFCNDPFLGVYYHKNNKSWMESEFRVYSSANNCTFEYVSQPFLMDLEGKQGNFKNLREFVFKNIDGYFKIYSKHTPINLVRDLPQGFSALEPLVDLPIGINITRFQTLLALHRSYLTPGDSSSGWTAGAAAYYVGYLQPRTFLLKYNENGTITDAVDCALDPLSETKCTLKSFTVEKGIYQTSNFRVQPTESIVRFPNITNLCPFGEVFNATRFASVYAWNRKRISNCVADYSVLYNSASFSTFKCYGVSPTKLNDLCFTNVYADSFVIRGDEVRQIAPGQTGKIADYNYKLPDDFTGCVIAWNSNNLDSKVGGNYNYLYRLFRKSNLKPFERDISTEIYQAGSTPCNGVEGFNCYFPLQSYGFQPTNGVGYQPYRVVVLSFELLHAPATVCGPKKSTNLVKNKCVNFNFNGLTGTGVLTESNKKFLPFQQFGRDIADTTDAVRDPQTLEILDITPCSFGGVSVITPGTNTSNQVAVLYQDVNCTEVPVAIHADQLTPTWRVYSTGSNVFQTRAGCLIGAEHVNNSYECDIPIGAGICASYQTQTNSPRRARSVASQSIIAYTMSLGAENSVAYSNNSIAIPTNFTISVTTEILPVSMTKTSVDCTMYICGDSTECSNLLLQYGSFCTQLNRALTGIAVEQDKNTQEVFAQVKQIYKTPPIKDFGGFNFSQILPDPSKPSKRSFIEDLLFNKVTLADAGFIKQYGDCLGDIAARDLICAQKFNGLTVLPPLLTDEMIAQYTSALLAGTITSGWTFGAGAALQIPFAMQMAYRFNGIGVTQNVLYENQKLIANQFNSAIGKIQDSLSFTASALGKLQDVVNQNAQALNTLVKQLSSNFGAISSVLNDILSRLDPPEAEVQIDRLITGRLQSLQTYVTQQLIRAAEIRASANLAATKMSECVLGQSKRVDFCGKGYHLMSFPQSAPHGVVFLHVTYVFAQEKNFTTAPAICHDGKAHFPREGVFVSNGTHWFVTQRNFYEPQIITTDNTFVSGNCDVVIGIVNNTVYDPLQPELDSFKEELDKYFKNHTSPDVDLGDISGINASVVNIQKEIDRLNEVAKNLNESLIDLQELGKYEQYIKGGGSGGGQIYEGKLTAEGLRFGIVASRFNHALVDRLVEGAIDAIVRHGGREEDITLVRVPGSWEIPVAAGELARKEDIDAVIAIGVLIRGATPHFDYIASEVSKGLADLSLELRKPITFGVITADTLEQAIERAGTKHGNKGWEAALSAIEMANLFKSLR

SEQ ID NO: 3845 - protein, 1371 aa, Artificial Sequence; identical to SEQ ID NO: 3825
  SARS-CoV-2/Australia/NSW10/2020__EPI_ISL_413596 spike protein (1-1211)(K986P_V987P_P1069F) LumSynth construct

SEQ ID NO: 3846 - protein, 1371 aa, Artificial Sequence
  SARS-CoV-2/Switzerland/1000477797/2020__EPI_ISL_413023 spike protein (1-1211)(K986P_V987P_P1069F) LumSynth construct
MFVFLVLLPLVSSQCVNLTTRTQLPPAYTNSFTRGVYYPDKVFRSSVLHSTQDLFLPFFSNVTWFHAIHVSGTNGTKRFDNPVLPFNDGVYFASTEKSNIIRGWIFGTTLDSKTQSLLIVNNATNVVIKVCEFQFCNDPFLGVYYHKNNKSWMESEFRVYSSANNCTFEYVSQPFLMDLEGKQGNFKNLREFVFKNIDGYFNIYSKHTPINLVRDLPQGFSALEPLVDLPIGINITRFQTLLALHRSYLTPGDSSSGWTAGAAAYYVGYLQPRTFLLKYNENGTITDAVDCALDPLSETKCTLKSFTVEKGIYQTSNFRVQPTESIVRFPNITNLCPFGEVFNATRFASVYAWNRKRISNCVADYSVLYNSASFSTFKCYGVSPTKLNDLCFTNVYADSFVIRGDEVRQIAPGQTGKIADYNYKLPDDFTGCVIAWNSNNLDSKVGGNYNYLYRLFRKSNLKPFERDISTEIYQAGSTPCNGVEGFNCYFPLQSYGFQPTNGVGYQPYRVVVLSFELLHAPATVCGPKKSTNLVKNKCVNFNFNGLTGTGVLTESNKKFLPFQQFGRDIADTTDAVRDPQTLEILDITPCSFGGVSVITPGTNTSNQVAVLYQGVNCTEVPVAIHADQLTPTWRVYSTGSNVFQTRAGCLIGAEHVNNSYECDIPIGAGICASYQTQTNSPRRARSVASQSIIAYTMSLGAENSVAYSNNSIAIPTNFTISVTTEILPVSMTKTSVDCTMYICGDSTECSNLLLQYGSFCTQLNRALTGIAVEQDKNTQEVFAQVKQIYKTPPIKDFGGFNFSQILPDPSKPSKRSFIEDLLFNKVTLADAGFIKQYGDCLGDIAARDLICAQKFNGLTVLPPLLTDEMIAQYTSALLAGTITSGWTFGAGAALQIPFAMQMAYRFNGIGVTQNVLYENQKLIANQFNSAIGKIQDSLSSTASALGKLQDVVNQNAQALNTLVKQLSSNFGAISSVLNDILSRLDPPEAEVQIDRLITGRLQSLQTYVTQQLIRAAEIRASANLAATKMSECVLGQSKRVDFCGKGYHLMSFPQSAPHGVVFLHVTYVFAQEKNFTTAPAICHDGKAHFPREGVFVSNGTHWFVTQRNFYEPQIITTDNTFVSGNCDVVIGIVNNTVYDPLQPELDSFKEELDKYFKNHTSPDVDLGDISGINASVVNIQKEIDRLNEVAKNLNESLIDLQELGKYEQYIKGGGSGGGQIYEGKLTAEGLRFGIVASRFNHALVDRLVEGAIDAIVRHGGREEDITLVRVPGSWEIPVAAGELARKEDIDAVIAIGVLIRGATPHFDYIASEVSKGLADLSLELRKPITFGVITADTLEQAIERAGTKHGNKGWEAALSAIEMANLFKSLR

SEQ ID NO: 3847 - protein, 1371 aa, Artificial Sequence
  SARS-CoV-2/Belgium/BA-02291/2020__EPI_ISL_415159 spike protein (1-1211)(K986P_V987P_P1069F) LumSynth construct
MFVFLVLLPLVSSQCVNLTTRTQLPPAYTNSFTRGVYYPDKVFRSSVLHSTQDLFLPFFSNVTWFHAIHVSGTNGTKRFDNPVLPFNDGVYFASTEKSNIIRGWIFGTTLDSKTQSLLIVNNATNVVIKVCEFQFCNDPFLGVYYHKNNKSWMESEFRVYSSANNCTFEYVSQPFLMDLEGKQGNFKNLREFVFKNIDGYFKIYSKHTPINLVRDLPQGFSALEPLVDLPIGINITRFQTLLALHRSYLTPGDSSSGWTAGAAAYYVGYLQPRTFLLKYNENGTITDAVDCALDPLSETKCTLKSFTVEKGIYQTSNFRVQPTESIVRFPNITNLCPFGEVFNATRFASVYAWNRKRISNCVADYSVLYNSASFSTFKCYGVSPTKLNDLCFTNVYADSFVIRGDEVRQIAPGQTGKIADYNYKLPDDFTGCVIAWNSNNLDSKVGGNYNYLYRLFRRSNLKPFERDISTEIYQAGSTPCNGVEGFNCYFPLQSYGFQPTNGVGYQPYRVVVLSFELLPAPATVCGPKKSTNLVKNKCVNFNFNGLTGTGVLTESNKKFLPFQQFGRDIADTTDAVRDPQTLEILDITPCSFGGVSVITPGTNTSNQVAVLYQGVNCTEVPVAIHADQLTPTWRVYSTGSNVFQTRAGCLIGAEHVNNSYECDIPIGAGICASYQTQTNSPRRARSVASQSIIAYTMSLGAENSVAYSNNSIAIPTNFTISVTTEILPVSMTKTSVDCTMYICGDSTECSNLLLQYGSFCTQLNRALTGIAVEQDKNTQEVFAQVKQIYKTPPIKDFGGFNFSQILPDPSKPSKRSFIEDLLFNKVTLADAGFIKQYGDCLGDIAARDLICAQKFNGLTVLPPLLTDEMIAQYTSALLAGTITSGWTFGAGAALQIPFAMQMAYRFNGIGVTQNVLYENQKLIANQFNSAIGKIQDSLSSAAPALGKLQDVVNQNAQALNTLVKQLSSNFGAISSVLNDILSRLDPPEAEVQIDRLITGRLQSLQTYVTQQLIRAAEIRASANLAATKMSECVLGQSKRVDFCGKGYHLMSFPQSAPHGVVFLHVTYVFAQEKNFTTAPAICHDGKAHFPREGVFVSNGTHWFVTQRNFYEPQIITTDNTFVSGNCDVVIGIVNNTVYDPLQPELDSFKEELDKYFKNHTSPDVDLGDISGINASVVNIQKEIDRLNEVAKNLNESLIDLQELGKYEQYIKGGGSGGGQIYEGKLTAEGLRFGIVASRFNHALVDRLVEGAIDAIVRHGGREEDITLVRVPGSWEIPVAAGELARKEDIDAVIAIGVLIRGATPHFDYIASEVSKGLADLSLELRKPITFGVITADTLEQAIERAGTKHGNKGWEAALSAIEMANLFKSLR

SEQ ID NO: 3848 - protein, 1371 aa, Artificial Sequence
  SARS-CoV-2/USA/WA8-UW5/2020__EPI_ISL_413486 spike protein (1-1211)(K986P_V987P_P1069F) LumSynth construct
MFVFLVLLPLVSSQCVNLTTRTQLPPAYTNSFTRGVYYPDKVFRSSVLHSTQDLFLPFFSNVTWFHAIHVSGTNGTKRFDNPVLPFNDGVYFASTEKSNIIRGWIFGTTLDSKTQSLLIVNNATNVVIKVCEFQFCNDPFLGVYYHKNNKSWMESEFRVYSSANNCTFEYVSQPFLMDLEGKQGNFKNLREFVFKNIDGYFKIYSKHTPINLVRDLPQGFSALEPLVDLPIGINITRFQTLLALHRSYLTPGDSSSGWTAGAAAYYVGYLQPRTFLLKYNENGTITDAVDCALDPLSETKCTLKSFTVEKGIYQTSNFRVQPTESIVRFPNITNLCPFGEVFNATRFASVYAWNRKRISNCVADYSVLYNSASFSTFKCYGVSPTKLNDLCFTNVYADSFVIRGDEVRQIAPGQTGKIADYNYKLPDDFTGCVIAWNSNNLDSKVGGNYNYLYRLFRKSNLKPFERDISTEIYQAGSTPCNGVEGFNCYFPLQSYGFQPTNGVGYQPYRVVVLSFELLHAPATVCGPKKSTNLVKNKCVNFNFNGLTGTGVLTESNKKFLPFQQFGRDIADTTDAVRDPQTLEILDITPCSFGGVSVITPGTNTSNQVAVLYQDVNCTEVPVAIHADQLTPTWRVYSTGSNVFQTRAGCLIGAEYVNNSYECDIPIGAGICASYQTQTNSPRRARSVASQSIIAYTMSLGAENSVAYSNNSIAIPTNFTISVTTEILPVSMTKTSVDCTMYICGDSTECSNLLLQYGSFCTQLNRALTGIAVEQDKNTQEVFAQVKQIYKTPPIKDFGGFNFSQILPDPSKPSKRSFIEDLLFNKVTLADAGFIKQYGDCLGDIAARDLICAQKFNGLTVLPPLLTDEMIAQYTSALLAGTITSGWTFGAGAALQIPFAMQMAYRFNGIGVTQNVLYENQKLIANQFNSAIGKIQDSLSSTASALGKLQDVVNQNAQALNTLVKQLSSNFGAISSVLNDILSRLDPPEAEVQIDRLITGRLQSLQTYVTQQLIRAAEIRASANLAATKMSECVLGQSKRVDFCGKGYHLMSFPQSAPHGVVFLHVTYVFAQEKNFTTAPAICHDGKAHFPREGVFVSNGTHWFVTQRNFYEPQIITTDNTFVSGNCDVVIGIVNNTVYDPLQPELDSFKEELDKYFKNHTSPDVDLGDISGINASVVNIQKEIDRLNEVAKNLNESLIDLQELGKYEQYIKGGGSGGGQIYEGKLTAEGLRFGIVASRFNHALVDRLVEGAIDAIVRHGGREEDITLVRVPGSWEIPVAAGELARKEDIDAVIAIGVLIRGATPHFDYIASEVSKGLADLSLELRKPITFGVITADTLEQAIERAGTKHGNKGWEAALSAIEMANLFKSLR

SEQ ID NO: 3849 - protein, 1371 aa, Artificial Sequence
  SARS-CoV-2/England/20102000506/2020__EPI_ISL_415147 spike protein (1-1211)(K986P_V987P_P1069F) LumSynth construct
MFVFLVLLPLVSSQCVNLTTRTQLPPAYTNSFTRGVYYPDKVFRSSVLHSTQDLFLPFFSNVTWFHAIHVSGTNGTKRFDNPVLPFNDGVYFASTEKSNIIRGWIFGTTLDSKTQSLLIVNNATNVVIKVCEFQFCNDPFLGVYYHKNNKSWMESEFRVYSSANNCTFEYVSQPFLMDLEGKQGNFKNLREFVFKNIDGYFKIYSKHTPINLVRDLPQGFSALEPLVDLPIGINITRFQTLLALHRSYLTPGDSSSGWTAGAAAYYVGYLQPRTFLLKYNENGTITDAVDCALDPLSETKCTLKSFTVEKGIYQTSNFRVQPTESIVRFPNITNLCPFGEVFNATRFASVYAWNRKRISNCVADYSVLYNSASFSTFKCYGVSPTKLNDLCFTNVYADSFVIRGDEVRQIAPGQTGKIADYNYKLPDDFTGCVIAWNSNNLDSKVGGNYNYLYRLFRKSNLKPFERDISTEIYQAGSTPCNGVEGFNCYFPLQSYGFQPTNGVGYQPYRVVVLSFELLHAPATVCGPKKSTNLVKNKCVNFNFNGLTGTGVLTESNKKFLPFQQFGRDIADTTDAVRDPQTLEILDITPCSFGGVSVITPGTNTSNQVAVLYQGVNCTEVPVAIHADQLTPTWRVYSTGSNVFQTRAGCLIGAEHVNNSYECDIPIGAGICASYQTQTNSPRRARSVASQSIIAYTMSLGAENSVAYSNNSIAIPTNFTISVTTEILPVSMTKTSVDCTMYICGDSTECSNLLLQYGSFCTQLNRALTGIAVEQDKNTQEVFAQVKQIYKTPPIKDFGGFNFSQILPDPSKPSKRSFIEDLLFNKVTLADAGFIKQYGYCLGDIAARDLICAQKFNGLTVLPPLLTDEMIAQYTSALLAGTITSGWTFGAGAALQIPFAMQMAYRFNGIGVTQNVLYENQKLIANQFNSAIGKIQDSLSSTASALGKLQDVVNQNAQALNTLVKQLSSNFGAISSVLNDILSRLDPPEAEVQIDRLITGRLQSLQTYVTQQLIRAAEIRASANLAATKMSECVLGQSKRVDFCGKGYHLMSFPQSAPHGVVFLHVTYVFAQEKNFTTAPAICHDGKAHFPREGVFVSNGTHWFVTQRNFYEPQIITTDNTFVSGNCDVVIGIVNNTVYDPLQPELDSFKEELDKYFKNHTSPDVDLGDISGINASVVNIQKEIDRLNEVAKNLNESLIDLQELGKYEQYIKGGGSGGGQIYEGKLTAEGLRFGIVASRFNHALVDRLVEGAIDAIVRHGGREEDITLVRVPGSWEIPVAAGELARKEDIDAVIAIGVLIRGATPHFDYIASEVSKGLADLSLELRKPITFGVITADTLEQAIERAGTKHGNKGWEAALSAIEMANLFKSLR

SEQ ID NO: 3850 - protein, 1371 aa, Artificial Sequence
  SARS-CoV-2/Belgium/VAG-03013/2020__EPI_ISL_415155 spike protein (1-1211)(K986P_V987P_P1069F) LumSynth construct
MFVFLVLLPLVSSQCVNLTTRTQLPPAYTNSFTRGVYYPDKVFRSSVLHSTQDLFLPFFSNVTWFHAIHVSGTNGTKRFDNPVLPFNDGVYFASTEKSNIIRGWIFGTTLDSKTQSLLIVNNATNVVIKVCEFQFCNDPFLGVYYHKNNKSWMESEFRVYSSANNCTFEYVSQPFLMDLEGKQGNFKNLREFVFKNIDGYFKIYSKHTPINLVRDLPQGFSALEPLVDLPIGINITRFQTLLALHRSYLTPGDSSSGWTAGAAAYYVGYLQPRTFLLKYNENGTITDAVDCALDPLSETKCTLKSFTVEKGIYQTSNFRVQPTESIVRFPNITNLCPFGEVFNATRFASVYAWNRKRISNCVADYSVLYNSASFSTFKCYGVSPTKLNDLCFTNVYADSFVIRGDEVRQIAPGQTGKIADYNYKLPDDFTGCVIAWNSNNLDSKVGGNYNYLYRLFRKSNLKPFERDISTEIYQAGSTPCNGVEGFNCYFPLQSYGFQPTNGVGYQPYRVVVLSFELLHAPATVCGPKKSTNLVKNKCVNFNFNGLTGTGVLTESNKKFLPFQQFGRDIADTTDAVRDPQTLEILDITPCSFGGVSVITPGTNTSNQVAVLYQGVNCTEVPVAIHADQLTPTWRVYSTGSNVFQTRAGCLIGAEHVNNSYECDIPIGAGICASYQTQTNSPRRARSVASQSIIAYTMSLGAENSVAYSNNSIAIPTNFTISVTTEILPVSMTKTSVDCTMYICGDSTECSNLLLQYGSFCTQLNRALTGIAVEQDKNTQEVFAQVKQIYKTPPIKDFGGFNFSQILPDPSKPSKRSFIEDLLFNKVTLADAGFIKQYGDCLGDIAARDLICAQKFNGLTVLPPLLTDEMIAQYTSALLAGTITSGWTFGAGAALQIPFAMQMAYRFNGIGVTQNVLYENQKLIANQFNSAIGKIQDSLSSTATALGKLQDVVNQNAQALNTLVKQLSSNFGAISSVLNDILSRLDPPEAEVQIDRLITGRLQSLQTYVTQQLIRAAEIRASANLAATKMSECVLGQSKRVDFCGKGYHLMSFPQSAPHGVVFLHVTYVFAQEKNFTTAPAICHDGKAHFPREGVFVSNGTHWFVTQRNFYEPQIITTDNTFVSGNCDVVIGIVNNTVYDPLQPELDSFKEELDKYFKNHTSPDVDLGDISGINASVVNIQKEIDRLNEVAKNLNESLIDLQELGKYEQYIKGGGSGGGQIYEGKLTAEGLRFGIVASRFNHALVDRLVEGAIDAIVRHGGREEDITLVRVPGSWEIPVAAGELARKEDIDAVIAIGVLIRGATPHFDYIASEVSKGLADLSLELRKPITFGVITADTLEQAIERAGTKHGNKGWEAALSAIEMANLFKSLR

SEQ ID NO: 3851 - protein, 1371 aa, Artificial Sequence
  SARS-CoV-2/Belgium/BC-03016/2020__EPI_ISL_415157 spike protein (1-1211)(K986P_V987P_P1069F) LumSynth construct
MFVFLVLLPLVSSQCVNLTTRTQLPPAYTNSFTRGVYYPDKVFRSSVLHSTQDLFLPFFSNVTWFHAIHVSGTNGTKRFDNPVLPFNDGVYFASTEKSNIIRGWIFGTTLDSKTQSLLIVNNATNVVIKVCEFQFCNDPFLGVYYHKNNKSWMESEFRVYSSANNCTFEYVSQPFLMDLEGKQGNFKNLREFVFKNIDGYFKIYSKHTPINLVRDLPQGFSALEPLVDLPIGINITRFQTLLALHRSYLTPGDSSSGWTAGAAAYYVGYLQPRTFLLKYNENGTITDAVDCALDPLSETKCTLKSFTVEKGIYQTSNFRVQPTESIVRFPNITNLCPFGEVFNATRFASVYAWNRKRISNCVADYSVLYNSASFSTFKCYGVSPTKLNDLCFTNVYADSFVIRGDEVRQIAPGQTGKIADYNYKLPDDFTGCVIAWNSNNLDSKVGGNYNYLYRLFRKSNLKPFERDISTEIYQAGSTPCNGVEGFNCYFPLQSYGFQPTNGVGYQPYRVVVLSFELLHAPATVCGPKKSTNLVKNKCVNFNFNGLTGTGVLTESNKKFLPFQQFGRDIADTTDAVRDPQTLEILDITPCSFGGVSVITPGTNTSNQVAVLYQGVNCTEVPVAIHADQLTPTWRVYSTGSNVFQTRAGCLIGAEHVNNSYECDIPIGAGICASYQTQTNSPRRARSVASQSIIAYTMSLGAENSVAYSNNSIAIPTNFTISVTTEILPVSMTKTSVDCTMYICGDSTECSNLLLQYGSFCTQLNRALTGIAVEQDKNTQEVFAQVKQIYKTPPIKDFGGFNFSQILPDPSKPSKRSFIEDLLFNKVTLADAGFIKQYGDCLGDIAARDLICAQKFNGLTVLPPLLTDEMIAQYTSALLAGTITSGWTFGAGAALQIPFAMQMAYRFNGIGVTQNVLYENQKLIANQFNSAIGKIQDSLSSTAPALGKLQDVVNQNAQALNTLVKQLSSNFGAISSVLNDILSRLDPPEAEVQIDRLITGRLQSLQTYVTQQLIRAAEIRASANLAATKMSECVLGQSKRVDFCGKGYHLMSFPQSAPHGVVFLHVTYVFAQEKNFTTAPAICHDGKAHFPREGVFVSNGTHWFVTQRNFYEPQIITTDNTFVSGNCDVVIGIVNNTVYDPLQPELDSFKEELDKYFKNHTSPDVDLGDISGINASVVNIQKEIDRLNEVAKNLNESLIDLQELGKYEQYIKGGGSGGGQIYEGKLTAEGLRFGIVASRFNHALVDRLVEGAIDAIVRHGGREEDITLVRVPGSWEIPVAAGELARKEDIDAVIAIGVLIRGATPHFDYIASEVSKGLADLSLELRKPITFGVITADTLEQAIERAGTKHGNKGWEAALSAIEMANLFKSLR

SEQ ID NO: 3852 - protein, 1371 aa, Artificial Sequence
  SARS-CoV-2/Germany/BavPat3/2020__EPI_ISL_414521 spike protein (1-1211)(K986P_V987P_P1069F) LumSynth construct
MFVFLVLLPLVSSQCVNLTTRTQLPPAYTNSFTRGVYYPDKVFRSSVLHSTQDLFLPFFSNVTWFHAIHVSGTNGTKRFDNPVLPFNDGVYFASTEKSNIIRGWIFGTTLDSKTQSLLIVNNATNVVIKVCEFQFCNDPFLGVYYHKNNKSWMESEFRVYSSANNCTFEYVSQPFLMDLEGKQGNFKNLREFVFKNIDGYFKIYSKHTPINLVRDLPQGFSALEPLVDLPIGINITRFQTLLALHRSYLTPGDSSSGWTAGAAAYYVGYLQPRTFLLKYNENGTITDAVDCALDPLSETKCTLKSFTVEKGIYQTSNFRVQPTESIVRFPNITNLCPFGEVFNATRFASVYAWNRKRISNCVADYSVLYNSASFSTFKCYGVSPTKLNDLCFTNVYADSFVIRGDEVRQIAPGQTGKIADYNYKLPDDFTGCVIAWNSNNLDSKVGGNYNYLYRLFRKSNLKPFERDISTEIYQAGSTPCNGVEGFNCYFPLQSYGFQPTNGVGYQPYRVVVLSFELLHAPATVCGPKKSTNLVKNKCVNFNFNGLTGTGVLTESNKKFLPFQQFGRDIADTTDAVRDPQTLEILDITPCSFGGVSVITPGTNTSNQVAVLYQDVNCTEVPVAIHADQLTPTWRVYSTGSNVFQTRAGCLIGAEHVNNSYECDIPIGAGICASYQTQTNSPRRARSVASQSIIAYTMSLGAENSVAYSNNSIAIPTNFTISVTTEILPVSMTKTSVDCTMYICGDSTECSNLLLQYGSFCTQLNRALTGIAVEQDKNTQQVFAQVKQIYKTPPIKDFGGFNFSQILPDPSKPSKRSFIEDLLFNKVTLADAGFIKQYGDCLGDIAARDLICAQKFNGLTVLPPLLTDEMIAQYTSALLAGTITSGWTFGAGAALQIPFAMQMAYRFNGIGVTQNVLYENQKLIANQFNSAIGKIQDSLSSTASALGKLQDVVNQNAQALNTLVKQLSSNFGAISSVLNDILSRLDPPEAEVQIDRLITGRLQSLQTYVTQQLIRAAEIRASANLAATKMSECVLGQSKRVDFCGKGYHLMSFPQSAPHGVVFLHVTYVFAQEKNFTTAPAICHDGKAHFPREGVFVSNGTHWFVTQRNFYEPQIITTDNTFVSGNCDVVIGIVNNTVYDPLQPELDSFKEELDKYFKNHTSPDVDLGDISGINASVVNIQKEIDRLNEVAKNLNESLIDLQELGKYEQYIKGGGSGGGQIYEGKLTAEGLRFGIVASRFNHALVDRLVEGAIDAIVRHGGREEDITLVRVPGSWEIPVAAGELARKEDIDAVIAIGVLIRGATPHFDYIASEVSKGLADLSLELRKPITFGVITADTLEQAIERAGTKHGNKGWEAALSAIEMANLFKSLR

SEQ ID NO: 3853 - protein, 1371 aa, Artificial Sequence
  SARS-CoV-2/France/HF1805/2020__EPI_ISL_414628 spike protein (1-1211)(K986P_V987P_P1069F) LumSynth construct
MFVFLVLLPLVSSQCVNLTTRTQLPPAYTNSFTRGVYYPDKVFRSSVLHSTQDLFLPFFSNVTWFHAIHVSGTNGTKRFDNPVLPFNDGVYFASTEKSNIIRGWIFGTTLDSKTQSLLIVNNATNVVIKVCEFQFCNDPFLGVYYHKNNKSWMESEFRVYSSANNCTFEYVSQPFLMDLEGKQGNFKNLREFVFKNIDGYFKIYSKHTPINLVRDLPQGFSALEPLVDLPIGINITRFQTLLALHRSYLTPGDSSSGWTAGAAAYYVGYLQPRTFLLKYNENGTITDAVDCALDPLSETKCTLKSFTVEKGIYQTSNFRVQPTESIVRFPNITNLCPFGEVFNATRFASVYAWNRKRISNCVADYSVLYNSASFSTFKCYGVSPTKLNDLCFTNVYADSFVIRGDEVRQIAPGQTGKIADYNYKLPDDFTGCVIAWNSNNLDSKVGGNYNYLYRLFRKSNLKPFERDISTEIYQAGSTPCNGVEGFNCYFPLQSYGFQPTNGVGYQPYRVVVLSFELLHAPATVCGPKKSTNLVKNKCVNFNFNGLTGTGVLTESNKKFLPFQQFGRDIADTTDAVRDPQTLEILDITPCSFGGVSVITPGTNTSNQVAVLYQGVNCTEVPVAIHADQLTPTWRVYSTGSNVFQTRAGCLIGAEHVNNSYECDIPIGAGICASYQTQTNSPRRARSVASQSIIAYTMSLGAENSVAYSNNSIAIPTNFTISVTTEILPVSMTKTSVDCTMYICGDSTECSNLLLQYGSFCTQLNRALTGIAVEQDKNTQEVFAQVKQIYKTPPIKDFGGFNFSQILPDPSKPSKRSFIEDLLFNKVTLADAGFIKQYGDCLGDIAARDLICAQKFNGLTVLPPLLTDEMIAQYTSALLAGTITSGWTFGAGAALQIPFAMQMAYRFNGIGVTQNVLYENQKLIANQFNSAIGKIQDSLSSTASALGKLQDVVNQNAQALNTLVKQLSSNFGAISSVLNDILSRLDPPEAEVQIDRLITGRLQSLQTYVTQQLIRAAEIRASANLAATKMSECVLGQSKRVDFCGKGYHLMSFPQSAPHGVVFLHVTYVFAQEKNFTTAPAICHDGKAHFPREGVFVSNGTHWFVTQRNFYEPQIITTDNTFVSGNCDVVIGVVNNTVYDPLQPELDSFKEELDKYFKNHTSPDVDLGDISGINASVVNIQKEIDRLNEVAKNLNESLIDLQELGKYEQYIKGGGSGGGQIYEGKLTAEGLRFGIVASRFNHALVDRLVEGAIDAIVRHGGREEDITLVRVPGSWEIPVAAGELARKEDIDAVIAIGVLIRGATPHFDYIASEVSKGLADLSLELRKPITFGVITADTLEQAIERAGTKHGNKGWEAALSAIEMANLFKSLR

SEQ ID NO: 3854 - protein, 1371 aa, Artificial Sequence
  SARS-CoV-2/Netherlands/ZuidHolland_9/2020__EPI_ISL_414445 spike protein (1-1211)(K986P_V987P_P1069F) LumSynth construct
MFVFLVLLPLVSSQCVNLTTRTQLPPAYTNSFTRGVYYPDKVFRSSVLHSTQDLFLPFFSNVTWFHAIHVSGTNGTKRFDNPVLPFNDGVYFASTEKSNIIRGWIFGTTLDSKTQSLLIVNNATNVVIKVCEFQFCNDPFLGVYYHKNNKSWMESEFRVYSSANNCTFEYVSQPFLMDLEGKQGNFKNLREFVFKNIDGYFKIYSKHTPINLVRDLPQGFSALEPLVDLPIGINITRFQTLLALHRSYLTPGDSSSGWTAGAAAYYVGYLQPRTFLLKYNENGTITDAVDCALDPLSETKCTLKSFTVEKGIYQTSNFRVQPTESIVRFPNITNLCPFGEVFNATRFASVYAWNRKRISNCVADYSVLYNSASFSTFKCYGVSPTKLNDLCFTNVYADSFVIRGDEVRQIAPGQTGKIADYNYKLPDDFTGCVIAWNSNNLDSKVGGNYNYLYRLFRKSNLKPFERDISTEIYQAGSTPCNGVEGFNCYFPLQSYGFQPTNGVGYQPYRVVVLSFELLHAPATVCGPKKSTNLVKNKCVNFNFNGLTGTGVLTESNKKFLPFQQFGRDIADTTDAVRDPQTLEILDITPCSFGGVSVITPGTNTSNQVAVLYQGVNCTEVPVAIHADQLTPTWRVYSTGSNVFQTRAGCLIGAEHVNNSYECDIPIGAGICASYQTQTNSPRRARSVASQSIIAYTMSLGAENSVAYSNNSIAIPTNFTISVTTEILPVSMTKTSVDCTMYICGDSTECSNLLLQYGSFCTQLNRALTGIAVEQDKNTQEVFAQVKQIYKTPPIKDFGGFNFSQILPDPSKPSKRSFIEDLLFNKVTLADAGFIKQYGDCLGDIAARDLICVQKFNGLTVLPPLLTDEMIAQYTSALLAGTITSGWTFGAGAALQIPFAMQMAYRFNGIGVTQNVLYENQKLIANQFNSAIGKIQDSLSSTASALGKLQDVVNQNAQALNTLVKQLSSNFGAISSVLNDILSRLDPPEAEVQIDRLITGRLQSLQTYVTQQLIRAAEIRASANLAATKMSECVLGQSKRVDFCGKGYHLMSFPQSAPHGVVFLHVTYVFAQEKNFTTAPAICHDGKAHFPREGVFVSNGTHWFVTQRNFYEPQIITTDNTFVSGNCDVVIGIVNNTVYDPLQPELDSFKEELDKYFKNHTSPDVDLGDISGINASVVNIQKEIDRLNEVAKNLNESLIDLQELGKYEQYIKGGGSGGGQIYEGKLTAEGLRFGIVASRFNHALVDRLVEGAIDAIVRHGGREEDITLVRVPGSWEIPVAAGELARKEDIDAVIAIGVLIRGATPHFDYIASEVSKGLADLSLELRKPITFGVITADTLEQAIERAGTKHGNKGWEAALSAIEMANLFKSLR

SEQ ID NO: 3855 - protein, 1371 aa, Artificial Sequence
  SARS-CoV-2/Finland/FIN03032020A/2020__EPI_ISL_413602 spike protein (1-1211)(K986P_V987P_P1069F) LumSynth construct
MFVFLVLLPLVSSQCVNLTTRTQLPPAYTNSFTRGVYYPDKVFRSSVLHSTQDLFLPFFSNVTWFHAIHVSGTNGTKRFDNPVLPFNDGVYFASTEKSNIIRGWIFGTTLDSKTQSLLIVNNATNVVIKVCEFQFCNDPFLGVYYHKNNKSWMESEFRVYSSANNCTFEYVSQPFLMDLEGKQGNFKNLREFVFKNIDGYFKIYSKHTPINLVRDLPQGFSALEPLVDLPIGINITRFQTLLALHRSYLTPGDSSSGWTAGAAAYYVGYLQPRTFLLKYNENGTITDAVDCALDPLSETKCTLKSFTVEKGIYQTSNFRVQPTESIVRFPNITNLCPFGEVFNATRFASVYAWNRKRISNCVADYSVLYNSASFSTFKCYGVSPTKLNDLCFTNVYADSFVIRGDEVRQIAPGQTGKIADYNYKLPDDFTGCVISWNSNNLDSKVGGNYNYLYRLFRKSNLKPFERDISTEIYQAGSTPCNGVEGFNCYFPLQSYGFQPTNGVGYQPYRVVVLSFELLHAPATVCGPKKSTNLVKNKCVNFNFNGLTGTGVLTESNKKFLPFQQFGRDIADTTDAVRDPQTLEILDITPCSFGGVSVITPGTNTSNQVAVLYQGVNCTEVPVAIHADQLTPTWRVYSTGSNVFQTRAGCLIGAEHVNNSYECDIPIGAGICASYQTQTNSPRRARSVASQSIIAYTMSLGAENSVAYSNNSIAIPTNFTISVTTEILPVSMTKTSVDCTMYICGDSTECSNLLLQYGSFCTQLNRALTGIAVEQDKNTQEVFAQVKQIYKTPPIKDFGGFNFSQILPDPSKPSKRSFIEDLLFNKVTLADAGFIKQYGDCLGDIAARDLICAQKFNGLTVLPPLLTDEMIAQYTSALLAGTITSGWTFGAGAALQIPFAMQMAYRFNGIGVTQNVLYENQKLIANQFNSAIGKIQDSLSSTASALGKLQDVVNQNAQALNTLVKQLSSNFGAISSVLNDILSRLDPPEAEVQIDRLITGRLQSLQTYVTQQLIRAAEIRASANLAATKMSECVLGQSKRVDFCGKGYHLMSFPQSAPHGVVFLHVTYVFAQEKNFTTAPAICHDGKAHFPREGVFVSNGTHWFVTQRNFYEPQIITTDNTFVSGNCDVVIGIVNNTVYDPLQPELDSFKEELDKYFKNHTSPDVDLGDISGINASVVNIQKEIDRLNEVAKNLNESLIDLQELGKYEQYIKGGGSGGGQIYEGKLTAEGLRFGIVASRFNHALVDRLVEGAIDAIVRHGGREEDITLVRVPGSWEIPVAAGELARKEDIDAVIAIGVLIRGATPHFDYIASEVSKGLADLSLELRKPITFGVITADTLEQAIERAGTKHGNKGWEAALSAIEMANLFKSLR

SEQ ID NO: 3856 - protein, 1371 aa, Artificial Sequence
  SARS-CoV-2/France/GE1977/2020__EPI_ISL_414632 spike protein (1-1211)(K986P_V987P_P1069F) LumSynth construct
MFVFLVLLPLVSSQCVNLTTRTQLPPAYTNSFTRGVYYPDKVFRSSVLHSTQDLFLPFFSNVTWFHAIHVSGTNGTKRFDNPVLPFNDGVYFASTEKSNIIRGWIFGTTLDSKTQSLLIVNNATNVVIKVCEFQFCNDPFLGVYYHKNNKSWMESEFRVYSSANNCTFEYVSQPFLMDLEGKQGNFKNLREFVFKNIDGYFKIYSKHTPINLVRDLPQGFSALEPLVDLPIGINITRFQTLLALHRSYLTPGDSSSGWTAGAAAYYVGYLQPRTFLLKYNENGTITDAVDCALDPLSETKCTLKSFTVEKGIYQTSNFRVQPTESIVRFPNITNLCPFGEVFNATRFASVYAWNRKRISNCVADYSVLYNSASFSTFKCYGVSPTKLNDLCFTNVYADSFVIRGDEVRQIAPGQTGKIADYNYKLPDDFTGCVIAWNSNNLDSKVGGNYNYLYRLFRKSNLKPFERDISTEIYQAGSTPCNGVEGFNCYFPLQSYGFQPTNGVGYQPYRVVVLSFELLHAPATVCGPKKSTNLVKNKCVNFNFNGLTGTGVLTESNKKFLPFQQFGRDIADTTDAVRDPQTLEILDITPCSFGGVSVITPGTNTSNQVAVLYQGVNCTEVPVAIHADQLTPTWRVYSTGSNVFQTRAGCLIGAEHVNNSYECDIPIGAGICASYQTQTNSPRRARSVASQSIIAYTMSLGAENSVAYSNNSIAIPTNFTISVTTEILPVSMTKTSVDCTMYICGDSTECSNLLLQYGSFCTQLNRALTGIAVEQDKNTQEVFAQVKQIYKTPPIKDFGGFNFSQILPDPSKPSKRSFIEDLLFNKVTLADAGFIKQYGDCLGDIAARDLICAQKFNGLTVLPPLLTDEMIAQYTSALLAGTITSGWTFGAGAALQIPFAMQMAYRFNGIGVTQNVLYENQKLIANQFNSAIGKIQDSLFSTASALGKLQDVVNQNAQALNTLVKQLSSNFGAISSVLNDILSRLDPPEAEVQIDRLITGRLQSLQTYVTQQLIRAAEIRASANLAATKMSECVLGQSKRVDFCGKGYHLMSFPQSAPHGVVFLHVTYVFAQEKNFTTAPAICHDGKAHFPREGVFVSNGTHWFVTQRNFYEPQIITTDNTFVSGNCDVVIGIVNNTVYDPLQPELDSFKEELDKYFKNHTSPDVDLGDISGINASVVNIQKEIDRLNEVAKNLNESLIDLQELGKYEQYIKGGGSGGGQIYEGKLTAEGLRFGIVASRFNHALVDRLVEGAIDAIVRHGGREEDITLVRVPGSWEIPVAAGELARKEDIDAVIAIGVLIRGATPHFDYIASEVSKGLADLSLELRKPITFGVITADTLEQAIERAGTKHGNKGWEAALSAIEMANLFKSLR

SEQ ID NO: 3857 - protein, 1371 aa, Artificial Sequence
  SARS-CoV-2/Finland/FIN-313/2020__EPI_ISL_414641 spike protein (1-1211)(K986P_V987P_P1069F) LumSynth construct
MFVFLVLLPLVSSQCVNLTTRTQLPPAYTNSFTRGVYYPDKVFRSSVLHSTQDLFLPFFSNVTWFHAIHVSGTNGTKRFDNPVLPFNDGVYFASTEKSNIIRGWIFGTTLDSKTQSLLIVNNATNVVIKVCEFQFCNDPFLGVYYHKNNKSWMESEFRVYSSANNCTFEYVSQPFLMDLEGKQGNFKNLREFVFKNIDGYFKIYSKHTPINLVRDLPQGFSALEPLVDLPIGINITRFKTLLALHRSYLTPGDSSSGWTAGAAAYYVGYLQPRTFLLKYNENGTITDAVDCALDPLSETKCTLKSFTVEKGIYQTSNFRVQPTESIVRFPNITNLCPFGEVFNATRFASVYAWNRKRISNCVADYSVLYNSASFSTFKCYGVSPTKLNDLCFTNVYADSFVIRGDEVRQIAPGQTGKIADYNYKLPDDFTGCVIAWNSNNLDSKVGGNYNYLYRLFRKSNLKPFERDISTEIYQAGSTPCNGVEGFNCYFPLQSYGFQPTNGVGYQPYRVVVLSFELLHAPATVCGPKKSTNLVKNKCVNFNFNGLTGTGVLTESNKKFLPFQQFGRDIADTTDAVRDPQTLEILDITPCSFGGVSVITPGTNTSNQVAVLYQGVNCTEVPVAIHADQLTPTWRVYSTGSNVFQTRAGCLIGAEHVNNSYECDIPIGAGICASYQTQTNSPRRARSVASQSIIAYTMSLGAENSVAYSNNSIAIPTNFTISVTTEILPVSMTKTSVDCTMYICGDSTECSNLLLQYGSFCTQLNRALTGIAVEQDKNTQEVFAQVKQIYKTPPIKDFGGFNFSQILPDPSKPSKRSFIEDLLFNKVTLADAGFIKQYGDCLGDIAARDLICAQKFNGLTVLPPLLTDEMIAQYTSALLAGTITSGWTFGAGAALQIPFAMQMAYRFNGIGVTQNVLYENQKLIANQFNSAIGKIQDSLSSTASALGKLQDVVNQNAQALNTLVKQLSSNFGAISSVLNDILSRLDPPEAEVQIDRLITGRLQSLQTYVTQQLIRAAEIRASANLAATKMSECVLGQSKRVDFCGKGYHLMSFPQSAPHGVVFLHVTYVFAQEKNFTTAPAICHDGKAHFPREGVFVSNGTHWFVTQRNFYEPQIITTDNTFVSGNCDVVIGIVNNTVYDPLQPELDSFKEELDKYFKNHTSPDVDLGDISGINASVVNIQKEIDRLNEVAKNLNESLIDLQELGKYEQYIKGGGSGGGQIYEGKLTAEGLRFGIVASRFNHALVDRLVEGAIDAIVRHGGREEDITLVRVPGSWEIPVAAGELARKEDIDAVIAIGVLIRGATPHFDYIASEVSKGLADLSLELRKPITFGVITADTLEQAIERAGTKHGNKGWEAALSAIEMANLFKSLR

SEQ ID NO: 3858 - protein, 1371 aa, Artificial Sequence
  SARS-CoV-2/Netherlands/ZuidHolland_2/2020__EPI_ISL_414556 spike protein (1-1211)(K986P_V987P_P1069F) LumSynth construct
MFVFLVLLPLVSSQCVNLTTRTQLPPAYTNSFTRGVYYPDKVFRSSVLHSTQDLFLPFFSNVTWFHAIHVSGTNGTKRFDNPVLPFNDGVYFASTEKSNIIRGWIFGTTLDSKTQSLLIVNNATNVVIKVCEFQFCNDPFLGVYYHKNNKSWMESEFRVYSSANNCTFEYVSQPFLMDLEGKQGNFKNLREFVFKNIDGYFKIYSKHTPINLVRDLPQGFSALEPLVDLPIGINITRFQTLLALHRSYLTPGDSSSGWTAGAAAYYVGYLQPRTFLLKYNENGTITDAVDCALDPLSETKCTLKSFTVEKGIYQTSNFRVQPTESIVRFPNITNLCPFGEVFNATRFASVYAWNRKRISNCVADYSVLYNSASFSTFKCYGVSPTKLNDLCFTNVYADSFVIRGDEVRQIAPGQTGKIADYNYKLPDDFTGCVIAWNSNNLDSKVGGNYNYLYRLFRKSNLKPFERDISTEIYQAGSTPCNGVEGFNCYFPLQSYGFQPTNGVGYQPYRVVVLSFELLHAPATVCGPKKSTNLVKNKCVNFNFNGLTGTGVLTESNKKFLPFQQFGRDIADTTDAVRDPQTLEILDITPCSFGGVSVITPGTNTSNQVAVLYQGVNCTEVPVAIHADQLTPTWRVYSTGSNVFQTRAGCLIGAEHVNNSYECDIPIGAGICASYQTQTNSPRRARSVASQSIIAYTMSLGAENSVAYSNNSIAIPTNFTISVTTEILPVSMTKTSVDCTMYICGDSTECSNLLLQYGSFCTQLNRALTGIALEQDKNTQEVFAQVKQIYKTPPIKDFGGFNFSQILPDPSKPSKRSFIEDLLFNKVTLADAGFIKQYGDCLGDIAARDLICAQKFNGLTVLPPLLTDEMIAQYTSALLAGTITSGWTFGAGAALQIPFAMQMAYRFNGIGVTQNVLYENQKLIANQFNSAIGKIQDSLSSTASALGKLQDVVNQNAQALNTLVKQLSSNFGAISSVLNDILSRLDPPEAEVQIDRLITGRLQSLQTYVTQQLIRAAEIRASANLAATKMSECVLGQSKRVDFCGKGYHLMSFPQSAPHGVVFLHVTYVFAQEKNFTTAPAICHDGKAHFPREGVFVSNGTHWFVTQRNFYEPQIITTDNTFVSGNCDVVIGIVNNTVYDPLQPELDSFKEELDKYFKNHTSPDVDLGDISGINASVVNIQKEIDRLNEVAKNLNESLIDLQELGKYEQYIKGGGSGGGQIYEGKLTAEGLRFGIVASRFNHALVDRLVEGAIDAIVRHGGREEDITLVRVPGSWEIPVAAGELARKEDIDAVIAIGVLIRGATPHFDYIASEVSKGLADLSLELRKPITFGVITADTLEQAIERAGTKHGNKGWEAALSAIEMANLFKSLR

SEQ ID NO: 3859 - protein, 1371 aa, Artificial Sequence
  SARS-CoV-2/USA/WA-UW31/2020__EPI_ISL_414618 spike protein (1-1211)(K986P_V987P_P1069F) LumSynth construct
MFVFLVLLPLVSSQCVNLTTRTQLPPAYTNSFTRGVYYPDKVFRSSVLHSTQDLFLPFFSNVTWFHAIHVSGTNGTKRFDNPVLPFNDGVYFASTEKSNIIRGWIFGTTLDSKTQSLLIVNNATNVVIKVCEFQFCNDPFLGVYYHKNNKSWMESEFRVYSSANNCTFEYVSQPFLMDLEGKQGNFKNLREFVFKNIDGYFKIYSKHTPINLVRDLPQGFSALEPLVDLPIGINITRFQTLLALHRSYLTPGDSSSGWTAGAAAYYVGYLQPRTFLLKYNENGTITDAVDCALDPLSETKCTLKSFTVEKGIYQTSNFRVQPTESIVRFPNITNLCPFGEVFNATRFASVYAWNRKRISNCVADYSVLYNSASFSTFKCYGVSPTKLNDLCFTNVYADSFVIRGDEVRQIAPGQTGKIADYNYKLPDDFTGCVIAWNSNNLDSKVGGNYNYLYRLFRKSNLKPFERDISTEIYQAGSTPCNGAEGFNCYFPLQSYGFQPTNGVGYQPYRVVVLSFELLHAPATVCGPKKSTNLVKNKCVNFNFNGLTGTGVLTESNKKFLPFQQFGRDIADTTDAVRDPQTLEILDITPCSFGGVSVITPGTNTSNQVAVLYQDVNCTEVPVAIHADQLTPTWRVYSTGSNVFQTRAGCLIGAEHVNNSYECDIPIGAGICASYQTQTNSPRRARSVASQSIIAYTMSLGAENSVAYSNNSIAIPTNFTISVTTEILPVSMTKTSVDCTMYICGDSTECSNLLLQYGSFCTQLNRALTGIAVEQDKNTQEVFAQVKQIYKTPPIKDFGGFNFSQILPDPSKPSKRSFIEDLLFNKVTLADAGFIKQYGDCLGDIAARDLICAQKFNGLTVLPPLLTDEMIAQYTSALLAGTITSGWTFGAGAALQIPFAMQMAYRFNGIGVTQNVLYENQKLIANQFNSAIGKIQDSLSSTASALGKLQDVVNQNAQALNTLVKQLSSNFGAISSVLNDILSRLDPPEAEVQIDRLITGRLQSLQTYVTQQLIRAAEIRASANLAATKMSECVLGQSKRVDFCGKGYHLMSFPQSAPHGVVFLHVTYVFAQEKNFTTAPAICHDGKAHFPREGVFVSNGTHWFVTQRNFYEPQIITTDNTFVSGNCDVVIGIVNNTVYDPLQPELDSFKEELDKYFKNHTSPDVDLGDISGINASVVNIQKEIDRLNEVAKNLNESLIDLQELGKYEQYIKGGGSGGGQIYEGKLTAEGLRFGIVASRFNHALVDRLVEGAIDAIVRHGGREEDITLVRVPGSWEIPVAAGELARKEDIDAVIAIGVLIRGATPHFDYIASEVSKGLADLSLELRKPITFGVITADTLEQAIERAGTKHGNKGWEAALSAIEMANLFKSLR

SEQ ID NO: 3860 - protein, 1371 aa, Artificial Sequence
  SARS-CoV-2/South Korea/SNU01/2020__EPI_ISL_411929 spike protein (1-1211)(K986P_V987P_P1069F) LumSynth construct
MFVFLVLLPLVSSQCVNLTTRTQLPPAYTNSFTRGVYYPDKVFRSSVLHSTQDLFLPFFSNVTWFHAIHVSGTNGTKRFDNPVLPFNDGVYFASTEKSNIIRGWIFGTTLDSKTQSLLIVNNATNVVIKVCEFQFCNDPFLGVYYHKNNKSWMESEFRVYSSANNCTFEYVSQPFLMDLEGKQGNFKNLREFVFKNIDGYFKIYSKHTPINLVRDLPQGFWALEPLVDLPIGINITRFQTLLALHRSYLTPGDSSSGWTAGAAAYYVGYLQPRTFLLKYNENGTITDAVDCALDPLSETKCTLKSFTVEKGIYQTSNFRVQPTESIVRFPNITNLCPFGEVFNATRFASVYAWNRKRISNCVADYSVLYNSASFSTFKCYGVSPTKLNDLCFTNVYADSFVIRGDEVRQIAPGQTGKIADYNYKLPDDFTGCVIAWNSNNLDSKVGGNYNYLYRLFRKSNLKPFERDISTEIYQAGSTPCNGVEGFNCYFPLQSYGFQPTNGVGYQPYRVVVLSFELLHAPATVCGPKKSTNLVKNKCVNFNFNGLTGTGVLTESNKKFLPFQQFGRDIADTTDAVRDPQTLEILDITPCSFGGVSVITPGTNTSNQVAVLYQDVNCTEVPVAIHADQLTPTWRVYSTGSNVFQTRAGCLIGAEHVNNSYECDIPIGAGICASYQTQTNSPRRARSVASQSIIAYTMSLGAENSVAYSNNSIAIPTNFTISVTTEILPVSMTKTSVDCTMYICGDSTECSNLLLQYGSFCTQLNRALTGIAVEQDKNTQEVFAQVKQIYKTPPIKDFGGFNFSQILPDPSKPSKRSFIEDLLFNKVTLADAGFIKQYGDCLGDIAARDLICAQKFNGLTVLPPLLTDEMIAQYTSALLAGTITSGWTFGAGAALQIPFAMQMAYRFNGIGVTQNVLYENQKLIANQFNSAIGKIQDSLSSTASALGKLQDVVNQNAQALNTLVKQLSSNFGAISSVLNDILSRLDPPEAEVQIDRLITGRLQSLQTYVTQQLIRAAEIRASANLAATKMSECVLGQSKRVDFCGKGYHLMSFPQSAPHGVVFLHVTYVFAQEKNFTTAPAICHDGKAHFPREGVFVSNGTHWFVTQRNFYEPQIITTDNTFVSGNCDVVIGIVNNTVYDPLQPELDSFKEELDKYFKNHTSPDVDLGDISGINASVVNIQKEIDRLNEVAKNLNESLIDLQELGKYEQYIKGGGSGGGQIYEGKLTAEGLRFGIVASRFNHALVDRLVEGAIDAIVRHGGREEDITLVRVPGSWEIPVAAGELARKEDIDAVIAIGVLIRGATPHFDYIASEVSKGLADLSLELRKPITFGVITADTLEQAIERAGTKHGNKGWEAALSAIEMANLFKSLR

SEQ ID NO: 3861 - protein, 1371 aa, Artificial Sequence
  SARS-CoV-2/China/WF0004/2020__EPI_ISL_413694 spike protein (1-1211)(K986P_V987P_P1069F) LumSynth construct
MFVFLVLLPLVSSQCVNLTTRTQLPPAYTNSFTRGVYYPDKVFRSSVLHSTQDLFLPFFSNVTWFHAIHVSGTNGTKRFDNPVLPFNDGVYFASTEKSNIIRGWIFGTTLDSKTQSLLIVNNATNVVIKVCEFQFCNDPFLGVYYHKNNKSWTESEFRVYSSANNCTFEYVSQPFLMDLEGKQGNFKNLREFVFKNIDGYFKIYSKHTPINLVRDLPQGFSALEPLVDLPIGINITRFQTLLALHRSYLTPGDSSSGWTAGAAAYYVGYLQPRTFLLKYNENGTITDAVDCALDPLSETKCTLKSFTVEKGIYQTSNFRVQPTESIVRFPNITNLCPFGEVFNATRFASVYAWNRKRISNCVADYSVLYNSASFSTFKCYGVSPTKLNDLCFTNVYADSFVIRGDEVRQIAPGQTGKIADYNYKLPDDFTGCVIAWNSNNLDSKVGGNYNYLYRLFRKSNLKPFERDISTEIYQAGSTPCNGVEGFNCYFPLQSYGFQPTNGVGYQPYRVVVLSFELLHAPATVCGPKKSTNLVKNKCVNFNFNGLTGTGVLTESNKKFLPFQQFGRDIADTTDAVRDPQTLEILDITPCSFGGVSVITPGTNTSNQVAVLYQDVNCTEVPVAIHADQLTPTWRVYSTGSNVFQTRAGCLIGAEHVNNSYECDIPIGAGICASYQTQTNSPRRARSVASQSIIAYTMSLGAENSVAYSNNSIAIPTNFTISVTTEILPVSMTKTSVDCTMYICGDSTECSNLLLQYGSFCTQLNRALTGIAVEQDKNTQEVFAQVKQIYKTPPIKDFGGFNFSQILPDPSKPSKRSFIEDLLFNKVTLADAGFIKQYGDCLGDIAARDLICAQKFNGLTVLPPLLTDEMIAQYTSALLAGTITSGWTFGAGAALQIPFAMQMAYRFNGIGVTQNVLYENQKLIANQFNSAIGKIQDSLSSTASALGKLQDVVNQNAQALNTLVKQLSSNFGAISSVLNDILSRLDPPEAEVQIDRLITGRLQSLQTYVTQQLIRAAEIRASANLAATKMSECVLGQSKRFDFCGKGYHLMSFPQSAPHGVVFLHVTYVFAQEKNFTTAPAICHDGKAHFPREGVFVSNGTHWFVTQRNFYEPQIITTDNTFVSGNCDVVIGIVNNTVYDPLQPELDSFKEELDKYFKNHTSPDVDLGDISGINASVVNIQKEIDRLNEVAKNLNESLIDLQELGKYEQYIKGGGSGGGQIYEGKLTAEGLRFGIVASRFNHALVDRLVEGAIDAIVRHGGREEDITLVRVPGSWEIPVAAGELARKEDIDAVIAIGVLIRGATPHFDYIASEVSKGLADLSLELRKPITFGVITADTLEQAIERAGTKHGNKGWEAALSAIEMANLFKSLR

SEQ ID NO: 3862 - protein, 1371 aa, Artificial Sequence
  SARS-CoV-2/China/WF0028/2020__EPI_ISL_413791 spike protein (1-1211)(K986P_V987P_P1069F) LumSynth construct
MFVFLVLLPLVSSQCVNLTTRTQLPPAYTNSFTRGVYYPDKVFRSSVLHSTQDLFLPFFSNVTWFHAIHVSGTNGTKRFDNPVLPFNDGVYFASTEKSNIIRGWIFGTTLDSKTQSLLIVNNATNVVIKVCEFQFCNDPFLGVYYHKNNKSWMESEFRVYSSANNCTFEYVSQPFLMDLEGKQGNFKNLREFVFKNIDGYFKIYSKHTPINLVRDLPQGFSALEPLVDLPIGINITRFQTLLALHRSYLTPGDSSSGWTAGAAAYYVGYLQPRTFLLKYNENGTITDAVDCALDPLSETKCTLKSFTVEKGIYQTSNFRVQPTESIVRFPNITNLCPFGEVFNATRFASVYAWNRKRISNCVADYSVLYNSASFSTFKCYGVSPTKLNDLCFTNVYADSFVIRGDEVRQIAPGQTGKIADYNYKLPDDFTGCVIAWNSNNLDSKVGGNYNYLYRLFRKSNLKPFERDISTEIYQAGSTPCNGVEGFNCYFPLQSYGFQPTNGVGYQPYRVVVLSFELLHAPATVCGPKKSTNLVKNKCVNFNFNGLTGTGVLTESNKKFLPFQQFGRDIADTTDAVRDPQTLEILDITPCSFGGVSVITPGTNTSNQVAVLYQDVNCTEVPVAIHADQLTPTWRVYSTGSNVFQTRAGCLIGAEHVNNSYECDIPIGAGICASYQTQTNSPRRARSVASQSIIAYTMSLGAENSVAYSNNSIAIPTNFTISVTTEILPVSMTKTSVDCTMYICGDSTECSNLLLQYGSFCTQLNRALTGIAVEQDKNTQEVFAQVKQIYKTPPIKDFGGFNFSQILPDPSKPSKRSFIEDLLFNKVTLADAGFIKQYGDCLGDIAARDLICAQKFNGLTVLPPLLTDEMIAQYTSALLAGTITSGWTFGAGAALQIPFAMQMAYRFNGIGVTQNVLYENQKLIANQFNSAIGKIQDSLSSTASALGKLQDVVNQNAQALNTLVKQLSSNFGAISSVLNDILSRLDPPEAEVQIDRLITGRLQSLQTYVTQQLIRAAEIRASANLAATKMSECVLGQSKRVDFCGKGYHLMSFPQSAPHGVVFLHVTYVFAQEKNFTTAPAICHDGKAHFPREGVFVSNGTHWFVTQRNFYEPQIITTDNTFVSGNCDVVIGIVNNTVYDPLQPELESFKEELDKYFKNHTSPDVDLGDISGINASVVNIQKEIDRLNEVAKNLNESLIDLQELGKYEQYIKGGGSGGGQIYEGKLTAEGLRFGIVASRFNHALVDRLVEGAIDAIVRHGGREEDITLVRVPGSWEIPVAAGELARKEDIDAVIAIGVLIRGATPHFDYIASEVSKGLADLSLELRKPITFGVITADTLEQAIERAGTKHGNKGWEAALSAIEMANLFKSLR

SEQ ID NO: 3863 - protein, 1371 aa, Artificial Sequence
  SARS-CoV-2/2019-nCoV/USA-CruiseA-18/2020__MT159716.1 spike protein (1-1211)(K986P_V987P_P1069F) LumSynth construct
MFVFLVLLPLVSSQCVNLTTRTQLPPAYTNSFTRGVYYPDKVFRSSVLHSTQDLFLPFFSNVTWFHAIHVSGTNGTKRFDNPVLPFNDGVYFASTEKSNIIRGWIFGTTLDSKTQSLLIVNNATNVVIKVCEFQFCNDPFLGVYYHKNNKSWMESELRVYSSANNCTFEYVSQPFLMDLEGKQGNFKNLREFVFKNIDGYFKIYSKHTPINLVRDLPQGFSALEPLVDLPIGINITRFQTLLALHRSYLTPGDSSSGWTAGAAAYYVGYLQPRTFLLKYNENGTITDAVDCALDPLSETKCTLKSFTVEKGIYQTSNFRVQPTESIVRFPNITNLCPFGEVFNATRFASVYAWNRKRISNCVADYSVLYNSASFSTFKCYGVSPTKLNDLCFTNVYADSFVIRGDEVRQIAPGQTGKIADYNYKLPDDFTGCVIAWNSNNLDSKVGGNYNYLYRLFRKSNLKPFERDISTEIYQAGSTPCNGVEGFNCYFPLQSYGFQPTNGVGYQPYRVVVLSFELLHAPATVCGPKKSTNLVKNKCVNFNFNGLTGTGVLTESNKKFLPFQQFGRDIADTTDAVRDPQTLEILDITPCSFGGVSVITPGTNTSNQVAVLYQDVNCTEVPVAIHADQLTPTWRVYSTGSNVFQTRAGCLIGAEHVNNSYECDIPIGAGICASYQTQTNSPRRARSVASQSIIAYTMSLGAENSVAYSNNSIAIPTNFTISVTTEILPVSMTKTSVDCTMYICGDSTECSNLLLQYGSFCTQLNRALTGIAVEQDKNTQEVFAQVKQIYKTPPIKDFGGFNFSQILPDPSKPSKRSFIEDLLFNKVTLADAGFIKQYGDCLGDIAARDLICAQKFNGLTVLPPLLTDEMIAQYTSALLAGTITSGWTFGAGAALQIPFAMQMAYRFNGIGVTQNVLYENQKLIANQFNSAIGKIQDSLSSTASALGKLQDVVNQNAQALNTLVKQLSSNFGAISSVLNDILSRLDPPEAEVQIDRLITGRLQSLQTYVTQQLIRAAEIRASANLAATKMSECVLGQSKRVDFCGKGYHLMSFPQSAPHGVVFLHVTYVFAQEKNFTTAPAICHDGKAHFPREGVFVSNGTHWFVTQRNFYEPQIITTDNTFVSGNCDVVIGIVNNTVYDPLQPELDSFKEELDKYFKNHTSPDVDLGDISGINASVVNIQKEIDRLNEVAKNLNESLIDLQELGKYEQYIKGGGSGGGQIYEGKLTAEGLRFGIVASRFNHALVDRLVEGAIDAIVRHGGREEDITLVRVPGSWEIPVAAGELARKEDIDAVIAIGVLIRGATPHFDYIASEVSKGLADLSLELRKPITFGVITADTLEQAIERAGTKHGNKGWEAALSAIEMANLFKSLR

SEQ ID NO: 3864 - protein, 1371 aa, Artificial Sequence
  SARS-CoV-2/SARS-CoV-2/Yunnan-01/human/2020/CHN__MT049951.1 spike protein (1-1211)(K986P_V987P_P1069F) LumSynth construct
MFVFLVLLPLVSSQCVNLTTRTQLPPANTNSFTRGVYYPDKVFRSSVLHSTQDLFLPFFSNVTWFHAIHVSGTNGTKRFDNPVLPFNDGVYFASTEKSNIIRGWIFGTTLDSKTQSLLIVNNATNVVIKVCEFQFCNDPFLGVYYHKNNKSWMESEFRVYSSANNCTFEYVSQPFLMDLEGKQGNFKNLREFVFKNIDGYFKIYSKHTPINLVRDLPQGFSALEPLVDLPIGINITRFQTLLALHRSYLTPGDSSSGWTAGAAAYYVGYLQPRTFLLKYNENGTITDAVDCALDPLSETKCTLKSFTVEKGIYQTSNFRVQPTESIVRFPNITNLCPFGEVFNATRFASVYAWNRKRISNCVADYSVLYNSASFSTFKCYGVSPTKLNDLCFTNVYADSFVIRGDEVRQIAPGQTGKIADYNYKLPDDFTGCVIAWNSNNLDSKVGGNYNYLYRLFRKSNLKPFERDISTEIYQAGSTPCNGVEGFNCYFPLQSYGFQPTNGVGYQPYRVVVLSFELLHAPATVCGPKKSTNLVKNKCVNFNFNGLTGTGVLTESNKKFLPFQQFGRDIADTTDAVRDPQTLEILDITPCSFGGVSVITPGTNTSNQVAVLYQDVNCTEVPVAIHADQLTPTWRVYSTGSNVFQTRAGCLIGAEHVNNSYECDIPIGAGICASYQTQTNSPRRARSVASQSIIAYTMSLGAENSVAYSNNSIAIPTNFTISVTTEILPVSMTKTSVDCTMYICGDSTECSNLLLQYGSFCTQLNRALTGIAVEQDKNTQEVFAQVKQIYKTPPIKDFGGFNFSQILPDPSKPSKRSFIEDLLFNKVTLADAGFIKQYGDCLGDIAARDLICAQKFNGLTVLPPLLTDEMIAQYTSALLAGTITSGWTFGAGAALQIPFAMQMAYRFNGIGVTQNVLYENQKLIANQFNSAIGKIQDSLSSTASALGKLQDVVNQNAQALNTLVKQLSSNFGAISSVLNDILSRLDPPEAEVQIDRLITGRLQSLQTYVTQQLIRAAEIRASANLAATKMSECVLGQSKRVDFCGKGYHLMSFPQSAPHGVVFLHVTYVFAQEKNFTTAPAICHDGKAHFPREGVFVSNGTHWFVTQRNFYEPQIITTDNTFVSGNCDVVIGIVNNTVYDPLQPELDSFKEELDKYFKNHTSPDVDLGDISGINASVVNIQKEIDRLNEVAKNLNESLIDLQELGKYEQYIKGGGSGGGQIYEGKLTAEGLRFGIVASRFNHALVDRLVEGAIDAIVRHGGREEDITLVRVPGSWEIPVAAGELARKEDIDAVIAIGVLIRGATPHFDYIASEVSKGLADLSLELRKPITFGVITADTLEQAIERAGTKHGNKGWEAALSAIEMANLFKSLR

SEQ ID NO: 3865 - protein, 1371 aa, Artificial Sequence
  SARS-CoV-2/USA/WA-UW292/2020__EPI_ISL_418077 spike protein (1-1211)(K986P_V987P_P1069F) LumSynth construct
MFVFLVLLPLVSSQCVNLTTRTQLPPAYTNSFTRGVYYPDKVFRSSVLHSTQDLFLPFFSNVTWFHAIHVSGTNGTKRFDNPVLPFNDGVYFASTEKSNIIRGWIFGTTLDSKTQSLLIVNNATNVVIKVCEFQFCNDPFLGVYYHKNNKSWMESEFRVYSSANNCTFEYVSQPFLMDLEGKQGNFKNLREFVFKNIDGYFKIYSKHTPINLVRDLPQGFSALEPLVDLPIGINITRFQTLLALHRSYLTPGDSSSGWTAGAAAYYVGYLQPRTFLLKYNENGTITDAVDCALDPLSETKCTLKSFTVEKGIYQTSNFRVQPTESIVRFPNITNLCPFGEVFNATRFASVYAWNRKRISNCVADYSVLYNSASFSTFKCYGVSPTKLNDLCFTNVYADSFVIRGDEVRQIAPGQTGKIADYNYKLPDDFTGCVIAWNSNNLDSKVGGNYNYLYRLFRKSNLKPFERDISTEIYQASSTPCNGVEGFNCYFPLQSYGFQPTNGVGYQPYRVVVLSFELLHAPATVCGPKKSTNLVKNKCVNFNFNGLTGTGVLTESNKKFLPFQQFGRDIADTTDAVRDPQTLEILDITPCSFGGVSVITPGTNTSNQVAVLYQDVNCTEVPVAIHADQLTPTWRVYSTGSNVFQTRAGCLIGAEHVNNSYECDIPIGAGICASYQTQTNSPRRARSVASQSIIAYTMSLGAENSVAYSNNSIAIPTNFTISVTTEILPVSMTKTSVDCTMYICGDSTECSNLLLQYGSFCTQLNRALTGIAVEQDKNTQEVFAQVKQIYKTPPIKDFGGFNFSQILPDPSKPSKRSFIEDLLFNKVTLADAGFIKQYGDCLGDIAARDLICAQKFNGLTVLPPLLTDEMIAQYTSALLAGTITSGWTFGAGAALQIPFAMQMAYRFNGIGVTQNVLYENQKLIANQFNSAIGKIQDSLSSTASALGKLQDVVNQNAQALNTLVKQLSSNFGAISSVLNDILSRLDPPEAEVQIDRLITGRLQSLQTYVTQQLIRAAEIRASANLAATKMSECVLGQSKRVDFCGKGYHLMSFPQSAPHGVVFLHVTYVFAQEKNFTTAPAICHDGKAHFPREGVFVSNGTHWFVTQRNFYEPQIITTDNTFVSGNCDVVIGIVNNTVYDPLQPELDSFKEELDKYFKNHTSPDVDLGDISGINASVVNIQKEIDRLNEVAKNLNESLIDLQELGKYEQYIKGGGSGGGQIYEGKLTAEGLRFGIVASRFNHALVDRLVEGAIDAIVRHGGREEDITLVRVPGSWEIPVAAGELARKEDIDAVIAIGVLIRGATPHFDYIASEVSKGLADLSLELRKPITFGVITADTLEQAIERAGTKHGNKGWEAALSAIEMANLFKSLR

SEQ ID NO: 3866 - protein, 1371 aa, Artificial Sequence
  SARS-CoV-2/Iceland/192/2020__EPI_ISL_417819 spike protein (1-1211)(K986P_V987P_P1069F) LumSynth construct
MFVFFVLLPLVSSQCVNLTTRTQLPPAYTNSFTRGVYYPDKVFRSSVLHSTQDLFLPFFSNVTWFHAIHVSGTNGTKRFDNPVLPFNDGVYFASTEKSNIIRGWIFGTTLDSKTQSLLIVNNATNVVIKVCEFQFCNDPFLGVYYHKNNKSWMESEFRVYSSANNCTFEYVSQPFLMDLEGKQGNFKNLREFVFKNIDGYFKIYSKHTPINLVRDLPQGFSALEPLVDLPIGINITRFQTLLALHRSYLTPGDSSSGWTAGAAAYYVGYLQPRTFLLKYNENGTITDAVDCALDPLSETKCTLKSFTVEKGIYQTSNFRVQPTESIVRFPNITNLCPFGEVFNATRFASVYAWNRKRISNCVADYSVLYNSASFSTFKCYGVSPTKLNDLCFTNVYADSFVIRGDEVRQIAPGQTGKIADYNYKLPDDFTGCVIAWNSNNLDSKVGGNYNYLYRLFRKSNLKPFERDISTEIYQAGSTPCNGVEGFNCYFPLQSYGFQPTNGVGYQPYRVVVLSFELLHAPATVCGPKKSTNLVKNKCVNFNFNGLTGTGVLTESNKKFLPFQQFGRDIADTTDAVRDPQTLEILDITPCSFGGVSVITPGTNTSNQVAVLYQGVNCTEVPVAIHADQLTPTWRVYSTGSNVFQTRAGCLIGAEHVNNSYECDIPIGAGICASYQTQTNSPRRARSVASQSIIAYTMSLGAENSVAYSNNSIAIPTNFTISVTTEILPVSMTKTSVDCTMYICGDSTECSNLLLQYGSFCTQLNRALTGIAVEQDKNTQEVFAQVKQIYKTPPIKDFGGFNFSQILPDPSKPSKRSFIEDLLFNKVTLADAGFIKQYGDCLGDIAARDLICAQKFNGLTVLPPLLTDEMIAQYTSALLAGTITSGWTFGAGAALQIPFAMQMAYRFNGIGVTQNVLYENQKLIANQFNSAIGKIQDSLSSTASALGKLQDVVNQNAQALNTLVKQLSSNFGAISSVLNDILSRLDPPEAEVQIDRLITGRLQSLQTYVTQQLIRAAEIRASANLAATKMSECVLGQSKRVDFCGKGYHLMSFPQSAPHGVVFLHVTYVFAQEKNFTTAPAICHDGKAHFPREGVFVSNGTHWFVTQRNFYEPQIITTDNTFVSGNCDVVIGIVNNTVYDPLQPELDSFKEELDKYFKNHTSPDVDLGDISGINASVVNIQKEIDRLNEVAKNLNESLIDLQELGKYEQYIKGGGSGGGQIYEGKLTAEGLRFGIVASRFNHALVDRLVEGAIDAIVRHGGREEDITLVRVPGSWEIPVAAGELARKEDIDAVIAIGVLIRGATPHFDYIASEVSKGLADLSLELRKPITFGVITADTLEQAIERAGTKHGNKGWEAALSAIEMANLFKSLR

SEQ ID NO: 3867 - protein, 1371 aa, Artificial Sequence
  SARS-CoV-2/Belgium/ULG-6939/2020__EPI_ISL_417020 spike protein (1-1211)(K986P_V987P_P1069F) LumSynth construct
MFVFLVLLPLVSSQCVNLTTRTQLPPAYTNSFTRGVYYPDKVFRSSVLHSTQDLFLPFFSNVTWFHAIHVSGTNGTKRFDNPVLPFNDGVYFASTEKSNIIRGWIFGTTLDSKTQSLLIVNNATNVVIKVCEFQFCNDPFLGVYYHKNNKSWMESEFRVYSSANNCTFEYVSQPFLMDLEGKQGNFKNLREFVFKNIDGYFKIYSKHTPINLVRDLPQGFSALEPLVDLPIGINITRFQTLLALHRSYLTPGDSSSGWTAGAAAYYVGYLQPRTFLLKYNENGTITDAVDCALDPLSETKCTLKSFTVEKGIYQTSNFRVQPTESIVRFPNITNLCPFGEVFNATRFASVYAWNRKRISNCVADYSVLYNSASFSTFKCYGVSPTKLNDLCFTNVYADSFVIRGDEVRQIAPGQTGKIADYNYKLPDDFTGCVIAWNSNNLDSKVGGNYNYLYRLFRKSNLKPFERDISTEIYQAGSTPCNGVEGFNCYFPLQSYGFQPTNGVGYQPYRVVVLSFELLHAPATVCGPKKSTNLVKNKCVNFNFNGLTGTGVLTESNKKFLPFQQFGRDIADTTDAVRDPQTLEILDITPCSFGGVSVITPGTNTSNQVAVLYQGVNCTEVPVAIHADQLTPTWRVYSTGSNVFQTRAGCLIGAEHVNNSYECDIPIGAGICASYQTQTNSPRRARSVASQSIIAYTMSLGAENSVVYSNNSIAIPTNFTISVTTEILPVSMTKTSVDCTMYICGDSTECSNLLLQYGSFCTQLNRALTGIAVEQDKNTQEVFAQVKQIYKTPPIKDFGGFNFSQILPDPSKPSKRSFIEDLLFNKVTLADAGFIKQYGDCLGDIAARDLICAQKFNGLTVLPPLLTDEMIAQYTSALLAGTITSGWTFGAGAALQIPFAMQMAYRFNGIGVTQNVLYENQKLIANQFNSAIGKIQDSLSSTASALGKLQDVVNQNAQALNTLVKQLSSNFGAISSVLNDILSRLDPPEAEVQIDRLITGRLQSLQTYVTQQLIRAAEIRASANLAATKMSECVLGQSKRVDFCGKGYHLMSFPQSAPHGVVFLHVTYVFAQEKNFTTAPAICHDGKAHFPREGVFVSNGTHWFVTQRNFYEPQIITTDNTFVSGNCDVVIGIVNNTVYDPLQPELDSFKEELDKYFKNHTSPDVDLGDISGINASVVNIQKEIDRLNEVAKNLNESLIDLQELGKYEQYIKGGGSGGGQIYEGKLTAEGLRFGIVASRFNHALVDRLVEGAIDAIVRHGGREEDITLVRVPGSWEIPVAAGELARKEDIDAVIAIGVLIRGATPHFDYIASEVSKGLADLSLELRKPITFGVITADTLEQAIERAGTKHGNKGWEAALSAIEMANLFKSLR

SEQ ID NO: 3868 - protein, 1371 aa, Artificial Sequence
  SARS-CoV-2/France/HF2496/2020__EPI_ISL_418231 spike protein (1-1211)(K986P_V987P_P1069F) LumSynth construct
MFVFLVLLPLVSSQCVNLTTRTQLPPAYTNSFTRGVYYPDKVFRSSVLHSTQDLFLPFFSNVTWFHAIHVSGTNGTKRFDNPVLPFNDGVYFASTEKSNIIRGWIFGTTLDSKTQSLLIVNNATNVVIKVCEFQFCNDPFLGVYYHKNNKSWMESEFRVYSSANNCTFEYVSQPFLMDLEGKQGNFKNLREFVFKNIDGYFKIYSKHTPINLVRDLPQGFSALEPLVDLPIGINITRFQTLLALHRSYLTPGDSSSGWTAGAAAYYVGYLQPRTFLLKYNENGTITDAVDCALDPLSETKCTLKSFTVEKGIYQTSNFRVQPTESIVRFPNITNLCPFGEVFNATRFASVYAWNRKRISNCVADYSVLYNSASFSTFKCYGVSPTKLNDLCFTNVYADSFVIRGDEVRQIAPGQTGKIADYNYKLPDDFTGCVIAWNSNNLDSKVGGNYNYLYRLFRKSNLKPFERDISTEIYQAGSTPCNGVEGFNCYFPLQSYGFQPTNGVGYQPYRVVVLSFELLHAPATVCGPKKSTNLVKNKCVNFNFNGLTGTGVLTESNKKFLPFQQFGRDIADTTDAVRDPQTLEILDITPCSFGGVSVITPGTNTSNQVAVLYQGVNCTEVPVAIHADQLTPTWRVYSTGSNVFQTRAGCLIGAEHVNNSYECDIPIGAGICASYQTQTNSPRRARSVASQSIIAYTMSLGAENSVAYSNNSIAIPTNFTISVTTEILPVSMTKTSVDCTMYICGDSTECSNLLLQYGSFCTQLNRALTGIAVEQDKNTQEVFAQVKQIYKTPPIKDFGGFNFSQILPDPSKPSKRSFIEDLLFNKVTLADAGFIKQYGDCLGDIVARDLICAQKFNGLTVLPPLLTDEMIAQYTSALLAGTITSGWTFGAGAALQIPFAMQMAYRFNGIGVTQNVLYENQKLIANQFNSAIGKIQDSLSSTASALGKLQDVVNQNAQALNTLVKQLSSNFGAISSVLNDILSRLDPPEAEVQIDRLITGRLQSLQTYVTQQLIRAAEIRASANLAATKMSECVLGQSKRVDFCGKGYHLMSFPQSAPHGVVFLHVTYVFAQEKNFTTAPAICHDGKAHFPREGVFVSNGTHWFVTQRNFYEPQIITTDNTFVSGNCDVVIGIVNNTVYDPLQPELDSFKEELDKYFKNHTSPDVDLGDISGINASVVNIQKEIDRLNEVAKNLNESLIDLQELGKYEQYIKGGGSGGGQIYEGKLTAEGLRFGIVASRFNHALVDRLVEGAIDAIVRHGGREEDITLVRVPGSWEIPVAAGELARKEDIDAVIAIGVLIRGATPHFDYIASEVSKGLADLSLELRKPITFGVITADTLEQAIERAGTKHGNKGWEAALSAIEMANLFKSLR

SEQ ID NO: 3869 - protein, 1371 aa, Artificial Sequence
  SARS-CoV-2/USA/WA-UW291/2020__EPI_ISL_418076 spike protein (1-1211)(K986P_V987P_P1069F) LumSynth construct
MFVFLVLLPLVSSQCVNLTTRTQLPPAYTNSFTRGVYYPDKVFRSSVLHSTQDLFLPFFSNVTWFHAIHVSGTNGTKRFDNPVLPFNDGVYFASTEKSNIIRGWIFGTTLDSKTQSLLIVNNATNVVIKVCEFQFCNDPFLGVYYHKNNKSWMESEFRVYSSANNCTFEYVSQPFLMDLEGKQGNFKNLREFVFKNIDGYFKIYSKHTPINLVRDLPQGFSALEPLVDLPIGINITRFQTLLALHRSYLTPGDSSSGWTAGAAAYYVGYLQPRTFLLKYNENGTITDAVDCALDPLSETKCTLKSFTVEKGIYQTSNFRVQPTESIVRFPNITNLCPFGEVFNATRFASVYAWNRKRISNCVADYSVLYNSASFSTFKCYGVSPTKLNDLCFTNVYADSFVIRGDEVRQIAPGQTGKIADYNYKLPDDFTGCVIAWNSNNLDSKVGGNYNYLYRLFRKSNLKPFERDISTEIYQAGSTPCNGVEGFNCYFPLQSYGFQPTNGVGYQPYRVVVLSFELLHAPATVCGPKKSTNLVKNKCVNFNFNGLTGTGVLTESNKKFLPFQQFGRDIADTTDAVRDPQTLEILDITPCSFGGVSVITPGTNTSNQVAVLYQGVNCTEVPVAIHADQLTPTWRVYSTGSNVFQTRAGCLIGAEHVNNSYECDIPIGAGICASYQTQTNSPRRARSVASQSIIAYTMSLGAENSVAYSNNSIAIPTNFTISVTTEILPVSMTKTSVDCTMYICGDSTECSNLLLQYGSFCTQLNRALTGIAVEQDKNTQEVFAQVKQIYKTPPIKDFGGFNFSQILPDPSKPSKRSFIEDLLFNKVTLADAGFIKQYGDCLGDIAARDLICAQKFNGLTVLPPLLTDEMIAQYTSALLAGTITSGWTFGAGAALQIPFAMQMAYRFNGIGVTQNVLYENQKLIANQFNSAIGKIQYSLSSTASALGKLQDVVNQNAQALNTLVKQLSSNFGAISSVLNDILSRLDPPEAEVQIDRLITGRLQSLQTYVTQQLIRAAEIRASANLAATKMSECVLGQSKRVDFCGKGYHLMSFPQSAPHGVVFLHVTYVFAQEKNFTTAPAICHDGKAHFPREGVFVSNGTHWFVTQRNFYEPQIITTDNTFVSGNCDVVIGIVNNTVYDPLQPELDSFKEELDKYFKNHTSPDVDLGDISGINASVVNIQKEIDRLNEVAKNLNESLIDLQELGKYEQYIKGGGSGGGQIYEGKLTAEGLRFGIVASRFNHALVDRLVEGAIDAIVRHGGREEDITLVRVPGSWEIPVAAGELARKEDIDAVIAIGVLIRGATPHFDYIASEVSKGLADLSLELRKPITFGVITADTLEQAIERAGTKHGNKGWEAALSAIEMANLFKSLR

SEQ ID NO: 3870 - protein, 1371 aa, Artificial Sequence; identical to SEQ ID NO: 3833
  SARS-CoV-2/Portugal/PT0034/2020__EPI_ISL_418019 spike protein (1-1211)(K986P_V987P_P1069F) LumSynth construct

SEQ ID NO: 3871 - protein, 1371 aa, Artificial Sequence
  SARS-CoV-2/Iceland/202/2020__EPI_ISL_417750 spike protein (1-1211)(K986P_V987P_P1069F) LumSynth construct
MFVFLVLLPLVSSQCVNLTTRTQLPPAYTNSFTRGVYYPDKVFRSSVLHSTQDLFLPFFSNVTWFHAIHVSGTNGTKRFDNPVLPFNDGVYFASTEKSNIIRGWIFGTTLDSKTQSLLIVNNATNVVIKVCEFQFCNDPFLGVYYHKNNKSWMESEFRVYSSANNCTFEYVSQPFLMDLEGKQGNFKNLREFVFKNIDGYFKIYSKHTPINLVRDLPQGFSALEPLVDLPIGINITRFQTLLALHRSYLTPGDSSSGWTAGAAAYYVGYLQPRTFLLKYNENGTITDAVDCALDPLSETKCTLKSFTVEKGIYQTSNFRVQPTESIVRFPNITNLCPFGEVFNATRFASVYAWNRKRISNCVADYSVLYNSASFSTFKCYGVSPTKLNDLCFTNVYADSFVIRGDEVRQIAPGQTGKIADYNYKLPDDFTGCVIAWNSNNLDSKVGGNYNYLYRLFRKSNLKPFERDISTEIYQAGSTPCNGVEGFNCYFPLQSYGFQPTNGVGYQPYRVVVLSFELLHAPATVCGPKKSTNLVKNKCVNFNFNGLTGTGVLTESNKKFLPFQQFGRDIADTTDAVRDPQTLEILDITPCSFGGVSVITPGTNTSNQVAVLYQDVNCTEVPVAIHADQLTPTWRVYSTGSNVFQTRAGCLIGAEHVNNSYECDIPIGAGICASYQTQTNSPRRARSVASQSIIAYTMSLGAENSVAYSNNSIAIPTNFTISVTTEILPVSMTKTSVDCTMYICGDSTECSNLLLQYGSFCTQLNRALTGIAVEQDKNTQEVFAQVKQIYKTPPIKDFGGFNFSQILPDPSKPSKRSFIEDLLFNKVTLADAGFIKQYGDCLGDIAARDLICAQKFNGLTVLPPLLTDEMIAQYTSALLAGTITSGWTFGAGAALQIPFAMQMAYRFNGIGVTQNVLYENQKLIANQFNSAIGKIQDSLSSTASALGKLQDVVNQNAQALNTLVKQLSSNFGAISSVLNDILSRLDPPEAEVQIDRLITGRLQSLQTYVTQQLIRAAEIRASANLAATKMSECVLGQSKRVDFCGKGYHLMSFPQSAPHGVVFLHVTYVFAQEKNFTTAPAICHDGKAHFPREGVFVSNGTHWFVTQRNFYEPQIITTDNTFVSGNCDVVIGIVNNTVYDPLQPELDSFKEELDKYFKNHTSPDVDLGDIPGINASVVNIQKEIDRLNEVAKNLNESLIDLQELGKYEQYIKGGGSGGGQIYEGKLTAEGLRFGIVASRFNHALVDRLVEGAIDAIVRHGGREEDITLVRVPGSWEIPVAAGELARKEDIDAVIAIGVLIRGATPHFDYIASEVSKGLADLSLELRKPITFGVITADTLEQAIERAGTKHGNKGWEAALSAIEMANLFKSLR

SEQ ID NO: 3872 - protein, 1371 aa, Artificial Sequence
  SARS-CoV-2/USA/WA-UW261/2020__EPI_ISL_418046 spike protein (1-1211)(K986P_V987P_P1069F) LumSynth construct
MFVFLVLLPLVSSQCVNLTTRTQLPPAYTNSFTRGVYYPDKVFRSSVLHSTQDLFLPFFSNVTWFHAIHVSGTNGTKRFDNPVLPFNDGVYFASTEKSNIIRGWIFGTTLDSKTQSLLIVNNATNVVIKVCEFQFCNDPFLGVYYHKNNKSWMESEFRVYSSANNCTFEYVSQPFLMDLEGKQGNFKNLREFVFKNIDGYFKIYSKHTPINLVRDLPQGFSALEPLVDLPIGINITRFQTLLALHRSYLTPGDSSSGWTAGAAAYYVGYLQPRTFLLKYNENGTITDAVDCALDPLSETKCTLKSFTVEKGIYQTSNFRVQPTESIVRFPNITNLCPFGEVFNATRFTSVYAWNRKRISNCVADYSVLYNSASFSTFKCYGVSPTKLNDLCFTNVYADSFVIRGDEVRQIAPGQTGKIADYNYKLPDDFTGCVIAWNSNNLDSKVGGNYNYLYRLFRKSNLKPFERDISTEIYQAGSTPCNGVEGFNCYFPLQSYGFQPTNGVGYQPYRVVVLSFELLHAPATVCGPKKSTNLVKNKCVNFNFNGLTGTGVLTESNKKFLPFQQFGRDIADTTDAVRDPQTLEILDITPCSFGGVSVITPGTNTSNQVAVLYQDVNCTEVPVAIHADQLTPTWRVYSTGSNVFQTRAGCLIGAEHVNNSYECDIPIGAGICASYQTQTNSPRRARSVASQSIIAYTMSLGAENSVAYSNNSIAIPTNFTISVTTEILPVSMTKTSVDCTMYICGDSTECSNLLLQYGSFCTQLNRALTGIAVEQDKNTQEVFAQVKQIYKTPPIKDFGGFNFSQILPDPSKPSKRSFIEDLLFNKVTLADAGFIKQYGDCLGDIAARDLICAQKFNGLTVLPPLLTDEMIAQYTSALLAGTITSGWTFGAGAALQIPFAMQMAYRFNGIGVTQNVLYENQKLIANQFNSAIGKIQDSLSSTASALGKLQDVVNQNAQALNTLVKQLSSNFGAISSVLNDILSRLDPPEAEVQIDRLITGRLQSLQTYVTQQLIRAAEIRASANLAATKMSECVLGQSKRVDFCGKGYHLMSFPQSAPHGVVFLHVTYVFAQEKNFTTAPAICHDGKAHFPREGVFVSNGTHWFVTQRNFYEPQIITTDNTFVSGNCDVVIGIVNNTVYDPLQPELDSFKEELDKYFKNHTSPDVDLGDISGINASVVNIQKEIDRLNEVAKNLNESLIDLQELGKYEQYIKGGGSGGGQIYEGKLTAEGLRFGIVASRFNHALVDRLVEGAIDAIVRHGGREEDITLVRVPGSWEIPVAAGELARKEDIDAVIAIGVLIRGATPHFDYIASEVSKGLADLSLELRKPITFGVITADTLEQAIERAGTKHGNKGWEAALSAIEMANLFKSLR

SEQ ID NO: 3873 - protein, 1371 aa, Artificial Sequence
  SARS-CoV-2/Portugal/PT0035/2020__EPI_ISL_418020 spike protein (1-1211)(K986P_V987P_P1069F) LumSynth construct
MFVFLVLLPLVSSQCVNLTTRTQLPPAYTNSFTRGVYYPDKVFRSSVLHSTQDLFLPFFSNVTWFHAIHVSGTNGTKRFDNPVLPFNDGVYFASTEKSNIIRGWIFGTTLDSKTQSLLIVNNATNVVIKVCEFQFCNDPFLGVYYHKNNKSWMESEFRVYSSANNCTFEYVSQPFLMDLEGKQGNFKNLREFVFKNIDGYFKIYSKHTPINLVRDLPQGFSALEPLVDLPIGINITRFQTLLALHRSYLTPGDSSSGWTAGAAAYYVGYLQPRTFLLKYNENGTITDAVDCALDPLSETKCTLKSFTVEKGIYQTSNFRVQPTESIVRFPNITNLCPFGEVFNATRFASVYAWNRKRISNCVADYSVLYNSASFSTFKCYGVSPTKLNDLCFTNVYADSFVIRGDEVRQIAPGQTGKIADYNYKLPDDFTGCVIAWNSNNLDSKVGGNYNYLYRLFRKSNLKPFERDISTEIYQAGSTPCNGVEGFNCYFPLQSYGFQPTNGVGYQPYRVVVLSFELLHAPATVCGPKKSTNLVKNKCVNFNFNGLTGTGVLTESNKKFLPFQQFGRDIADTTDAVRDPQTLEILDITPCSFGGVSVITPGTNTSNQVAVLYQDVNCTEVPVAIHADQLTPTWRVYSTGSNVFQTRAGCLIGAEHVNNSYECDIPIGAGICASYQTQTNSPRRARSVASQSIIAYTMSLGAENSVAYSNNSIAIPTNFTISVTTEILPVSMTKTSVDCTMYICGDSTECSNLLLQYGSFCTQLNRALTGIAVEQDKNTQEVFAQVKQIYKTPPIKDFGGFNFSQILPDPSKPSKRSFIEDLLFNKVTLADAGFIKQYGDCLGDISARDLICAQKFNGLTVLPPLLTDEMIAQYTSALLAGTITSGWTFGAGAALQIPFAMQMAYRFNGIGVTQNVLYENQKLIANQFNSAIGKIQDSLSSTASALGKLQDVVNQNAQALNTLVKQLSSNFGAISSVLNDILSRLDPPEAEVQIDRLITGRLQSLQTYVTQQLIRAAEIRASANLAATKMSECVLGQSKRVDFCGKGYHLMSFPQSAPHGVVFLHVTYVFAQEKNFTTAPAICHDGKAHFPREGVFVSNGTHWFVTQRNFYEPQIITTDNTFVSGNCDVVIGIVNNTVYDPLQPELDSFKEELDKYFKNHTSPDVDLGDISGINASVVNIQKEIDRLNEVAKNLNESLIDLQELGKYEQYIKGGGSGGGQIYEGKLTAEGLRFGIVASRFNHALVDRLVEGAIDAIVRHGGREEDITLVRVPGSWEIPVAAGELARKEDIDAVIAIGVLIRGATPHFDYIASEVSKGLADLSLELRKPITFGVITADTLEQAIERAGTKHGNKGWEAALSAIEMANLFKSLR

SEQ ID NO: 3874 - protein, 1371 aa, Artificial Sequence
  SARS-CoV-2/USA/NY-NYUMC7/2020__EPI_ISL_418192 spike protein (1-1211)(K986P_V987P_P1069F) LumSynth construct
MFVFLVLLPLVSSQCVNLTTRTQLPPAYTNSFTRGVYYPDKVFRSSVLHSTQDLFLPFFSNVTWFHAIHVSGTNGTKRFDNPVLPFNDGVYFASTEKSNIIRGWIFGTTLDSKTQSLLIVNNATNVVIKVCEFQFCNDPFLGVYHHKNNKSWMESEFRVYSSANNCTFEYVSQPFLMDLEGKQGNFKNLREFVFKNIDGYFKIYSKHTPINLVRDLPQGFSALEPLVDLPIGINITRFQTLLALHRSYLTPGDSSSGWTAGAAAYYVGYLQPRTFLLKYNENGTITDAVDCALDPLSETKCTLKSFTVEKGIYQTSNFRVQPTESIVRFPNITNLCPFGEVFNATRFASVYAWNRKRISNCVADYSVLYNSASFSTFKCYGVSPTKLNDLCFTNVYADSFVIRGDEVRQIAPGQTGKIADYNYKLPDDFTGCVIAWNSNNLDSKVGGNYNYLYRLFRKSNLKPFERDISTEIYQAGSTPCNGVEGFNCYFPLQSYGFQPTNGVGYQPYRVVVLSFELLHAPATVCGPKKSTNLVKNKCVNFNFNGLTGTGVLTESNKKFLPFQQFGRDIADTTDAVRDPQTLEILDITPCSFGGVSVITPGTNTSNQVAVLYQGVNCTEVPVAIHADQLTPTWRVYSTGSNVFQTRAGCLIGAEHVNNSYECDIPIGAGICASYQTQTNSPRRARSVASQSIIAYTMSLGAENSVAYSNNSIAIPTNFTISVTTEILPVSMTKTSVDCTMYICGDSTECSNLLLQYGSFCTQLNRALTGIAVEQDKNTQEVFAQVKQIYKTPPIKDFGGFNFSQILPDPSKPSKRSFIEDLLFNKVTLADAGFIKQYGDCLGDIAARDLICAQKFNGLTVLPPLLTDEMIAQYTSALLAGTITSGWTFGAGAALQIPFAMQMAYRFNGIGVTQNVLYENQKLIANQFNSAIGKIQDSLSSTASALGKLQDVVNQNAQALNTLVKQLSSNFGAISSVLNDILSRLDPPEAEVQIDRLITGRLQSLQTYVTQQLIRAAEIRASANLAATKMSECVLGQSKRVDFCGKGYHLMSFPQSAPHGVVFLHVTYVFAQEKNFTTAPAICHDGKAHFPREGVFVSNGTHWFVTQRNFYEPQIITTDNTFVSGNCDVVIGIVNNTVYDPLQPELDSFKEELDKYFKNHTSPDVDLGDISGINASVVNIQKEIDRLNEVAKNLNESLIDLQELGKYEQYIKGGGSGGGQIYEGKLTAEGLRFGIVASRFNHALVDRLVEGAIDAIVRHGGREEDITLVRVPGSWEIPVAAGELARKEDIDAVIAIGVLIRGATPHFDYIASEVSKGLADLSLELRKPITFGVITADTLEQAIERAGTKHGNKGWEAALSAIEMANLFKSLR

SEQ ID NO: 3875 - protein, 1371 aa, Artificial Sequence
  SARS-CoV-2/Iceland/189/2020__EPI_ISL_417709 spike protein (1-1211)(K986P_V987P_P1069F) LumSynth construct
MFVFLVLLPLVSSQCVNLTTRTQLPPAYTNSFTRGVYYPDKVFRSSVLHSTQDLFLPFFSNVTWFHAIHVSGTNGTKRFDNPVLPFNDGVYFASTEKSNIIRGWIFGTTLDSKTQSLLIVNNATNVVIKVCEFQFCNDPFLGVYYHKNNKSWMESEFRVYSSANNCTFEYVSQPFLMDLEGKQGNFKNLREFVFKNIDGYFKIYSKHTPINLVRDLPQGFSALEPLVDLPIGINITRFQTLLALHRSYLTPGDSSSGWTAGAAAYYVGYLQPRTFLLKYNENGTITDAVDCALDPLSETKCTLKSFTVEKGIYQTSNFRVQPTESIVRFPNITNLCPFGEVFNATRFASVYAWNRKRISNCVADYSVLYNSASFSTFKCYGVSPTKLNDLCFTNVYADSFVIRGDEVRQIAPGQTGKIADYNYKLPDDFTGCVIAWNSNNLDSKVGGNYNYLYRLFRKSNLKPFERDISTEIYQAGSTPCNGVEGFNCYFPLQSYGFQPTNGVGYQPYRVVVLSFELLHAPATVCGPKKSTNLVKNKCVNFNFNGLTGTGVLTESNKKFLPFQQFGRDIADTTDAVRDPQTLEILDITPCSFGGVSVITPGTNTSNQVAVLYQGVNCTEVPVAIHADQLTPTWRVYSTGSNVFQTRAGCLIGAEHVNNSYECDIPIGAGICASYQTQTNSPRRARSVASQSIIAYTMSLGAENSVAYSNNSIAIPTNFTISVTTEILPVSMTKTSVDCTMYICGDSTECSNLLLQYGSFCTQLNRALTGIAVEQDKNTQEVFAQVKQIYKTPPIKDFGGFNFSQILPDPSKPSKRSFIEDLLFNKVTLADAGFTKQYGDCLGDIAARDLICAQKFNGLTVLPPLLTDEMIAQYTSALLAGTITSGWTFGAGAALQIPFAMQMAYRFNGIGVTQNVLYENQKLIANQFNSAIGKIQDSLSSTASALGKLQDVVNQNAQALNTLVKQLSSNFGAISSVLNDILSRLDPPEAEVQIDRLITGRLQSLQTYVTQQLIRAAEIRASANLAATKMSECVLGQSKRVDFCGKGYHLMSFPQSAPHGVVFLHVTYVFAQEKNFTTAPAICHDGKAHFPREGVFVSNGTHWFVTQRNFYEPQIITTDNTFVSGNCDVVIGIVNNTVYDPLQPELDSFKEELDKYFKNHTSPDVDLGDISGINASVVNIQKEIDRLNEVAKNLNESLIDLQELGKYEQYIKGGGSGGGQIYEGKLTAEGLRFGIVASRFNHALVDRLVEGAIDAIVRHGGREEDITLVRVPGSWEIPVAAGELARKEDIDAVIAIGVLIRGATPHFDYIASEVSKGLADLSLELRKPITFGVITADTLEQAIERAGTKHGNKGWEAALSAIEMANLFKSLR

SEQ ID NO: 3876 - protein, 1371 aa, Artificial Sequence
  SARS-CoV-2/Australia/NSW56/2020__EPI_ISL_417408 spike protein (1-1211)(K986P_V987P_P1069F) LumSynth construct
MFVFLVLLPLVSSQCVNLTTRTQLPPAYTNSFTRGVYYPDKVFRSSVLHSTQDLFLPFFSNVTWFHAIHVSGTNGTKRFDNPVLPFNDGVYFASTEKSNIIRGWIFGTTLDSKTQSLLIVNNATNVVIKVCEFQFCNDPFLGVYYHKNNKSWMESEFRVYSSANNCTFEYVSQPFLMDLEGKQGNFKNLREFVFKNIDGYFKIYSKHTPINLVRDLPQGFSALEPLVDLPIGINITRFQTLLALHRSYLTPGDSSSGWTAGAAAYYVGYLQPRTFLLKYNENGTITDAVDCALDPLSETKCTLKSFTVEKGIYQTSNFRVQPTESIVRFPNITNLCPFGEVFNATRFASVYAWNRKRISNCVADYSVLYNSASFSTFKCYGVSPTKLNDLCFTNVYADSFVIRGDEVRQIAPGQTGKIADYNYKLPDDFTGCVIAWNSNNLDSKVGGNYNYLYRLFRKSNLKPFERDISTEIYQAGSTPCNGVEGFNCYFPLQSYGFQPTNGVGYQPYRVVVLSFELLHAPATVCGPKKSTNLVKNKCVNFNFNGLTGTGVLTESNKKFLPFQQFGRDIADTTDAVRDPQTLEILDITPCSFGGVSVITPGTNTSNQVAVLYQDVNCTEVPVAIHADQLTPTWRVYSTGSNVFQTRAGCLIGAEHVNNSYECDIPIGAGICASYQTQTNSPRRARSVASQSIIAYTMSLGAENSVAYSNNSIAIPTNFTISVTTEILPVSMTKTSVDCTMYICGDSTECSNLLLQYGSFCTQLNRALTGIAVEQDKNTQEVFAQVKQIYKTPPIKDFGGFNFSQILPDSSKPSKRSFIEDLLFNKVTLADAGFIKQYGDCLGDIAARDLICAQKFNGLTVLPPLLTDEMIAQYTSALLAGTITSGWTFGAGAALQIPFAMQMAYRFNGIGVTQNVLYENQKLIANQFNSAIGKIQDSLSSTASALGKLQDVVNQNAQALNTLVKQLSSNFGAISSVLNDILSRLDPPEAEVQIDRLITGRLQSLQTYVTQQLIRAAEIRASANLAATKMSECVLGQSKRVDFCGKGYHLMSFPQSAPHGVVFLHVTYVFAQEKNFTTAPAICHDGKAHFPREGVFVSNGTHWFVTQRNFYEPQIITTDNTFVSGNCDVVIGIVNNTVYDPLQPELDSFKEELDKYFKNHTSPDVDLGDISGINASVVNIQKEIDRLNEVAKNLNESLIDLQELGKYEQYIKGGGSGGGQIYEGKLTAEGLRFGIVASRFNHALVDRLVEGAIDAIVRHGGREEDITLVRVPGSWEIPVAAGELARKEDIDAVIAIGVLIRGATPHFDYIASEVSKGLADLSLELRKPITFGVITADTLEQAIERAGTKHGNKGWEAALSAIEMANLFKSLR

SEQ ID NO: 3877 - protein, 1371 aa, Artificial Sequence
  SARS-CoV-2/Iceland/280/2020__EPI_ISL_417608 spike protein (1-1211)(K986P_V987P_P1069F) LumSynth construct
MFVFLVLLPLVSSQCVNLTTRTQLPPAYTNSFTRGVYYPDKVFRSSVLHSTQDLFLPFFSNVTWFHAIHVSGTNGTKRFDNPVLPFNDGVYFASTEKSNIIRGWIFGTTLDSKTQSLLIVNNATNVVIKVCEFQFCNDPFLGVYYHKNNKSWMESEFRVYSSANNCTFEYVSQPFLMDLEGKQGNFKNLREFVFKNIDGYFKIYSKHTPINLVRDLPQGFSALEPLVDLPIGINITRFQTLLALHRSYLTPGDSSSGWTAGAAAYYVGYLQPRTFLLKYNENGTITDAVDCALDPLSETKCTLKSFTVEKGIYQTSNFRVQPTESIVRFPNITNLCPFGEVFNATRFASVYAWNRKRISNCVADYSVLYNSASFSTFKCYGVSPTKLNDLCFTNVYADSFVIRGDEVRQIAPGQTGKIADYNYKLPDDFTGCVIAWNSNNLDSKVGGNYNYLYRLFRKSNLKPFERDISTEIYQAGSTPCNGVEGFNCYFPLQSYGFQPTNGVGYQPYRVVVLSFELLHAPATVCGPKKSTNLVKNKCVNFNFNGLTGTGVLTESNKKFLPFQQFGRDIADTTDAVRDPQTLEILDITPCSFGGVSVITPGTNTSNQVAVLYQGVNCTEVPVAIHADQLTPTWRVYSTGSNVFQTRAGCLIGAEHVNNSYECDIPIGAGICASYHTQTNSPRRARSVASQSIIAYTMSLGAENSVAYSNNSIAIPTNFTISVTTEILPVSMTKTSVDCTMYICGDSTECSNLLLQYGSFCTQLNRALTGIAVEQDKNTQEVFAQVKQIYKTPPIKDFGGFNFSQILPDPSKPSKRSFIEDLLFNKVTLADAGFIKQYGDCLGDIAARDLICAQKFNGLTVLPPLLTDEMIAQYTSALLAGTITSGWTFGAGAALQIPFAMQMAYRFNGIGVTQNVLYENQKLIANQFNSAIGKIQDSLSSTASALGKLQDVVNQNAQALNTLVKQLSSNFGAISSVLNDILSRLDPPEAEVQIDRLITGRLQSLQTYVTQQLIRAAEIRASANLAATKMSECVLGQSKRVDFCGKGYHLMSFPQSAPHGVVFLHVTYVFAQEKNFTTAPAICHDGKAHFPREGVFVSNGTHWFVTQRNFYEPQIITTDNTFVSGNCDVVIGIVNNTVYDPLQPELDSFKEELDKYFKNHTSPDVDLGDISGINASVVNIQKEIDRLNEVAKNLNESLIDLQELGKYEQYIKGGGSGGGQIYEGKLTAEGLRFGIVASRFNHALVDRLVEGAIDAIVRHGGREEDITLVRVPGSWEIPVAAGELARKEDIDAVIAIGVLIRGATPHFDYIASEVSKGLADLSLELRKPITFGVITADTLEQAIERAGTKHGNKGWEAALSAIEMANLFKSLR

SEQ ID NO: 3878 - protein, 1371 aa, Artificial Sequence; identical to SEQ ID NO: 3833
  SARS-CoV-2/Iceland/247/2020__EPI_ISL_417575 spike protein (1-1211)(K986P_V987P_P1069F) LumSynth construct

SEQ ID NO: 3879 - protein, 1371 aa, Artificial Sequence
  SARS-CoV-2/Iceland/238/2020__EPI_ISL_417566 spike protein (1-1211)(K986P_V987P_P1069F) LumSynth construct
MFVFLVLLPLVSSQCVNLTTRTQLPPAYTNSFTRGVYYPDKVFRSSVLHSTQDLFLPFFSNVTWFHAIHVSGTNGTKRFDNPVLPFNDGVYFASTEKSNIIRGWIFGTTLDSKTQSLLIVNNATNVVIKVCEFQFCNDPFLGVYYHKNNKSWMESEFRVYSSANNCTFEYVSQPFLMDLEGKQGNFKNLREFVFKNIDGYFKIYSKHTPINLVRDLPQGFSALEPLVDLPIGINITRFQTLLALHRSYLTPGDSSSGWTAGAAAYYVGYLQPRTFLLKYNENGTITDAVDCALDPLSETKCTLKSFTVEKGIYQTSNFRVQPTESIVRFPNITNLCPFGEVFNATRFASVYAWNRKRISNCVADYSVLYNSASFSTFKCYGVSPTKLNDLCFTNVYADSFVIRGDEVRQIAPGQTGKIADYNYKLPDDFTGCVIAWNSNNLDSKVGGNYNYLYRLFRKSNLKPFERDISTEIYQAGSTPCNGVEGFNCYFPLQSYGFQPTNGVGYQPYRVVVLSFELLHAPATVCGPKKSTNLVKNKCVNFNFNGLTGTGVLTESNKKFLPFQQFGRDIADTTDAVRDPQTLEILDITPCSFGGVSVITPGTNTSNQVAVLYQGVNCTEVPVAIHADQLTPTWRVYSTGSNVFQTRAGCLIGAEHVNNSYECDIPIGAGICASYQTQTNSPRRARSVASQSIIAYTMSLGAENSVAYSNNSIAIPTNFTISVTTEILPVSMTKTSVDCTMYICGDSTECSNLLLQYGSFCTQLNRALTGIAVEQDKNTQEVFAQVKQIYKTPPIKDFGGFNFSQILPDPSKPSKRSFIEDLLFNKVTLADVGFIKQYGDCLGDIAARDLICAQKFNGLTVLPPLLTDEMIAQYTSALLAGTITSGWTFGAGAALQIPFAMQMAYRFNGIGVTQNVLYENQKLIANQFNSAIGKIQDSLSSTASALGKLQDVVNQNAQALNTLVKQLSSNFGAISSVLNDILSRLDPPEAEVQIDRLITGRLQSLQTYVTQQLIRAAEIRASANLAATKMSECVLGQSKRVDFCGKGYHLMSFPQSAPHGVVFLHVTYVFAQEKNFTTAPAICHDGKAHFPREGVFVSNGTHWFVTQRNFYEPQIITTDNTFVSGNCDVVIGIVNNTVYDPLQPELDSFKEELDKYFKNHTSPDVDLGDISGINASVVNIQKEIDRLNEVAKNLNESLIDLQELGKYEQYIKGGGSGGGQIYEGKLTAEGLRFGIVASRFNHALVDRLVEGAIDAIVRHGGREEDITLVRVPGSWEIPVAAGELARKEDIDAVIAIGVLIRGATPHFDYIASEVSKGLADLSLELRKPITFGVITADTLEQAIERAGTKHGNKGWEAALSAIEMANLFKSLR

SEQ ID NO: 3880 - protein, 1371 aa, Artificial Sequence
  SARS-CoV-2/Greece/16/2020__EPI_ISL_418265 spike protein (1-1211)(K986P_V987P_P1069F) LumSynth construct
MFVFLVLLPLVSSQCVNLTTRTQLPPAYTNSFTRGVYYPDKVFRSSVLHSTQDLFLPFFSNVTWFHAIHVSGTNGTKRFDNPVLPFNDGVYFASTEKSNIIRGWIFGTTLDSKTQSLLIVNNATNVVIKVCEFQFCNDPFLGVYYHKNNKSWMESEFRVYSSANNCTFEYVSQPFLMDLEGKQGNFKNLREFVFKNVDGYFKIYSKHTPINLVRDLPQGFSALEPLVDLPIGINITRFQTLLALHRSYLTPGDSSSGWTAGAAAYYVGYLQPRTFLLKYNENGTITDAVDCALDPLSETKCTLKSFTVEKGIYQTSNFRVQPTESIVRFPNITNLCPFGEVFNATRFASVYAWNRKRISNCVADYSVLYNSASFSTFKCYGVSPTKLNDLCFTNVYADSFVIRGDEVRQIAPGQTGKIADYNYKLPDDFTGCVIAWNSNNLDSKVGGNYNYLYRLFRKSNLKPFERDISTEIYQAGSTPCNGVEGFNCYFPLQSYGFQPTNGVGYQPYRVVVLSFELLHAPATVCGPKKSTNLVKNKCVNFNFNGLTGTGVLTESNKKFLPFQQFGRDIADTTDAVRDPQTLEILDITPCSFGGVSVITPGTNTSNQVAVLYQDVNCTEVPVAIHADQLTPTWRVYSTGSNVFQTRAGCLIGAEHVNNSYECDIPIGAGICASYQTQTNSPRRARSVASQSIIAYTMSLGAENSVAYSNNSIAIPTNFTISVTTEILPVSMTKTSVDCTMYICGDSTECSNLLLQYGSFCTQLNRALTGIAVEQDKNTQEVFAQVKQIYKTPPIKDFGGFNFSQILPDPSKPSKRSFIEDLLFNKVTLADAGFIKQYGDCLGDIAARDLICAQKFNGLTVLPPLLTDEMIAQYTSALLAGTITSGWTFGAGAALQIPFAMQMAYRFNGIGVTQNVLYENQKLIANQFNSAIGKIQDSLSSTASALGKLQDVVNQNAQALNTLVKQLSSNFGAISSVLNDILSRLDPPEAEVQIDRLITGRLQSLQTYVTQQLIRAAEIRASANLAATKMSECVLGQSKRVDFCGKGYHLMSFPQSAPHGVVFLHVTYVFAQEKNFTTAPAICHDGKAHFPREGVFVSNGTHWFVTQRNFYEPQIITTDNTFVSGNCDVVIGIVNNTVYDPLQPELDSFKEELDKYFKNHTSPDVDLGDISGINASVVNIQKEIDRLNEVAKNLNESLIDLQELGKYEQYIKGGGSGGGQIYEGKLTAEGLRFGIVASRFNHALVDRLVEGAIDAIVRHGGREEDITLVRVPGSWEIPVAAGELARKEDIDAVIAIGVLIRGATPHFDYIASEVSKGLADLSLELRKPITFGVITADTLEQAIERAGTKHGNKGWEAALSAIEMANLFKSLR

SEQ ID NO: 3881 - protein, 1371 aa, Artificial Sequence
  SARS-CoV-2/Iceland/319/2020__EPI_ISL_417648 spike protein (1-1211)(K986P_V987P_P1069F) LumSynth construct
MFVFLVLLPLVSSQCVNLTTRTQLPPAYTNSFTRGVYYPDKVFRSSVLHSTQDLFLPFFSNVTWFHAIHVSGTNGTKRFDNPVLPFNDGVYFASTEKSNIIRGWIFGTTLDSKTQSLLIVNNATNVVIKVCEFQFCNDPFLGVYYHKNNKSWMESEFRVYSSANNCTFEYVSQPFLIDLEGKQGNFKNLREFVFKNIDGYFKIYSKHTPINLVRDLPQGFSALEPLVDLPIGINITRFQTLLALHRSYLTPGDSSSGWTAGAAAYYVGYLQPRTFLLKYNENGTITDAVDCALDPLSETKCTLKSFTVEKGIYQTSNFRVQPTESIVRFPNITNLCPFGEVFNATRFASVYAWNRKRISNCVADYSVLYNSASFSTFKCYGVSPTKLNDLCFTNVYADSFVIRGDEVRQIAPGQTGKIADYNYKLPDDFTGCVIAWNSNNLDSKVGGNYNYLYRLFRKSNLKPFERDISTEIYQAGSTPCNGVEGFNCYFPLQSYGFQPTNGVGYQPYRVVVLSFELLHAPATVCGPKKSTNLVKNKCVNFNFNGLTGTGVLTESNKKFLPFQQFGRDIADTTDAVRDPQTLEILDITPCSFGGVSVITPGTNTSNQVAVLYQGVNCTEVPVAIHADQLTPTWRVYSTGSNVFQTRAGCLIGAEHVNNSYECDIPIGAGICASYQTQTNSPRRARSVASQSIIAYTMSLGAENSVAYSNNSIAIPTNFTISVTTEILPVSMTKTSVDCTMYICGDSTECSNLLLQYGSFCTQLNRALTGIAVEQDKNTQEVFAQVKQIYKTPPIKDFGGFNFSQILPDPSKPSKRSFIEDLLFNKVTLADAGFIKQYGDCLGDIAARDLICAQKFNGLTVLPPLLTDEMIAQYTSALLAGTITSGWTFGAGAALQIPFAMQMAYRFNGIGVTQNVLYENQKLIANQFNSAIGKIQDSLSSTASALGKLQDVVNQNAQALNTLVKQLSSNFGAISSVLNDILSRLDPPEAEVQIDRLITGRLQSLQTYVTQQLIRAAEIRASANLAATKMSECVLGQSKRVDFCGKGYHLMSFPQSAPHGVVFLHVTYVFAQEKNFTTAPAICHDGKAHFPREGVFVSNGTHWFVTQRNFYEPQIITTDNTFVSGNCDVVIGIVNNTVYDPLQPELDSFKEELDKYFKNHTSPDVDLGDISGINASVVNIQKEIDRLNEVAKNLNESLIDLQELGKYEQYIKGGGSGGGQIYEGKLTAEGLRFGIVASRFNHALVDRLVEGAIDAIVRHGGREEDITLVRVPGSWEIPVAAGELARKEDIDAVIAIGVLIRGATPHFDYIASEVSKGLADLSLELRKPITFGVITADTLEQAIERAGTKHGNKGWEAALSAIEMANLFKSLR

SEQ ID NO: 3882 - protein, 1371 aa, Artificial Sequence
  SARS-CoV-2/Congo/94/2020__EPI_ISL_417947 spike protein (1-1211)(K986P_V987P_P1069F) LumSynth construct
MFVFLVLLPLVSSQCVNLTTRTQLPPAYTNSFTRGVYYPDKVFRSSVLHSTQDLFLPFFSNVTWFHAIHVSGTNGTKRFDNPVLPFNDGVYFASTEKSNIIRGWIFGTTLDSKTQSLLIVNNATNVVIKVCEFQFCNDPFLGVYYHKNNKSWMESEFRVYSSANNCTFEYVSQPFLMDLEGKQGNFKNLREFVFKNIDGYFKIYSKHTPINLVRDLPQGFSALEPLVDLPIGINITRFQTLLALHRSYLTPGDSSSGWTAGAAAYYVGYLQPRTFLLKYNENGTITDAVDCALDPLSETKCTLKSFTVEKGIYQTSNFRVQPTESIVRFPNITNLCPFGEVFNATRFASVYAWNRKRISNCVADYSVLYNSASFSTFKCYGVSPTKLNDLCFTNVYADSFVIRGDEVRQIAPGQTGKIADYNYKLPDDFTGCVIAWNSNNLDSKVGGNYNYLYRLFRKSNLKPFERDISTEIYQAGSTPCNGVEGFNCYFPLQSYGFQPTNGVGYQPYRVVVLSFELLHAPATVCGPKKSTNLVKNKCVNFNFNGLTGTGVLTESNKKFLPFQQFGRDIADTTDAVRDPQTLEILDITPCSFGGVSVITPGTNTSNQVAVLYQGVNCTEVPVAIHADQLTPTWRVYSTGSNVFQTRAGCLIGAEHVNNSYECDIPIGAGICASYQTQTNSPRRARSVASQSIIAYTMSLGAENSVAYSNNSIAIPTNFTISVTTEILPVSMTKTSVDCTMYICGDSTECSNLLLQYGSFCTQLNRALTGIAVEQDKNTQEVFAQVKQIYKTPPIKDFGGFNFSQILPDPSKPSKRSFIEDILFNKVTLADAGFIKQYGDCLGDIAARDLICAQKFNGLTVLPPLLTDEMIAQYTSALLAGTITSGWTFGAGAALQIPFAMQMAYRFNGIGVTQNVLYENQKLIANQFNSAIGKIQDSLSSTASALGKLQDVVNQNAQALNTLVKQLSSNFGAISSVLNDILSRLDPPEAEVQIDRLITGRLQSLQTYVTQQLIRAAEIRASANLAATKMSECVLGQSKRVDFCGKGYHLMSFPQSAPHGVVFLHVTYVFAQEKNFTTAPAICHDGKAHFPREGVFVSNGTHWFVTQRNFYEPQIITTDNTFVSGNCDVVIGIVNNTVYDPLQPELDSFKEELDKYFKNHTSPDVDLGDISGINASVVNIQKEIDRLNEVAKNLNESLIDLQELGKYEQYIKGGGSGGGQIYEGKLTAEGLRFGIVASRFNHALVDRLVEGAIDAIVRHGGREEDITLVRVPGSWEIPVAAGELARKEDIDAVIAIGVLIRGATPHFDYIASEVSKGLADLSLELRKPITFGVITADTLEQAIERAGTKHGNKGWEAALSAIEMANLFKSLR

SEQ ID NO: 3883 - protein, 1371 aa, Artificial Sequence
  SARS-CoV-2/Congo/158/2020__EPI_ISL_417950 spike protein (1-1211)(K986P_V987P_P1069F) LumSynth construct
MFVFLVLLPLVSSQCVNLTTRTQLPPAYTNSFTRGVYYPDKVFRSSVLHSTQDLFLPFFSNVTWFHAIHVSGTNGTKRFDNPVLPFNDGVYFASTEKSNIIRGWIFGTTLDSKTQSLLIVNNATNVVIKVCEFQFCNDPFLGVYYHKNNKSWMESEFRVYSSANNCTFEYVSQPFLMDLEGKQGNFKNLREFVFKNIDGYFKIYSKHTPINLVRDLPQGFSALEPLVDLPIGINITRFQTLLALHRSYLTPGDSSSGWTAGAAAYYVGYLQPRTFLLKYNENGTITDAVDCALDPLSETKCTLKSFTVEKGIYQTSNFRVQPTESIVRFPNITNLCPFGEVFNATRFASVYAWNRKRISNCVADYSVLYNSASFSTFKCYGVSPTKLNDLCFTNVYADSFVIRGDEVRQIAPGQTGKIADYNYKLPDDFTGCVIAWNSNNLDSKVGGNYNYLYRLFRKSNLKPFERDISTEIYQAGSTPCNGVEGFNCYFPLQSYGFQPTNGVGYQPYRVVVLSFELLHAPATVCGPKKSTNLVKNKCVNFNFNGLTGTGVLTESNKKFLPFQQFGRDIADTTDAVRDPQTLEILDITPCSFGGVSVITPGTNTSNQVAVLYQDVNCTEVPVAIHADQLTPTWRVYSTGSNVFQTRAGCLIGAEHVNNSYECDIPIGAGICASYQTQTNSPRRARSVASQSIIAYTMSLGAENSVAYSNNSIAIPTNFTISVTTEILPVSMTKTSVDCTMYICGDSTECSNLLLQYGSFCTQLNRALTGIAVEQDKNTQEVFAQVKQIYKTPPIKDFGGFNFSQILPDPSKPSKRSFIEDLLFNKVTLADAGFIKQYGDCLGDIAARDLICAQKFNGLTVLPPLLTDEMIAQYTSALLAGTITSGWTFGAGAALQIPFAMQMAYRFNGIGVTQNVLYENQKLIANQFNSAIGKIQDSLSSTASALGKLQDVVNQNAQALNTLVKQLSSNFGAISSVLNDILSRLDPPEAEVQIDRLITGRLQSLQTYVTQQLIRAAEIRASANLAATKMSECVLGQSKRVDFCGKGYHLMSFPQSAPHGVVFLHVTYVFAQEKNFTTAPAICHDGKAHFPREGVFVSNGTHWFVTQRNFYEPQIITTDNTFLSGNCDVVIGIVNNTVYDPLQPELDSFKEELDKYFKNHTSPDVDLGDISGINASVVNIQKEIDRLNEVAKNLNESLIDLQELGKYEQYIKGGGSGGGQIYEGKLTAEGLRFGIVASRFNHALVDRLVEGAIDAIVRHGGREEDITLVRVPGSWEIPVAAGELARKEDIDAVIAIGVLIRGATPHFDYIASEVSKGLADLSLELRKPITFGVITADTLEQAIERAGTKHGNKGWEAALSAIEMANLFKSLR

SEQ ID NO: 3884 - protein, 1371 aa, Artificial Sequence
  SARS-CoV-2/USA/UT-00034/2020__EPI_ISL_417977 spike protein (1-1211)(K986P_V987P_P1069F) LumSynth construct
MFVFLVLLPLVSSQCVNLTTRTQLPPAYTNSFTRGVYYPDKVFRSSVLHSTQDLFLPFFSNVTWFHAIHVSGTNGTKRFDNPVLPFNDGVYFASTEKSNIIRGWIFGTTLDSKTQSLLIVNNATNVVIKVCEFQFCNDPFLGVYYYKNNKSWMESEFRVYSSANNCTFEYVSQPFLMDLEGKQGNFKNLREFVFKNIDGYFKIYSKHTPINLVRDLPQGFSALEPLVDLPIGINITRFQTLLALHRSYLTPGDSSSGWTAGAAAYYVGYLQPRTFLLKYNENGTITDAVDCALDPLSETKCTLKSFTVEKGIYQTSNFRVQPTESIVRFPNITNLCPFGEVFNATRFASVYAWNRKRISNCVADYSVLYNSASFSTFKCYGVSPTKLNDLCFTNVYADSFVIRGDEVRQIAPGQTGKIADYNYKLPDDFTGCVIAWNSNNLDSKVGGNYNYLYRLFRKSNLKPFERDISTEIYQAGSTPCNGVEGFNCYFPLQSYGFQPTNGVGYQPYRVVVLSFELLHAPATVCGPKKSTNLVKNKCVNFNFNGLTGTGVLTESNKKFLPFQQFGRDIADTTDAVRDPQTLEILDITPCSFGGVSVITPGTNTSNQVAVLYQGVNCTEVPVAIHADQLTPTWRVYSTGSNVFQTRAGCLIGAEHVNNSYECDIPIGAGICASYQTQTNSPRRARSVASQSIIAYTMSLGAENSVAYSNNSIAIPTNFTISVTTEILPVSMTKTSVDCTMYICGDSTECSNLLLQYGSFCTQLNRALTGIAVEQDKNTQEVFAQVKQIYKTPPIKDFGGFNFSQILPDPSKPSKRSFIEDLLFNKVTLADAGFIKQYGDCLGDIAARDLICAQKFNGLTVLPPLLTDEMIAQYTSALLAGTITSGWTFGAGAALQIPFAMQMAYRFNGIGVTQNVLYENQKLIANQFNSAIGKIQDSLSSTASALGKLQDVVNQNAQALNTLVKQLSSNFGAISSVLNDILSRLDPPEAEVQIDRLITGRLQSLQTYVTQQLIRAAEIRASANLAATKMSECVLGQSKRVDFCGKGYHLMSFPQSAPHGVVFLHVTYVFAQEKNFTTAPAICHDGKAHFPREGVFVSNGTHWFVTQRNFYEPQIITTDNTFVSGNCDVVIGIVNNTVYDPLQPELDSFKEELDKYFKNHTSPDVDLGDISGINASVVNIQKEIDRLNEVAKNLNESLIDLQELGKYEQYIKGGGSGGGQIYEGKLTAEGLRFGIVASRFNHALVDRLVEGAIDAIVRHGGREEDITLVRVPGSWEIPVAAGELARKEDIDAVIAIGVLIRGATPHFDYIASEVSKGLADLSLELRKPITFGVITADTLEQAIERAGTKHGNKGWEAALSAIEMANLFKSLR

SEQ ID NO: 3885 - protein, 1371 aa, Artificial Sequence
  SARS-CoV-2/USA/UT-00033/2020__EPI_ISL_417976 spike protein (1-1211)(K986P_V987P_P1069F) LumSynth construct
MFVFLVLLPLVSSQCVNLTTRTQLPPAYTNSFTRGVYYPDKVFRSSVLHSTQDLFLPFFSNVTWFHAIHVSGTNGTKRFDNPVLPFNDGVYFASTEKSNIIRGWIFGTTLDSKTQSLLIVNNATNVVIKVCEFQFCNDPFLGVYYHKNNKSWMESEFRVYSSANNCTFEYVSQPFLMDLEGKQGNFKNLREFVFKNIDGYFKIYSKHTPINLVRDLPQGFSALEPLVDLPIGINITRFQTLLALHRSYLTPGDSSSGLTAGAAAYYVGYLQPRTFLLKYNENGTITDAVDCALDPLSETKCTLKSFTVEKGIYQTSNFRVQPTESIVRFPNITNLCPFGEVFNATRFASVYAWNRKRISNCVADYSVLYNSASFSTFKCYGVSPTKLNDLCFTNVYADSFVIRGDEVRQIAPGQTGKIADYNYKLPDDFTGCVIAWNSNNLDSKVGGNYNYLYRLFRKSNLKPFERDISTEIYQAGSTPCNGVEGFNCYFPLQSYGFQPTNGVGYQPYRVVVLSFELLHAPATVCGPKKSTNLVKNKCVNFNFNGLTGTGVLTESNKKFLPFQQFGRDIADTTDAVRDPQTLEILDITPCSFGGVSVITPGTNTSNQVAVLYQGVNCTEVPVAIHADQLTPTWRVYSTGSNVFQTRAGCLIGAEHVNNSYECDIPIGAGICASYQTQTNSPRRARSVASQSIIAYTMSLGAENSVAYSNNSIAIPTNFTISVTTEILPVSMTKTSVDCTMYICGDSTECSNLLLQYGSFCTQLNRALTGIAVEQDKNTQEVFAQVKQIYKTPPIKDFGGFNFSQILPDPSKPSKRSFIEDLLFNKVTLADAGFIKQYGDCLGDIAARDLICAQKFNGLTVLPPLLTDEMIAQYTSALLAGTITSGWTFGAGAALQIPFAMQMAYRFNGIGVTQNVLYENQKLIANQFNSAIGKIQDSLSSTASALGKLQDVVNQNAQALNTLVKQLSSNFGAISSVLNDILSRLDPPEAEVQIDRLITGRLQSLQTYVTQQLIRAAEIRASANLAATKMSECVLGQSKRVDFCGKGYHLMSFPQSAPHGVVFLHVTYVFAQEKNFTTAPAICHDGKAHFPREGVFVSNGTHWFVTQRNFYEPQIITTDNTFVSGNCDVVIGIVNNTVYDPLQPELDSFKEELDKYFKNHTSPDVDLGDISGINASVVNIQKEIDRLNEVAKNLNESLIDLQELGKYEQYIKGGGSGGGQIYEGKLTAEGLRFGIVASRFNHALVDRLVEGAIDAIVRHGGREEDITLVRVPGSWEIPVAAGELARKEDIDAVIAIGVLIRGATPHFDYIASEVSKGLADLSLELRKPITFGVITADTLEQAIERAGTKHGNKGWEAALSAIEMANLFKSLR

SEQ ID NO: 3886 - protein, 1371 aa, Artificial Sequence
  SARS-CoV-2/USA/WI-13/2020__EPI_ISL_417516 spike protein (1-1211)(K986P_V987P_P1069F) LumSynth construct
MFVFLVLLPLVSSQCVNLTTRTQLPPAYTNSFTRGVYYPDKVFRSSVLHSTQDLFLPFFSNVTWFHAIHVSGTNGTKRFDNPVLPFNDGVYFASTEKSNIIRGWIFGTTLDSKTQSLLIVNNATNVVIKVCEFQFCNDPFLGVYYHKNNKSWMESEFRVYSSANNCTFEYVSQPFLMDLEGKQGNFKNLREFVFKNIDGYFKIYSKHTPINLVRDLPQGFSALEPLVDLPIGINITRFQTLLALHRSYLTPGDSSSGWTAGAAAYYVGYLQPRTFLLKYNENGTITDAVDCALDPLSETKCTLKSFTVEKGIYQTSNFRVLPTESIVRFPNITNLCPFGEVFNATRFASVYAWNRKRISNCVADYSVLYNSASFSTFKCYGVSPTKLNDLCFTNVYADSFVIRGDEVRQIAPGQTGKIADYNYKLPDDFTGCVIAWNSNNLDSKVGGNYNYLYRLFRKSNLKPFERDISTEIYQAGSTPCNGVEGFNCYFPLQSYGFQPTNGVGYQPYRVVVLSFELLHAPATVCGPKKSTNLVKNKCVNFNFNGLTGTGVLTESNKKFLPFQQFGRDIADTTDAVRDPQTLEILDITPCSFGGVSVITPGTNTSNQVAVLYQGVNCTEVPVAIHADQLTPTWRVYSTGSNVFQTRAGCLIGAEHVNNSYECDIPIGAGICASYQTQTNSPRRARSVASQSIIAYTMSLGAENSVAYSNNSIAIPTNFTISVTTEILPVSMTKTSVDCTMYICGDSTECSNLLLQYGSFCTQLNRALTGIAVEQDKNTQEVFAQVKQIYKTPPIKDFGGFNFSQILPDPSKPSKRSFIEDLLFNKVTLADAGFIKQYGDCLGDIAARDLICAQKFNGLTVLPPLLTDEMIAQYTSALLAGTITSGWTFGAGAALQIPFAMQMAYRFNGIGVTQNVLYENQKLIANQFNSAIGKIQDSLSSTASALGKLQDVVNQNAQALNTLVKQLSSNFGAISSVLNDILSRLDPPEAEVQIDRLITGRLQSLQTYVTQQLIRAAEIRASANLAATKMSECVLGQSKRVDFCGKGYHLMSFPQSAPHGVVFLHVTYVFAQEKNFTTAPAICHDGKAHFPREGVFVSNGTHWFVTQRNFYEPQIITTDNTFVSGNCDVVIGIVNNTVYDPLQPELDSFKEELDKYFKNHTSPDVDLGDISGINASVVNIQKEIDRLNEVAKNLNESLIDLQELGKYEQYIKGGGSGGGQIYEGKLTAEGLRFGIVASRFNHALVDRLVEGAIDAIVRHGGREEDITLVRVPGSWEIPVAAGELARKEDIDAVIAIGVLIRGATPHFDYIASEVSKGLADLSLELRKPITFGVITADTLEQAIERAGTKHGNKGWEAALSAIEMANLFKSLR

SEQ ID NO: 3887 - protein, 1370 aa, Artificial Sequence
  SARS-CoV-2/India/1-27/2020__EPI_ISL_413522 spike protein (1-1210)(K985P_V986P_P1068F) LumSynth construct
MFVFLVLLPLVSSQCVNLTTRTQLPPAYTNSFTRGVYYPDKVFRSSVLHSTQDLFLPFFSNVTWFHAIHVSGTNGTKRFDNPVLPFNDGVYFASTEKSNIIRGWIFGTTLDSKTQSLLIVNNATNVVIKVCEFQFCNDPFLGVYHKNNKSWMESEFRVYSSANNCTFEYVSQPFLMDLEGKQGNFKNLREFVFKNIDGYFKIYSKHTPINLVRDLPQGFSALEPLVDLPIGINITRFQTLLALHRSYLTPGDSSSGWTAGAAAYYVGYLQPRTFLLKYNENGTITDAVDCALDPLSETKCTLKSFTVEKGIYQTSNFRVQPTESIVRFPNITNLCPFGEVFNATRFASVYAWNRKRISNCVADYSVLYNSASFSTFKCYGVSPTKLNDLCFTNVYADSFVIRGDEVIQIAPGQTGKIADYNYKLPDDFTGCVIAWNSNNLDSKVGGNYNYLYRLFRKSNLKPFERDISTEIYQAGSTPCNGVEGFNCYFPLQSYGFQPTNGVGYQPYRVVVLSFELLHAPATVCGPKKSTNLVKNKCVNFNFNGLTGTGVLTESNKKFLPFQQFGRDIADTTDAVRDPQTLEILDITPCSFGGVSVITPGTNTSNQVAVLYQDVNCTEVPVAIHADQLTPTWRVYSTGSNVFQTRAGCLIGAEHVNNSYECDIPIGAGICASYQTQTNSPRRARSVASQSIIAYTMSLGAENSVAYSNNSIAIPTNFTISVTTEILPVSMTKTSVDCTMYICGDSTECSNLLLQYGSFCTQLNRALTGIAVEQDKNTQEVFAQVKQIYKTPPIKDFGGFNFSQILPDPSKPSKRSFIEDLLFNKVTLADAGFIKQYGDCLGDIAARDLICAQKFNGLTVLPPLLTDEMIAQYTSALLAGTITSGWTFGAGAALQIPFAMQMAYRFNGIGVTQNVLYENQKLIANQFNSAIGKIQDSLSSTASALGKLQDVVNQNAQALNTLVKQLSSNFGAISSVLNDILSRLDPPEAEVQIDRLITGRLQSLQTYVTQQLIRAAEIRASANLAATKMSECVLGQSKRVDFCGKGYHLMSFPQSAPHGVVFLHVTYVFAQEKNFTTAPAICHDGKAHFPREGVFVSNGTHWFVTQRNFYEPQIITTDNTFVSGNCDVVIGIVNNTVYDPLQPELDSFKEELDKYFKNHTSPDVDLGDISGINASVVNIQKEIDRLNEVAKNLNESLIDLQELGKYEQYIKGGGSGGGQIYEGKLTAEGLRFGIVASRFNHALVDRLVEGAIDAIVRHGGREEDITLVRVPGSWEIPVAAGELARKEDIDAVIAIGVLIRGATPHFDYIASEVSKGLADLSLELRKPITFGVITADTLEQAIERAGTKHGNKGWEAALSAIEMANLFKSLR

SEQ ID NO: 3888 - protein, 1365 aa, Artificial Sequence
  SARS-CoV-2/pangolin/Guangxi/P4L/2017__EPI_ISL_410538 spike protein (1-1205)(K980P_V981P_P1063F) LumSynth construct
MFVFLFVLPLVSSQCVNLTTRTGIPPGYTNSSTRGVYYPDKVFRSSILHLTQDLFLPFFSNVTWFNTINYQGGFKKFDNPVLPFNDGVYFASTEKSNIIRGWIFGTTLDARTQSLLIVNNATNVVIKVCEFQFCTDPFLGVYYHNNNKTWVENEFRVYSSANNCTFEYISQPFLMDLEGKQGNFKNLREFVFKNVDGYFKIYSKHTPIDLVRDLPRGFAALEPLVDLPIGINITRFQTLLALHRSYLTPGNLESGWTTGAAAYYVGYLQQRTFLLSYNQNGTITDAVDCSLDPLSETKCTLKSLTVEKGIYQTSNFRVQPTISIVRFPNITNLCPFGEVFNASKFASVYAWNRKRISNCVADYSVLYNSTSFSTFKCYGVSPTKLNDLCFTNVYADSFVVKGDEVRQIAPGQTGVIADYNYKLPDDFTGCVIAWNSVKQDALTGGNYGYLYRLFRKSKLKPFERDISTEIYQAGSTPCNGQVGLNCYYPLERYGFHPTTGVNYQPFRVVVLSFELLNGPATVCGPKLSTTLVKDKCVNFNFNGLTGTGVLTTSKKQFLPFQQFGRDISDTTDAVRDPQTLEILDITPCSFGGVSVITPGTNTSNQVAVLYQDVNCTEVPMAIHAEQLTPAWRVYSAGANVFQTRAGCLVGAEHVNNSYECDIPVGAGICASYHSMSSLRSVNQRSIIAYTMSLGAENSVAYSNNSIAIPTNFTISVTTEILPVSMTKTSVDCTMYICGDSIECSNLLLQYGSFCTQLNRALTGIAVEQDKNTQEVFAQVKQIYKTPPIKDFGGFNFSQILPDPSKPSKRSFIEDLLFNKVTLADAGFIKQYGDCLGDIAARDLICAQKFNGLTVLPPLLTDEMIAQYTSALLAGTITSGWTFGAGAALQIPFAMQMAYRFNGIGVTQNVLYENQKLIANQFNSAIGKIQDSLSSTASALGKLQDVVNQNAQALNTLVKQLSSNFGAISSVLNDILSRLDPPEAEVQIDRLITGRLQSLQTYVTQQLIRAAEIRASANLAATKMSECVLGQSKRVDFCGKGYHLMSFPQSAPHGVVFLHVTYVFAQEKNFTTAPAICHEGKAHFPREGVFVSNGTHWFITQRNFYEPQIITTDNTFVSGSCDVVIGIVNNTVYDPLQPELDSFKEELDKYFKNHTSPDVDLGDISGINASVVNIQKEIDRLNEVAKNLNESPIDLQELGKYEQYIKGGGSGGGQIYEGKLTAEGLRFGIVASRFNHALVDRLVEGAIDAIVRHGGREEDITLVRVPGSWEIPVAAGELARKEDIDAVIAIGVLIRGATPHFDYIASEVSKGLADLSLELRKPITFGVITADTLEQAIERAGTKHGNKGWEAALSAIEMANLFKSLR

SEQ ID NO: 3889 - protein, 1365 aa, Artificial Sequence
  SARS-CoV-2/pangolin/Guangxi/P5L/2017__EPI_ISL_410540 spike protein (1-1205)(K980P_V981P_P1063F) LumSynth construct
MFVFLFVLPLVSSQCVNLTTRTGIPPGYTNSSTRGVYYPDKVFRSSILHLTQDLFLPFFSNVTWFNTINYQGGFKKFDNPVLPFNDGVYFASTEKSNIIRGWIFGTTLDARTQSLLIVNNATNVVIKVCEFQFCTDPFLGVYYHNNNKTWVENEFRVYSSANNCTFEYISQPFLMDLEGKQGNFKNLREFVFKNVDGYFKIYSKHTPIDLVRDLPRGFAALEPLVDLPIGINITRFQTLLALHRSYLTPGKLESGWTTGAAAYYVGYLQQRTFLLSYNQNGTITDAVDCSLDPLSETKCTLKSLTVEKGIYQTSNFRVQPTISIVRFPNITNLCPFGEVFNASKFASVYAWNRKRISNCVADYSVLYNSTSFSTFKCYGVSPTKLNDLCFTNVYADSFVVKGDEVRQIAPGQTGVIADYNYKLPDDFTGCVIAWNSVKQDALTGGNYGYLYRLFRKSKLKPFERDISTEIYQAGSTPCNGQVGLNCYYPLERYGFHPTTGVNYQPFRVVVLSFELLNGPATVCGPKLSTTLVKDKCVNFNFNGLTGTGVLTTSKKQFLPFQQFGRDISDTTDAVRDPQTLEILDITPCSFGGVSVITPGTNTSNQVAVLYQDVNCTEVPMAIHAEQLTPAWRVYSAGANVFQTRAGCLVGAEHVNNSYECDIPVGAGICASYHSMSSFRSVNQRSIIAYTMSLGAENSVAYSNNSIAIPTNFTISVTTEILPVSMTKTSVDCTMYICGDSIECSNLLLQYGSFCTQLNRALTGIAVEQDKNTQEVFAQVKQIYKTPPIKDFGGFNFSQILPDPSKPSKRSFIEDLLFNKVTLADAGFIKQYGDCLGDIAARDLICAQKFNGLTVLPPLLTDEMIAQYTSALLAGTITSGWTFGAGAALQIPFAMQMAYRFNGIGVTQNVLYENQKLIANQFNSAIGKIQDSLSSTASALGKLQDVVNQNAQALNTLVKQLSSNFGAISSVLNDILSRLDPPEAEVQIDRLITGRLQSLQTYVTQQLIRAAEIRASANLAATKMSECVLGQSKRVDFCGKGYHLMSFPQSAPHGVVFLHVTYVFAQEKNFTTAPAICHEGKAHFPREGVFVSNGTHWFITQRNFYEPQIITTDNTFVSGSCDVVIGIVNNTVYDPLQPELDSFKEELDKYFKNHTSPDVDLGDISGINASVVNIQKEIDRLNEVAKNLNESLIDLQELGKYEQYIKGGGSGGGQIYEGKLTAEGLRFGIVASRFNHALVDRLVEGAIDAIVRHGGREEDITLVRVPGSWEIPVAAGELARKEDIDAVIAIGVLIRGATPHFDYIASEVSKGLADLSLELRKPITFGVITADTLEQAIERAGTKHGNKGWEAALSAIEMANLFKSLR

SEQ ID NO: 3890 - protein, 1365 aa, Artificial Sequence
  SARS-CoV-2/pangolin/Guangxi/P5E/2017__EPI_ISL_410541 spike protein (1-1205)(K980P_V981P_P1063F) LumSynth construct
MFVFLFVLPLVSSQCVNLTTRTGIPPGYTNSSTRGVYYPDKVFRSSILHLTQDLFLPFFSNVTWFNTITYQGGSKKFDNPVLPFNDGVYFASTEKSNIIRGWIFGTTLDARTQSLLIVNNATNVVIKVCEFQFCTDPFLGVYYHNNNKTWVENEFRVYSSANNCTFEYISQPFLMDLEGKQGNFKNLREFVFKNVDGYFKIYSKHTPIDLVRDLPRGFAALEPLVDLPIGINITRFQTLLALHRSYLTPGKLESGWTTGAAAYYVGYLQQRTFLLSYNQNGTITDAVDCSLDPLSETKCTLKSLTVEKGIYQTSNFRVQPTISIVRFPNITNLCPFGEVFNASKFASVYAWNRKRISNCVADYSVLYNSTSFSTFKCYGVSPTKLNDLCFTNVYADSFVVKGDEVRQIAPGQTGVIADYNYKLPDDFTGCVIAWNSVKQDALTGDNYGYLYRLFRKSKLKPFERDISTEIYQAGSTPCNGQVGLNCYYPLERYGFHPTTGVNYQPFRVVVLSFELLNGPATVCGPKLSTTLVKDKCVNFNFNGLTGTGVLTTSKKQFLPFQQFGRDISDTTDAVRDPQTLEILDITPCSFGGVSVITPGTNTSNQVAVLYQDVNCTEVPMAIHAEQLTPAWRVYSAGANVFQTRAGCLVGAEHVNNSYECDIPVGAGICASYHSMSSFRSVNQRSIIAYTMSLGAENSVAYSNNSIAIPTNFTISVTTEILPVSMTKTSVDCTMYICGDSIECSNLLLQYGSFCTQLNRALTGIAVEQDKNTQEVFAQVKQIYKTPPIKDFGGFNFSQILPDPSKPSKRSFIEDLLFNKVTLADAGFIKQYGDCLGDIAARDLICAQKFNGLTVLPPLLTDEMIAQYTSALLAGTITSGWTFGAGAALQIPFAMQMAYRFNGIGVTQNVLYENQKLIANQFNSAIGKIQDSLSSTASALGKLQDVVNQNAQALNTLVKQLSSNFGAISSVLNDILSRLDPPEAEVQIDRLITGRLQSLQTYVTQQLIRAAEIRASANLAATKMSECVLGQSKRVDFCGKGYHLMSFPQSAPHGVVFLHVTYVFAQEKNFTTAPAICHEGKAHFPREGVFVSNGTHWFITQRNFYEPQIITTDNTFVSGSCDVVIGIVNNTVYDPLQPELDSFKEELDKYFKNHTSPDVDLGDISGINASVVNIQKEIDRLNEVAKNLNESLIDLQELGKYEQYIKGGGSGGGQIYEGKLTAEGLRFGIVASRFNHALVDRLVEGAIDAIVRHGGREEDITLVRVPGSWEIPVAAGELARKEDIDAVIAIGVLIRGATPHFDYIASEVSKGLADLSLELRKPITFGVITADTLEQAIERAGTKHGNKGWEAALSAIEMANLFKSLR

SEQ ID NO: 3891 - protein, 1363 aa, Artificial Sequence
  SARS-CoV-2/pangolin/Guangxi/P1E/2017__EPI_ISL_410539 spike protein (1-1203)(K978P_V979P_P1061F) LumSynth construct
MFVFLFVLPLVSSQCVNLTTRTGIQPGYTNSSTRGVYYPDKVFRSSILHLTQDLFLPFFSNVTWFNTINYQGGFKKFDNPVLPFNDGVYFASTEKSNIIRGWIFGTTLDARTQSLLIVNNATNVVIKVCEFQFCTDPFLGVYYHNNNKTWVENEFRVYSSANNCTFEYISQPFLMDLEGKQGNFKNLREFVFKNVDGYFKIYSKHTPIDLVRDLPRGFAALEPLVDLPIGINITRFQTLLALHRSYLTPGKLESGWTTGAAAYYVGYLQQRTFLLSYNQNGTITDAVDCSLDPLSETKCTLKSLTVEKGIYQTSNFRVQPTISIVRFPNITNLCPFGEVFNASKFASVYAWNRKRISNCVADYSVLYNSTSFSTFKCYGVSPTKLNDLCFTNVYADSFVVKGDEVRQIAPGQTGVIADYNYKLPDDFTGCVIAWNSVKQDALTGGNYLYRLFRKSKLKPFERDISTEIYQAGSTPCNGQVGLNCYYPLERYGFHPTTGVNYQPFRVVVLSFELLNGPATVCGPKLSTTLVKDKCVNFNFNGLTGTGVLTTSKKQFLPFQQFGRDISDTTDAVRDPQTLEILDITPCSFGGVSVITPGTNTSNQVAVLYQDVNCTEVPMAIHAEQLTPAWRVYSAGANVFQTRAGCLVGAEHVNNSYECDIPVGAGICASYHSMSSLRSVNQRSIIAYTMSLGAENSVAYSNNSIAIPTNFTISVTTEILPVSMTKTSVDCTMYICGDSIECSNLLLQYGSFCTQLNRALTGIAVEQDKNTQEVFAQVKQIYKTPPIKDFGGFNFSQILPDPSKPSKRSFIEDLLFNKVTLADAGFIKQYGDCLGDIAARDLICAQKFNGLTVLPPLLTDEMIAQYTSALLAGTITSGWTFGAGAALQIPFAMQMAYRFNGIGVTQNVLYENQKLIANQFNSAIGKIQDSLSSTASALGKLQDVVNQNAQALNTLVKQLSSNFGAISSVLNDILSRLDPPEAEVQIDRLITGRLQSLQTYVTQQLIRAAEIRASANLAATKMSECVLGQSKRVDFCGKGYHLMSFPQSAPHGVVFLHVTYVFAQEKNFTTAPAICHEGKAHFPREGVFVSNGTHWFITQRNFYEPQIITTDNTFVSGSCDVVIGIVNNTVYDPLQPELDSFKEELDKYFKNHTSPDVDLGDISGINASVVNIQKEIDRLNEVAKNLNESLIDLQELGKYEQYIKGGGSGGGQIYEGKLTAEGLRFGIVASRFNHALVDRLVEGAIDAIVRHGGREEDITLVRVPGSWEIPVAAGELARKEDIDAVIAIGVLIRGATPHFDYIASEVSKGLADLSLELRKPITFGVITADTLEQAIERAGTKHGNKGWEAALSAIEMANLFKSLR

SEQ ID NO: 3892 - protein, 1371 aa, Artificial Sequence
  SARS-CoV-2/Wuhan/WIV05/2019__EPI_ISL_402128 spike protein (1-1211)(K986P_V987P_ H1048Q_H1064N_ H1083N_H1101N) LumSynth construct
MFVFLVLLPLVSSQCVNLTTRTQLPPAYTNSFTRGVYYPDKVFRSSVLHSTQDLFLPFFSNVTWFHAIHVSGTNGTKRFDNPVLPFNDGVYFASTEKSNIIRGWIFGTTLDSKTQSLLIVNNATNVVIKVCEFQFCNDPFLGVYYHKNNKSWMESEFRVYSSANNCTFEYVSQPFLMDLEGKQGNFKNLREFVFKNIDGYFKIYSKHTPINLVRDLPQGFSALEPLVDLPIGINITRFQTLLALHRSYLTPGDSSSGWTAGAAAYYVGYLQPRTFLLKYNENGTITDAVDCALDPLSETKCTLKSFTVEKGIYQTSNFRVQPTESIVRFPNITNLCPFGEVFNATRFASVYAWNRKRISNCVADYSVLYNSASFSTFKCYGVSPTKLNDLCFTNVYADSFVIRGDEVRQIAPGQTGKIADYNYKLPDDFTGCVIAWNSNNLDSKVGGNYNYLYRLFRKSNLKPFERDISTEIYQAGSTPCNGVEGFNCYFPLQSYGFQPTNGVGYQPYRVVVLSFELLHAPATVCGPKKSTNLVKNKCVNFNFNGLTGTGVLTESNKKFLPFQQFGRDIADTTDAVRDPQTLEILDITPCSFGGVSVITPGTNTSNQVAVLYQDVNCTEVPVAIHADQLTPTWRVYSTGSNVFQTRAGCLIGAEHVNNSYECDIPIGAGICASYQTQTNSPRRARSVASQSIIAYTMSLGAENSVAYSNNSIAIPTNFTISVTTEILPVSMTKTSVDCTMYICGDSTECSNLLLQYGSFCTQLNRALTGIAVEQDKNTQEVFAQVKQIYKTPPIKDFGGFNFSQILPDPSKPSKRSFIEDLLFNKVTLADAGFIKQYGDCLGDIAARDLICAQKFNGLTVLPPLLTDEMIAQYTSALLAGTITSGWTFGAGAALQIPFAMQMAYRFNGIGVTQNVLYENQKLIANQFNSAIGKIQDSLSSTASALGKLQDVVNQNAQALNTLVKQLSSNFGAISSVLNDILSRLDPPEAEVQIDRLITGRLQSLQTYVTQQLIRAAEIRASANLAATKMSECVLGQSKRVDFCGKGYQLMSFPQSAPHGVVFLNVTYVPAQEKNFTTAPAICNDGKAHFPREGVFVSNGTNWFVTQRNFYEPQIITTDNTFVSGNCDVVIGIVNNTVYDPLQPELDSFKEELDKYFKNHTSPDVDLGDISGINASVVNIQKEIDRLNEVAKNLNESLIDLQELGKYEQYIKGGGSGGGQIYEGKLTAEGLRFGIVASRFNHALVDRLVEGAIDAIVRHGGREEDITLVRVPGSWEIPVAAGELARKEDIDAVIAIGVLIRGATPHFDYIASEVSKGLADLSLELRKPITFGVITADTLEQAIERAGTKHGNKGWEAALSAIEMANLFKSLR

SEQ ID NO: 3893 - protein, 1367 aa, Artificial Sequence
  SARS-CoV-2/bat/Yunnan/RaTG13/2013__EPI_ISL_402131 spike protein (1-1207)(K982P_V983P_ H1044Q_H1060N_ H1079N_H1097N) LumSynth construct
MFVFLVLLPLVSSQCVNLTTRTQLPPAYTNSSTRGVYYPDKVFRSSVLHLTQDLFLPFFSNVTWFHAIHVSGTNGIKRFDNPVLPFNDGVYFASTEKSNIIRGWIFGTTLDSKTQSLLIVNNATNVVIKVCEFQFCNDPFLGVYYHKNNKSWMESEFRVYSSANNCTFEYVSQPFLMDLEGKQGNFKNLREFVFKNIDGYFKIYSKHTPINLVRDLPPGFSALEPLVDLPIGINITRFQTLLALHRSYLTPGDSSSGWTAGAAAYYVGYLQPRTFLLKYNENGTITDAVDCALDPLSETKCTLKSFTVEKGIYQTSNFRVQPTDSIVRFPNITNLCPFGEVFNATTFASVYAWNRKRISNCVADYSVLYNSTSFSTFKCYGVSPTKLNDLCFTNVYADSFVITGDEVRQIAPGQTGKIADYNYKLPDDFTGCVIAWNSKHIDAKEGGNFNYLYRLFRKANLKPFERDISTEIYQAGSKPCNGQTGLNCYYPLYRYGFYPTDGVGHQPYRVVVLSFELLNAPATVCGPKKSTNLVKNKCVNFNFNGLTGTGVLTESNKKFLPFQQFGRDIADTTDAVRDPQTLEILDITPCSFGGVSVITPGTNASNQVAVLYQDVNCTEVPVAIHADQLTPTWRVYSTGSNVFQTRAGCLIGAEHVNNSYECDIPIGAGICASYQTQTNSRSVASQSIIAYTMSLGAENSVAYSNNSIAIPTNFTISVTTEILPVSMTKTSVDCTMYICGDSTECSNLLLQYGSFCTQLNRALTGIAVEQDKNTQEVFAQVKQIYKTPPIKDFGGFNFSQILPDPSKPSKRSFIEDLLFNKVTLADAGFIKQYGDCLGDIAARDLICAQKFNGLTVLPPLLTDEMIAQYTSALLAGTITSGWTFGAGAALQIPFAMQMAYRFNGIGVTQNVLYENQKLIANQFNSAIGKIQDSLSSTASALGKLQDVVNQNAQALNTLVKQLSSNFGAISSVLNDILSRLDPPEAEVQIDRLITGRLQSLQTYVTQQLIRAAEIRASANLAATKMSECVLGQSKRVDFCGKGYQLMSFPQSAPHGVVFLNVTYVPAQEKNFTTAPAICNDGKAHFPREGVFVSNGTNWFVTQRNFYEPQIITTDNTFVSGSCDVVIGIVNNTVYDPLQPELDSFKEELDKYFKNHTSPDVDLGDISGINASVVNIQKEIDRLNEVAKNLNESLIDLQELGKYEQYIKGGGSGGGQIYEGKLTAEGLRFGIVASRFNHALVDRLVEGAIDAIVRHGGREEDITLVRVPGSWEIPVAAGELARKEDIDAVIAIGVLIRGATPHFDYIASEVSKGLADLSLELRKPITFGVITADTLEQAIERAGTKHGNKGWEAALSAIEMANLFKSLR

SEQ ID NO: 3894 - protein, 1371 aa, Artificial Sequence
  SARS-CoV-2/Wuhan/HBCDC-HB-01/2019__EPI_ISL_402132 spike protein (1-1211)(K986P_V987P_ H1048Q_H1064N_ H1083N_H1101N) LumSynth construct
MFVFLVLLPLVSSQCVNLTTRTQLPPAYTNSITRGVYYPDKVFRSSVLHSTQDLFLPFFSNVTWFHAIHVSGTNGTKRFDNPVLPFNDGVYFASTEKSNIIRGWIFGTTLDSKTQSLLIVNNATNVVIKVCEFQFCNDPFLGVYYHKNNKSWMESEFRVYSSANNCTFEYVSQPFLMDLEGKQGNFKNLREFVFKNIDGYFKIYSKHTPINLVRDLPQGFSALEPLVDLPIGINITRFQTLLALHRSYLTPGDSSSGWTAGAAAYYVGYLQPRTFLLKYNENGTITDAVDCALDPLSETKCTLKSFTVEKGIYQTSNFRVQPTESIVRFPNITNLCPFGEVFNATRFASVYAWNRKRISNCVADYSVLYNSASFSTFKCYGVSPTKLNDLCFTNVYADSFVIRGDEVRQIAPGQTGKIADYNYKLPDDFTGCVIAWNSNNLDSKVGGNYNYLYRLFRKSNLKPFERDISTEIYQAGSTPCNGVEGFNCYFPLQSYGFQPTNGVGYQPYRVVVLSFELLHAPATVCGPKKSTNLVKNKCVNFNFNGLTGTGVLTESNKKFLPFQQFGRDIADTTDAVRDPQTLEILDITPCSFGGVSVITPGTNTSNQVAVLYQDVNCTEVPVAIHADQLTPTWRVYSTGSNVFQTRAGCLIGAEHVNNSYECDIPIGAGICASYQTQTNSPRRARSVASQSIIAYTMSLGAENSVAYSNNSIAIPTNFTISVTTEILPVSMTKTSVDCTMYICGDSTECSNLLLQYGSFCTQLNRALTGIAVEQDKNTQEVFAQVKQIYKTPPIKDFGGFNFSQILPDPSKPSKRSFIEDLLFNKVTLADAGFIKQYGDCLGDIAARDLICAQKFNGLTVLPPLLTDEMIAQYTSALLAGTITSGWTFGAGAALQIPFAMQMAYRFNGIGVTQNVLYENQKLIANQFNSAIGKIQDSLSSTASALGKLQDVVNQNAQALNTLVKQLSSNFGAISSVLNDILSRLDPPEAEVQIDRLITGRLQSLQTYVTQQLIRAAEIRASANLAATKMSECVLGQSKRVDFCGKGYQLMSFPQSAPHGVVFLNVTYVPAQEKNFTTAPAICNDGKAHFPREGVFVSNGTNWFVTQRNFYEPQIITTDNTFVSGNCDVVIGIVNNTVYDPLQPELDSFKEELDKYFKNHTSPDVDLGDISGINASVVNIQKEIDRLNEVAKNLNESLIDLQELGKYEQYIKGGGSGGGQIYEGKLTAEGLRFGIVASRFNHALVDRLVEGAIDAIVRHGGREEDITLVRVPGSWEIPVAAGELARKEDIDAVIAIGVLIRGATPHFDYIASEVSKGLADLSLELRKPITFGVITADTLEQAIERAGTKHGNKGWEAALSAIEMANLFKSLR

SEQ ID NO: 3895 - protein, 1371 aa, Artificial Sequence
  SARS-CoV-2/Guangdong/20SF028/2020__EPI_ISL_403936 spike protein (1-1211)(K986P_V987P_ H1048Q_H1064N_ H1083N_H1101N) LumSynth construct
MFVFLVLLPLVSSQCVNLTTRTQLPPAYTNSFTRGVYYPDKVFRSSVLYSTQDLFLPFFSNVTWFHAIHVSGTNGTKRFDNPVLPFNDGVYFASTEKSNIIRGWIFGTTLDSKTQSLLIVNNATNVVIKVCEFQFCNDPFLGVYYHKNNKSWMESEFRVYSSANNCTFEYVSQPFLMDLEGKQGNFKNLREFVFKNIDGYFKIYSKHTPINLVRDLPQGFSALEPLVDLPIGINITRFQTLLALHRSYLTPGDSSSGWTAGAAAYYVGYLQPRTFLLKYNENGTITDAVDCALDPLSETKCTLKSFTVEKGIYQTSNFRVQPTESIVRFPNITNLCPFGEVFNATRFASVYAWNRKRISNCVADYSVLYNSASFSTFKCYGVSPTKLNDLCFTNVYADSFVIRGDEVRQIAPGQTGKIADYNYKLPDDFTGCVIAWNSNNLDSKVGGNYNYLYRLFRKSNLKPFERDISTEIYQAGSTPCNGVEGFNCYFPLQSYGFQPTNGVGYQPYRVVVLSFELLHAPATVCGPKKSTNLVKNKCVNFNFNGLTGTGVLTESNKKFLPFQQFGRDIADTTDAVRDPQTLEILDITPCSFGGVSVITPGTNTSNQVAVLYQDVNCTEVPVAIHADQLTPTWRVYSTGSNVFQTRAGCLIGAEHVNNSYECDIPIGAGICASYQTQTNSPRRARSVASQSIIAYTMSLGAENSVAYSNNSIAIPTNFTISVTTEILPVSMTKTSVDCTMYICGDSTECSNLLLQYGSFCTQLNRALTGIAVEQDKNTQEVFAQVKQIYKTPPIKDFGGFNFSQILPDPSKPSKRSFIEDLLFNKVTLADAGFIKQYGDCLGDIAARDLICAQKFNGLTVLPPLLTDEMIAQYTSALLAGTITSGWTFGAGAALQIPFAMQMAYRFNGIGVTQNVLYENQKLIANQFNSAIGKIQDSLSSTASALGKLQDVVNQNAQALNTLVKQLSSNFGAISSVLNDILSRLDPPEAEVQIDRLITGRLQSLQTYVTQQLIRAAEIRASANLAATKMSECVLGQSKRVDFCGKGYQLMSFPQSAPHGVVFLNVTYVPAQEKNFTTAPAICNDGKAHFPREGVFVSNGTNWFVTQRNFYEPQIITTDNTFVSGNCDVVIGIVNNTVYDPLQPELDSFKEELDKYFKNHTSPDVDLGDISGINASVVNIQKEIDRLNEVAKNLNESLIDLQELGKYEQYIKGGGSGGGQIYEGKLTAEGLRFGIVASRFNHALVDRLVEGAIDAIVRHGGREEDITLVRVPGSWEIPVAAGELARKEDIDAVIAIGVLIRGATPHFDYIASEVSKGLADLSLELRKPITFGVITADTLEQAIERAGTKHGNKGWEAALSAIEMANLFKSLR

SEQ ID NO: 3896 - protein, 1371 aa, Artificial Sequence
  SARS-CoV-2/Shenzhen/SZTH-001/2020__EPI_ISL_406592 spike protein (1-1211)(K986P_V987P_ H1048Q_H1064N_ H1083N_H1101N) LumSynth construct
MFVFLVLLPLVSSQCVNLTTRTQLPPAYTNSFTRGVYYPDKVFRSSVLHSTQDLFLPFFSNVTWFHAIHVSGTNGTKRFDNPVLPFNDGVYFASTEKSNIIRGWIFGTTLDSKTQSLLIVNNATNVVIKVCEFQFCNDPFLGVYYHKNNKSWMESEFRVYSSANNCTFEYVSQPFLMDLEGKQGNFKNLREFVFKNIDGYFKIYSKHTPINLVRDLPQGFSALEPLVDLPIGINITRFQTLLALHRSYLTPGDSSSGWTAGAAAYYVGYLQPRTFLLKYNENGTITDAVDCALDPLSETKCTLKSFTVEKGIYQTSNFRVQPTESIVRFPNITNLCPFGEVFNATRFASVYAWNRKRISNCVADYSVLYNSASFSTFKCYGVSPTKLNDLCFTNVYADSFVIRGDEVRQIAPGQTGKIADYNYKLPDDFTGCVIAWNSNNLDSKVGGNYNYLYRLFRKSNLKPFERDISTEIYQAGSTPCNGVEGFNCYFPLQSYGFQPTNGVGYQPYRVVVLSFELLHAPATVCGPKKSTNLVKNKCVNFNFNGLTGTGVLTESNKKFLPFQQFGRDIADTTDAVRDPQTLEILDITPCSFGGVSVITPGTNTSNQVAVLYQDVNCTEVPVAIHADQLTPTWRVYSTGSNVFQTRAGCLIGAEHVNNSYECDIPIGAGICASYQTQTNSPRRARSVASQSIIAYTMSLGAENSVAYSNNSIAIPTNFTISVTTEILPVSMTKTSVDCTMYICGDSTECSNLLLQYGSFCTQLNRALTGIAVEQDKNTQEVFAQVKQIYKTPPIKDFGGFNFSQILPDPSKPSKRSFIEDLLFNKVTLADAGFIKQYGDCLGDIAARDLICAQKFNGLTVLPPLLTDEMIAQYTSALLAGTITSGWTFGAGAALQIPFAMQMAYRFNGIGVTQNVLYENQKLIANQFNSAIGKIQDSLSSTASALGKLQDVVNQNAQALNTLVKQLSSNFGAISSVLNDILSRLDPPEAEVQIDRLITGRLQSLQTYVTQQLIRAAEIRASANLAATKMSECVLGQSKRVDFCGKGYQLMSFPQSAPHGVVFLNVTYVPAQEKNFTTAPAICNDGKAHFPREGVFVSNGTNWFVTQRNFYEPQIITTDNTFVSGNCDVLIGIVNNTVYDPLQPELDSFKEELDKYFKNHTSPDVDLGDISGINASVVNIQKEIDRLNEVAKNLNESLIDLQELGKYEQYIKGGGSGGGQIYEGKLTAEGLRFGIVASRFNHALVDRLVEGAIDAIVRHGGREEDITLVRVPGSWEIPVAAGELARKEDIDAVIAIGVLIRGATPHFDYIASEVSKGLADLSLELRKPITFGVITADTLEQAIERAGTKHGNKGWEAALSAIEMANLFKSLR

SEQ ID NO: 3897 - protein, 1371 aa, Artificial Sequence
  SARS-CoV-2/Shenzhen/SZTH-004/2020__EPI_ISL_406595 spike protein (1-1211)(K986P_V987P_ H1048Q_H1064N_ H1083N_H1101N) LumSynth construct
MFVFLVLLPLVSSQCVNLTTRTQLPPAYTNSFTRGVYYPDKVFRSSVLHSTQDLFLPFFSNVTWFHAIHVSGTNGTKRFDNPVLPFNDGVYFASTEKSNIIRGWIFGTTLDSKTQSLLIVNNATNVVIKVCEFQFCNDPFLGVYYHKNNKSWMESEFRVYSSANNCTFEYVSQPFLMDLEGKQGNFKNLREFVFKNIDGYFKIYSKHTPINLVRDLPQGFSALEPLVDLPIGINITRFQTLLALHRSYLTPGDSSSGWTAGAAAYYVGYLQPRTFLLKYNENGTITDAVDCALDPLSETKCTLKSFTVEKGIYQTSNFRVQPTESIVRFPNITNLCPFGEVFNATRFASVYAWDRKRISNCVAYYSVLYNSASFSTFKCYGVSPTKLNDLCFTNVYADSFVIRGDEVRQIAPGQTGKIADYNYKLPDDFTGCVIAWNSNNLDSKVGGNYNYLYRLFRKSNLKPFERDISTEIYQAGSTPCNGVEGFNCYFPLQSYGFQPTNGVGYQPYRVVVLSFELLHAPATVCGPKKSTNLVKNKCVNFNFNGLTGTGVLTESNKKFLPFQQFGRDIADTTDAVRDPQTLEILDITPCSFGGVSVITPGTNTSNQVAVLYQDVNCTEVPVAIHADQLTPTWRVYSTGSNVFQTRAGCLIGAEHVNNSYECDIPIGAGICASYQTQTNSPRRARSVASQSIIAYTMSLGAENSVAYSNNSIAIPTNFTISVTTEILPVSMTKTSVDCTMYICGDSTECSNLLLQYGSFCTQLNRALTGIAVEQDKNTQEVFAQVKQIYKTPPIKDFGGFNFSQILPDPSKPSKRSFIEDLLFNKVTLADAGFIKQYGDCLGDIAARDLICAQKFNGLTVLPPLLTDEMIAQYTSALLAGTITSGWTFGAGAALQIPFAMQMAYRFNGIGVTQNVLYENQKLIANQFNSAIGKIQDSLSSTASALGKLQDVVNQNAQALNTLVKQLSSNFGAISSVLNDILSRLDPPEAEVQIDRLITGRLQSLQTYVTQQLIRAAEIRASANLAATKMSECVLGQSKRVDFCGKGYQLMSFPQSAPHGVVFLNVTYVPAQEKNFTTAPAICNDGKAHFPREGVFVSNGTNWFVTQRNFYEPQIITTDNTFVSGNCDVVIGIVNNTVYDPLQPELDSFKEELDKYFKNHTSPDVDLGDISGINASVVNIQKEIDRLNEVAKNLNESLIDLQELGKYEQYIKGGGSGGGQIYEGKLTAEGLRFGIVASRFNHALVDRLVEGAIDAIVRHGGREEDITLVRVPGSWEIPVAAGELARKEDIDAVIAIGVLIRGATPHFDYIASEVSKGLADLSLELRKPITFGVITADTLEQAIERAGTKHGNKGWEAALSAIEMANLFKSLR

SEQ ID NO: 3898 - protein, 1371 aa, Artificial Sequence
  SARS-CoV-2/France/IDF0372/2020__EPI_ISL_406596 spike protein (1-1211)(K986P_V987P_ H1048Q_H1064N_ H1083N_H1101N) LumSynth construct
MFVFLVLLPLVSSQCVNLTTRTQLPPAYTNSFTRGVYYPDKVFRSSVLHSTQDLFLPFFSNVTWFHAIHVSGTNGTKRFDNPVLPFNDGVYFASTEKSNIIRGWIFGTTLDSKTQSLLIVNNATNVVIKVCEFQFCNDPFLGVYYHKNNKSWMESEFRVYSSANNCTFEYVSQPFLMDLEGKQGNFKNLREFVFKNIDGYFKIYSKHTPINLVRDLPQGFSALEPLVDLPIGINITRFQTLLALHRSYLTPGDSSSGWTAGAAAYYVGYLQPRTFLLKYNENGTITDAVDCALDPLSETKCTLKSFTVEKGIYQTSNFRVQPTESIVRFPNITNLCPFGEVFNATRFASVYAWNRKRISNCVADYSFLYNSASFSTFKCYGVSPTKLNDLCFTNVYADSFVIRGDEVRQIAPGQTGKIADYNYKLPDDFTGCVIAWNSNNLDSKVGGNYNYLYRLFRKSNLKPFERDISTEIYQAGSTPCNGVEGFNCYFPLQSYGFQPTNGVGYQPYRVVVLSFELLHAPATVCGPKKSTNLVKNKCVNFNFNGLTGTGVLTESNKKFLPFQQFGRDIADTTDAVRDPQTLEILDITPCSFGGVSVITPGTNTSNQVAVLYQDVNCTEVPVAIHADQLTPTWRVYSTGSNVFQTRAGCLIGAEHVNNSYECDIPIGAGICASYQTQTNSPRRARSVASQSIIAYTMSLGAENSVAYSNNSIAIPTNFTISVTTEILPVSMTKTSVDCTMYICGDSTECSNLLLQYGSFCTQLNRALTGIAVEQDKNTQEVFAQVKQIYKTPPIKDFGGFNFSQILPDPSKPSKRSFIEDLLFNKVTLADAGFIKQYGDCLGDIAARDLICAQKFNGLTVLPPLLTDEMIAQYTSALLAGTITSGWTFGAGAALQIPFAMQMAYRFNGIGVTQNVLYENQKLIANQFNSAIGKIQDSLSSTASALGKLQDVVNQNAQALNTLVKQLSSNFGAISSVLNDILSRLDPPEAEVQIDRLITGRLQSLQTYVTQQLIRAAEIRASANLAATKMSECVLGQSKRVDFCGKGYQLMSFPQSAPHGVVFLNVTYVPAQEKNFTTAPAICNDGKAHFPREGVFVSNGTNWFVTQRNFYEPQIITTDNTFVSGNCDVVIGIVNNTVYDPLQPELDSFKEELDKYFKNHTSPDVDLGDISGINASVVNIQKEIDRLNEVAKNLNESLIDLQELGKYEQYIKGGGSGGGQIYEGKLTAEGLRFGIVASRFNHALVDRLVEGAIDAIVRHGGREEDITLVRVPGSWEIPVAAGELARKEDIDAVIAIGVLIRGATPHFDYIASEVSKGLADLSLELRKPITFGVITADTLEQAIERAGTKHGNKGWEAALSAIEMANLFKSLR

SEQ ID NO: 3899 - protein, 1371 aa, Artificial Sequence
  SARS-CoV-2/Australia/VIC01/2020__EPI_ISL_406844 spike protein (1-1211)(K986P_V987P_ H1048Q_H1064N_ H1083N_H1101N) LumSynth construct
MFVFLVLLPLVSSQCVNLTTRTQLPPAYTNSFTRGVYYPDKVFRSSVLHSTQDLFLPFFSNVTWFHAIHVSGTNGTKRFDNPVLPFNDGVYFASTEKSNIIRGWIFGTTLDSKTQSLLIVNNATNVVIKVCEFQFCNDPFLGVYYHKNNKSWMESEFRVYSSANNCTFEYVSQPFLMDLEGKQGNFKNLREFVFKNIDGYFKIYSKHTPINLVRDLPQGFSALEPLVDLPIGINITRFQTLLALHRRYLTPGDSSSGWTAGAAAYYVGYLQPRTFLLKYNENGTITDAVDCALDPLSETKCTLKSFTVEKGIYQTSNFRVQPTESIVRFPNITNLCPFGEVFNATRFASVYAWNRKRISNCVADYSVLYNSASFSTFKCYGVSPTKLNDLCFTNVYADSFVIRGDEVRQIAPGQTGKIADYNYKLPDDFTGCVIAWNSNNLDSKVGGNYNYLYRLFRKSNLKPFERDISTEIYQAGSTPCNGVEGFNCYFPLQSYGFQPTNGVGYQPYRVVVLSFELLHAPATVCGPKKSTNLVKNKCVNFNFNGLTGTGVLTESNKKFLPFQQFGRDIADTTDAVRDPQTLEILDITPCSFGGVSVITPGTNTSNQVAVLYQDVNCTEVPVAIHADQLTPTWRVYSTGSNVFQTRAGCLIGAEHVNNSYECDIPIGAGICASYQTQTNSPRRARSVASQSIIAYTMSLGAENSVAYSNNSIAIPTNFTISVTTEILPVSMTKTSVDCTMYICGDSTECSNLLLQYGSFCTQLNRALTGIAVEQDKNTQEVFAQVKQIYKTPPIKDFGGFNFSQILPDPSKPSKRSFIEDLLFNKVTLADAGFIKQYGDCLGDIAARDLICAQKFNGLTVLPPLLTDEMIAQYTSALLAGTITSGWTFGAGAALQIPFAMQMAYRFNGIGVTQNVLYENQKLIANQFNSAIGKIQDSLSSTASALGKLQDVVNQNAQALNTLVKQLSSNFGAISSVLNDILSRLDPPEAEVQIDRLITGRLQSLQTYVTQQLIRAAEIRASANLAATKMSECVLGQSKRVDFCGKGYQLMSFPQSAPHGVVFLNVTYVPAQEKNFTTAPAICNDGKAHFPREGVFVSNGTNWFVTQRNFYEPQIITTDNTFVSGNCDVVIGIVNNTVYDPLQPELDSFKEELDKYFKNHTSPDVDLGDISGINASVVNIQKEIDRLNEVAKNLNESLIDLQELGKYEQYIKGGGSGGGQIYEGKLTAEGLRFGIVASRFNHALVDRLVEGAIDAIVRHGGREEDITLVRVPGSWEIPVAAGELARKEDIDAVIAIGVLIRGATPHFDYIASEVSKGLADLSLELRKPITFGVITADTLEQAIERAGTKHGNKGWEAALSAIEMANLFKSLR

SEQ ID NO: 3900 - protein, 1371 aa, Artificial Sequence
  SARS-CoV-2/Germany/BavPat1/2020__EPI_ISL_406862 spike protein (1-1211)(K986P_V987P_ H1048Q_H1064N_ H1083N_H1101N) LumSynth construct
MFVFLVLLPLVSSQCVNLTTRTQLPPAYTNSFTRGVYYPDKVFRSSVLHSTQDLFLPFFSNVTWFHAIHVSGTNGTKRFDNPVLPFNDGVYFASTEKSNIIRGWIFGTTLDSKTQSLLIVNNATNVVIKVCEFQFCNDPFLGVYYHKNNKSWMESEFRVYSSANNCTFEYVSQPFLMDLEGKQGNFKNLREFVFKNIDGYFKIYSKHTPINLVRDLPQGFSALEPLVDLPIGINITRFQTLLALHRSYLTPGDSSSGWTAGAAAYYVGYLQPRTFLLKYNENGTITDAVDCALDPLSETKCTLKSFTVEKGIYQTSNFRVQPTESIVRFPNITNLCPFGEVFNATRFASVYAWNRKRISNCVADYSVLYNSASFSTFKCYGVSPTKLNDLCFTNVYADSFVIRGDEVRQIAPGQTGKIADYNYKLPDDFTGCVIAWNSNNLDSKVGGNYNYLYRLFRKSNLKPFERDISTEIYQAGSTPCNGVEGFNCYFPLQSYGFQPTNGVGYQPYRVVVLSFELLHAPATVCGPKKSTNLVKNKCVNFNFNGLTGTGVLTESNKKFLPFQQFGRDIADTTDAVRDPQTLEILDITPCSFGGVSVITPGTNTSNQVAVLYQGVNCTEVPVAIHADQLTPTWRVYSTGSNVFQTRAGCLIGAEHVNNSYECDIPIGAGICASYQTQTNSPRRARSVASQSIIAYTMSLGAENSVAYSNNSIAIPTNFTISVTTEILPVSMTKTSVDCTMYICGDSTECSNLLLQYGSFCTQLNRALTGIAVEQDKNTQEVFAQVKQIYKTPPIKDFGGFNFSQILPDPSKPSKRSFIEDLLFNKVTLADAGFIKQYGDCLGDIAARDLICAQKFNGLTVLPPLLTDEMIAQYTSALLAGTITSGWTFGAGAALQIPFAMQMAYRFNGIGVTQNVLYENQKLIANQFNSAIGKIQDSLSSTASALGKLQDVVNQNAQALNTLVKQLSSNFGAISSVLNDILSRLDPPEAEVQIDRLITGRLQSLQTYVTQQLIRAAEIRASANLAATKMSECVLGQSKRVDFCGKGYQLMSFPQSAPHGVVFLNVTYVPAQEKNFTTAPAICNDGKAHFPREGVFVSNGTNWFVTQRNFYEPQIITTDNTFVSGNCDVVIGIVNNTVYDPLQPELDSFKEELDKYFKNHTSPDVDLGDISGINASVVNIQKEIDRLNEVAKNLNESLIDLQELGKYEQYIKGGGSGGGQIYEGKLTAEGLRFGIVASRFNHALVDRLVEGAIDAIVRHGGREEDITLVRVPGSWEIPVAAGELARKEDIDAVIAIGVLIRGATPHFDYIASEVSKGLADLSLELRKPITFGVITADTLEQAIERAGTKHGNKGWEAALSAIEMANLFKSLR

SEQ ID NO: 3901 - protein, 1371 aa, Artificial Sequence
  SARS-CoV-2/Wuhan/HBCDC-HB-02/2020__EPI_ISL_412978 spike protein (1-1211)(K986P_V987P_ H1048Q_H1064N_ H1083N_H1101N) LumSynth construct
MFVFLVLLPLVSSQCVNLTTRTQLPPAYTNSFTRGVYYPDKVFRSSVLHSTQDLFLPFFSNVTWFHAIHVSGTNGTKRFDNPVLPFNDGVYFASTEKSNIIRGWIFGTTLDSKTQSLLIVNNATNVVIKVCEFQFCNDPFLGVYYHKNNKSWMESEFRVYSSANNCTFEYVSQPFLMDLEGKQGNFKNLREFVFKNIDGYFKIYSKHTPINLVRDLPQGFSALEPLVDLPIGINITRFQTLLALHRSYLTPGDSSSGWTAGAAAYYVGYLQPRTFLLKYNENGTITDAVDCALDPLSETKCTLKSFTVEKGIYQTSNFRVQPTESIVRFPNITNLCPFGEVFNATRFASVYAWNRKRISNCVADYSVLYNSASFSTFKCYGVSPTKLNDLCFTNVYADSFVIRGDEVRQIAPGQTGKIADYNYKLPDDFTGCVIAWNSNNLDSKVGGNYNYLYRLFRKSNLKPFERDISTEIYQAGSTPCNGVEGFNCYFPLQSYGFQPTNGVGYQPYRVVVLSFELLHAPATVCGPKKSTNLVKNKCVNFNFNGLTGTGVLTESNKKFLPFQQFGRDIADTTDAVRDPQTLEILDITPCSFGGVSVITPGTNTSNQVAVLYQDVNCTEVPVAIHADQLTPTWRVYSTGSNVFQTRAGCLIGAEHVNNSYECDIPIGAGICASYQTQTNSPRRARSVASQSIIAYTMSLGAENSVAYSNNSIAIPTNFTISVTTEILPVSMTKTSVDCTMYICGDSTECSNFLLQYGSFCTQLNRALTGIAVEQDKNTQEVFAQVKQIYKTPPIKDFGGFNFSQILPDPSKPSKRSFIEDLLFNKVTLADAGFIKQYGDCLGDIAARDLICAQKFNGLTVLPPLLTDEMIAQYTSALLAGTITSGWTFGAGAALQIPFAMQMAYRFNGIGVTQNVLYENQKLIANQFNSAIGKIQDSLSSTASALGKLQDVVNQNAQALNTLVKQLSSNFGAISSVLNDILSRLDPPEAEVQIDRLITGRLQSLQTYVTQQLIRAAEIRASANLAATKMSECVLGQSKRVDFCGKGYQLMSFPQSAPHGVVFLNVTYVPAQEKNFTTAPAICNDGKAHFPREGVFVSNGTNWFVTQRNFYEPQIITTDNTFVSGNCDVVIGIVNNTVYDPLQPELDSFKEELDKYFKNHTSPDVDLGDISGINASVVNIQKEIDRLNEVAKNLNESLIDLQELGKYEQYIKGGGSGGGQIYEGKLTAEGLRFGIVASRFNHALVDRLVEGAIDAIVRHGGREEDITLVRVPGSWEIPVAAGELARKEDIDAVIAIGVLIRGATPHFDYIASEVSKGLADLSLELRKPITFGVITADTLEQAIERAGTKHGNKGWEAALSAIEMANLFKSLR

SEQ ID NO: 3902 - protein, 1371 aa, Artificial Sequence
  SARS-CoV-2/Australia/QLD02/2020__EPI_ISL_407896 spike protein (1-1211)(K986P_V987P_ H1048Q_H1064N_ H1083N_H1101N) LumSynth construct
MFVFLVLLPLVSSQCVNLTTRTQLPPAYTNSFTRGVYYPDKVFRSSVLHSTQDLFLPFFSNVTWFHAIHVSGTNGTKRFDNPVLPFNDGVYFASTEKSNIIRGWIFGTTLDSKTQSLLIVNNATNVVIKVCEFQFCNDPFLGVYYHKNNKSWMESEFRVYSSANNCTFEYVSQPFLMDLEGKQGNFKNLREFVFKNIDGYFKIYSKHTPINLVRDLPQGFSALEPLVDLPIGINITRFQTLLALHRSYLTPGDSSSGWTAGAAAYYVGYLQPRTFLLKYNENGTITDAVDCALDPLSETKCTLKSFTVEKGIYQTSNFRVQPTESIVRFPNITNLCPFGEVFNATRFASVYAWNRKRISNCVADYSVLYNSASFSTFKCYGVSPTKLNDLCFTNVYADSFVIRGDEVRQIAPGQTGKIADYNYKLPDDFTGCVIAWNSNNLDSKVGGNYNYLYRLFRKSNLKPFERDISTEIYQAGSTPCNGVEGFNCYFPLQSYGFQPTNGVGYQPYRVVVLSFELLHAPATVCGPKKSTNLVKNKCVNFNFNGLTGTGVLTESNKKFLPFQQFGRDIADTTDAVRDPQTLEILDITPCSFGGVSVITPGTNTSNQVAVLYQDVNCTEVPVAIHADQLTPTWRVYSTGSNVFQTRAGCLIGAEHVNNSYECDIPIGAGICASYQTQTNSPRRARSVASQSIIAYTMSLGAENSVAYSNNSIAIPTNFTISVTTEILPVSMTKTSVDCTMYICGDSTECSNLLLQYGSFCTQLNRALTGIAVEQDKNTQEVFAQVKQIYKTPPIKDFGGFNFSQILPDPSKPSKRSFIEDLLFNKVTLADAGFIKQYGDCLGDIAARDLICAQKFNGLTVLPPLLTDEMIAQYTSALLAGTITSGWTFGAGAALQIPFAMQMAYRFNGIGVTQNVLYENQKLIANQFNSAIGKIQDSLSSTASALGKLQDVVNQNAQALNTLVKQLSSNFGAISSVLNDILSRLDPPEAEVQIDRLITGRLQSLQTYVTQQLIRAAEIRASANLAATKMSECVLGQSKRVDFCGKGYQLMSFPQSAPHGVVFLNVTYVPAQEKNFTTAPAICNDGKAHFPREGVFVSNGTNWFVTQRNFYEPQIITTDNTFVSGNCDVVIGIVNNTVYDPLQLELDSFKEELDKYFKNHTSPDVDLGDISGINASVVNIQKEIDRLNEVAKNLNESLIDLQELGKYEQYIKGGGSGGGQIYEGKLTAEGLRFGIVASRFNHALVDRLVEGAIDAIVRHGGREEDITLVRVPGSWEIPVAAGELARKEDIDAVIAIGVLIRGATPHFDYIASEVSKGLADLSLELRKPITFGVITADTLEQAIERAGTKHGNKGWEAALSAIEMANLFKSLR

SEQ ID NO: 3903 - protein, 1371 aa, Artificial Sequence
  SARS-CoV-2/India/1-31/2020__EPI_ISL_413523 spike protein (1-1211)(K986P_V987P_ H1048Q_H1064N_ H1083N_H1101N) LumSynth construct
MFVFLVLLPLVSSQCVNLTTRTQLPPAYTNSFTRGVYYPDKVFRSSVLHSTQDLFLPFFSNVTWFHAIHVSGTNGTKRFDNPVLPFNDGVYFASTEKSNIIRGWIFGTTLDSKTQSLLIVNNATNVVIKVCEFQFCNDPFLGVYYHKNNKSWMESEFRVYSSANNCTFEYVSQPFLMDLEGKQGNFKNLREFVFKNIDGYFKIYSKHTPINLVRDLPQGFSALEPLVDLPIGINITRFQTLLALHRSYLTPGDSSSGWTAGAAAYYVGYLQPRTFLLKYNENGTITDAVDCALDPLSETKCTLKSFTVEKGIYQTSNFRVQPTESIVRFPNITNLCPFGEVFNATRFASVYAWNRKRISNCVADYSVLYNSASFSTFKCYGVSPTKLNDLCFTNVYADSFVIRGDEVRQIAPGQTGKIADYNYKLPDDFTGCVIAWNSNNLDSKVGGNYNYLYRLFRKSNLKPFERDISTEIYQAGSTPCNGVEGFNCYFPLQSYGFQPTNGVGYQPYRVVVLSFELLHAPATVCGPKKSTNLVKNKCVNFNFNGLTGTGVLTESNKKFLPFQQFGRDIADTTDAVRDPQTLEILDITPCSFGGVSVITPGTNTSNQVAVLYQDVNCTEVPVAIHADQLTPTWRVYSTGSNVFQTRAGCLIGAEHVNNSYECDIPIGAGICASYQTQTNSPRRARSVASQSIIAYTMSLGAENSVAYSNNSIAIPTNFTISVTTEILPVSMTKTSVDCTMYICGDSTECSNLLLQYGSFCTQLNRALTGIAVEQDKNTQEVFAQVKQIYKTPPIKDFGGFNFSQILPDPSKPSKRSFIEDLLFNKVTLADAGFIKQYGDCLGDIAARDLICAQKFNGLTVLPPLLTDEMIAQYTSALLAGTITSGWTFGAGAALQIPFAMQMAYRFNGIGVTQNVLYENQKLIANQFNSVIGKIQDSLSSTASALGKLQDVVNQNAQALNTLVKQLSSNFGAISSVLNDILSRLDPPEAEVQIDRLITGRLQSLQTYVTQQLIRAAEIRASANLAATKMSECVLGQSKRVDFCGKGYQLMSFPQSAPHGVVFLNVTYVPAQEKNFTTAPAICNDGKAHFPREGVFVSNGTNWFVTQRNFYEPQIITTDNTFVSGNCDVVIGIVNNTVYDPLQPELDSFKEELDKYFKNHTSPDVDLGDISGINASVVNIQKEIDRLNEVAKNLNESLIDLQELGKYEQYIKGGGSGGGQIYEGKLTAEGLRFGIVASRFNHALVDRLVEGAIDAIVRHGGREEDITLVRVPGSWEIPVAAGELARKEDIDAVIAIGVLIRGATPHFDYIASEVSKGLADLSLELRKPITFGVITADTLEQAIERAGTKHGNKGWEAALSAIEMANLFKSLR

SEQ ID NO: 3904 - protein, 1371 aa, Artificial Sequence
  SARS-CoV-2/Guangdong/GD2020087-P0008/2020__EPI_ISL_413863 spike protein (1-1211)(K986P_V987P_ H1048Q_H1064N_ H1083N_H1101N) LumSynth construct
MFVFLVLLPLVSSQCVNLTTRTQLPPAYTNSFTRGVYYPDKVFRSSVLHSTQDLFLPFFSNVTWFHAIHVSGTNGTKRFDNPVLPFNDGVYFASTEKSNIIRGWIFGTTLDSKTQSLLIVNNATNVVIKVCEFQFCNDPFLGVYYHKNNKSWMESEFRVYSSANNCTFEYVSQPFLMDLEGKQGNFKNLREFVFKNIDGYFKIYSKHTPINLVRDLPQGFSALEPLVDLPIGINITRFQTLLALHRSYLTPGDSSSGWTAGAAAYYVGYLQPRTFLLKYNENGTITDAVDCALDPLSETKCTLKSFTVEKGIYQTSNFRVQPTESIVRFPNITNLCPFGEVFNATRFASVYAWNRKRISNCVADYSVLYNSASFSTFKCYGVSPTKLNDLCFTNVYADSFVIRGDEVREIAPGQTGKIADYNYKLPDDFTGCVIAWNSNNLDSKVGGNYNYLYRLFRKSNLKPFERDISTEIYQAGSTPCNGVEGFNCYFPLQSYGFQPTNGVGYQPYRVVVLSFELLHAPATVCGPKKSTNLVKNKCVNFNFNGLTGTGVLTESNKKFLPFQQFGRDIADTTDAVRDPQTLEILDITPCSFGGVSVITPGTNTSNQVAVLYQDVNCTEVPVAIHADQLTPTWRVYSTGSNVFQTRAGCLIGAEHVNNSYECDIPIGAGICASYQTQTNSPRRARSVASQSIIAYTMSLGAENSVAYSNNSIAIPTNFTISVTTEILPVSMTKTSVDCTMYICGDSTECSNLLLQYGSFCTQLNRALTGIAVEQDKNTQEVFAQVKQIYKTPPIKDFGGFNFSQILPDPSKPSKRSFIEDLLFNKVTLADAGFIKQYGDCLGDIAARDLICAQKFNGLTVLPPLLTDEMIAQYTSALLAGTITSGWTFGAGAALQIPFAMQMAYRFNGIGVTQNVLYENQKLIANQFNSAIGKIQDSLSSTASALGKLQDVVNQNAQALNTLVKQLSSNFGAISSVLNDILSRLDPPEAEVQIDRLITGRLQSLQTYVTQQLIRAAEIRASANLAATKMSECVLGQSKRVDFCGKGYQLMSFPQSAPHGVVFLNVTYVPAQEKNFTTAPAICNDGKAHFPREGVFVSNGTNWFVTQRNFYEPQIITTDNTFVSGNCDVVIGIVNNTVYDPLQPELDSFKEELDKYFKNHTSPDVDLGDISGINASVVNIQKEIDRLNEVAKNLNESLIDLQELGKYEQYIKGGGSGGGQIYEGKLTAEGLRFGIVASRFNHALVDRLVEGAIDAIVRHGGREEDITLVRVPGSWEIPVAAGELARKEDIDAVIAIGVLIRGATPHFDYIASEVSKGLADLSLELRKPITFGVITADTLEQAIERAGTKHGNKGWEAALSAIEMANLFKSLR

SEQ ID NO: 3905 - protein, 1371 aa, Artificial Sequence
  SARS-CoV-2/Sweden/01/2020__EPI_ISL_411951 spike protein (1-1211)(K986P_V987P_ H1048Q_H1064N_ H1083N_H1101N) LumSynth construct
MFVFLVLLPLVSSQCVNLTTRTQLPPAYTNSFTRGVYYPDKVFRSSVLHSTQDLFLPFFSNVTWFHAIHVSGTNGTKRFDNPVLPFNDGVYFASTEKSNIIRGWIFGTTLDSKTQSLLIVNNATNVVIKVCEFQFCNDPFLGVYYHKNNKSWMESEFRVYSSANNCTFEYVSQPFLMDLEGKQGNFKNLREFVFKNIDGYFKIYSKHTPINLVRDLPQGFSALEPLVDLPIGINITRFQTLLALHRSYLTPGDSSSGWTAGAAAYYVGYLQPRTFLLKYNENGTITDAVDCALDPLSETKCTLKSFTVEKGIYQTSNFRVQPTESIVRFPNITNLCPFGEVFNATRFASVYAWNRKRISNCVADYSVLYNSASFSTFKCYGVSPTKLNDLCFTNVYADSFVIRGDEVRQIAPGQTGKIADYNYKLPDDFTGCVIAWNSNNLDSKVGGNYNYLYRLFRKSNLKPFERDISTEIYQAGSTPCNGVEGFNCYFPLQSYGFQPTNGVGYQPYRVVVLSFELLHAPATVCGPKKSTNLVKNKCVNFNFNGLTGTGVLTESNKKFLPFQQFGRDIADTTDAVRDPQTLEILDITPCSFGGVSVITPGTNTSNQVAVLYQDVNCTEVPVAIHADQLTPTWRVYSTGSNVFQTRAGCLIGAEHVNNSYECDIPIGAGICASYQTQTNSPRRARSVASQSIIAYTMSLGAENSVAYSNNSIAIPTNFTISVTTEILPVSMTKTSVDCTMYICGDSTECSNLLLQYGSFCTQLNRALTGIAVEQDKNTQEVFAQVKQIYKTPPIKDCGGFNFSQILPDPSKPSKRSFIEDLLFNKVTLADAGFIKQYGDCLGDIAARDLICAQKFNGLTVLPPLLTDEMIAQYTSALLAGTITSGWTFGAGAALQIPFAMQMAYRFNGIGVTQNVLYENQKLIANQFNSAIGKIQDSLSSTASALGKLQDVVNQNAQALNTLVKQLSSNFGAISSVLNDILSRLDPPEAEVQIDRLITGRLQSLQTYVTQQLIRAAEIRASANLAATKMSECVLGQSKRVDFCGKGYQLMSFPQSAPHGVVFLNVTYVPAQEKNFTTAPAICNDGKAHFPREGVFVSNGTNWFVTQRNFYEPQIITTDNTFVSGNCDVVIGIVNNTVYDPLQPELDSFKEELDKYFKNHTSPDVDLGDISGINASVVNIQKEIDRLNEVAKNLNESLIDLQELGKYEQYIKGGGSGGGQIYEGKLTAEGLRFGIVASRFNHALVDRLVEGAIDAIVRHGGREEDITLVRVPGSWEIPVAAGELARKEDIDAVIAIGVLIRGATPHFDYIASEVSKGLADLSLELRKPITFGVITADTLEQAIERAGTKHGNKGWEAALSAIEMANLFKSLR

SEQ ID NO: 3906 - protein, 1371 aa, Artificial Sequence
  SARS-CoV-2/Tianmen/HBCDC-HB-07/2020__EPI_ISL_412983 spike protein (1-1211)(K986P_V987P_ H1048Q_H1064N_ H1083N_H1101N) LumSynth construct
MFVFLVLLPLVSSQCVNLTTRTQLPPAYTNSFTRGVYYPDKVFRSSVLHSTQDLFLPFFSNVTWFHAIHVSGTNGTKRFDNPVLPFNDGVYFASTEKSNIIRGWIFGTTLDSKTQSLLIVNNATNVVIKVCEFQFCNDPFLGVYYHKNNKSWMESEFRVYSSANNCTFEYVSQPFLMDLEGKQGNFKNLREFVFKNIDGYFKIYSKHTPINLVRDLPQGFSALEPLVDLPIGINITRFQTLLALHRSYLTPGDSSSGWTAGAAAYYVGYLQPRTFLLKYNENGTITDAVDCALDPLSETKCTLKSFTVEKGIYQTSNFRVQPTESIVRFPNITNLCPFGEVFNATRFASVYAWNRKRISNCVADYSVLYNSASFSTFKCYGVSPTKLNDLCFTNVYADSFVIRGDEVRQIAPGQTGKIADYNYKLPDDFTGCVIAWNSNNLDSKVGGNYNYLYRLFRKSNLKPFERDISTEIYQAGSTPCNGVEGFNCYFPLQSYGFQPTNGVGYQPYRVVVLSFELLHAPATVCGPKKSTNLVKNKCVNFNFNGLTGTGVLTESNKKFLPFQQFGRDIADTTDAVRDPQTLEILDITPCSFGGVSVITPGTNTSNQVAVLYQDLNCTEVPVAIHADQLTPTWRVYSTGSNVFQTRAGCLIGAEHVNNSYECDIPIGAGICASYQTQTNSPRRARSVASQSIIAYTMSLGAENSVAYSNNSIAIPTNFTISVTTEILPVSMTKTSVDCTMYICGDSTECSNLLLQYGSFCTQLNRALTGIAVEQDKNTQEVFAQVKQIYKTPPIKDFGGFNFSQILPDPSKPSKRSFIEDLLFNKVTLADAGFIKQYGDCLGDIAARDLICAQKFNGLTVLPPLLTDEMIAQYTSALLAGTITSGWTFGAGAALQIPFAMQMAYRFNGIGVTQNVLYENQKLIANQFNSAIGKIQDSLSSTASALGKLQDVVNQNAQALNTLVKQLSSNFGAISSVLNDILSRLDPPEAEVQIDRLITGRLQSLQTYVTQQLIRAAEIRASANLAATKMSECVLGQSKRVDFCGKGYQLMSFPQSAPHGVVFLNVTYVPAQEKNFTTAPAICNDGKAHFPREGVFVSNGTNWFVTQRNFYEPQIITTDNTFVSGNCDVVIGIVNNTVYDPLQPELDSFKEELDKYFKNHTSPDVDLGDISGINASVVNIQKEIDRLNEVAKNLNESLIDLQELGKYEQYIKGGGSGGGQIYEGKLTAEGLRFGIVASRFNHALVDRLVEGAIDAIVRHGGREEDITLVRVPGSWEIPVAAGELARKEDIDAVIAIGVLIRGATPHFDYIASEVSKGLADLSLELRKPITFGVITADTLEQAIERAGTKHGNKGWEAALSAIEMANLFKSLR

SEQ ID NO: 3907 - protein, 1371 aa, Artificial Sequence
  SARS-CoV-2/Hong Kong/case42_VM20002493/2020__EPI_ISL_414527 spike protein (1-1211)(K986P_V987P_ H1048Q_H1064N_ H1083N_H1101N) LumSynth construct
MFVFLVLLPLVSSQCVNLTTRTQLPPAYTNSFTRGVYYPDKVFRSSVLHSTQDLFLPFFSNVTWFHAIHVSGTNGTKRFDNPVLPFNDGVYFASTEKSNIIRGWIFGTTLDSKTQSLLIVNNATNVVIKVCEFQFCNDPFLGVYYHKNNKSWMESEFRVYSSANNCTFEYVSQPFLMDLEGKQGNFKNLREFVFKNIDGYFKIYSKHTPINLVRDLPQGFSALEPLVDLPIGINITRFQTLLALHRSYLTPGDSSSGWTAGAAAYYVGYLQPRTFLLKYNENGTITDAVDCALDPLSETKCTLKSFTVEKGIYQTSNFRVQPTESIVRFPNITNLCPFGEVFNATRFASVYAWNRKRISNCVADYSVLYNSASFSTFKCYGVSPTKLNDLCFTNVYADSFVIRGDEVRQIAPGQTGKIADYNYKLPDDFTGCVIAWNSNNLDSKVGGNYNYLYRLFRKSNLKPFERDISTEIYQAGSTPCNGVEGFNCYFPLQSYGFQPTNGVGYQPYRVVVLSFELLHAPATVCGPKKSTNLVKNKCVNFNFNGLTGTGVLTESNKKFLPFQQFGRDIADTTDAVRDPQTLEILDITPCSFGGVSVITPGTNTSNQVAVLYQDVNCTEVPVAIHADQLTPTWRVYSTGSNVFQTRAGCLIGAEHVNNSYECDIPIGAGICASYQTQTNSPRRARSVASQSIIAYTMSLGAENSVAYSNNSIAIPTNFAISVTTEILPVSMTKTSVDCTMYICGDSTECSNLLLQYGSFCTQLNRALTGIAVEQDKNTQEVFAQVKQIYKTPPIKDFGGFNFSQILPDPSKPSKRSFIEDLLFNKVTLADAGFIKQYGDCLGDIAARDLICAQKFNGLTVLPPLLTDEMIAQYTSALLAGTITSGWTFGAGAALQIPFAMQMAYRFNGIGVTQNVLYENQKLIANQFNSAIGKIQDSLSSTASALGKLQDVVNQNAQALNTLVKQLSSNFGAISSVLNDILSRLDPPEAEVQIDRLITGRLQSLQTYVTQQLIRAAEIRASANLAATKMSECVLGQSKRVDFCGKGYQLMSFPQSAPHGVVFLNVTYVPAQEKNFTTAPAICNDGKAHFPREGVFVSNGTNWFVTQRNFYEPQIITTDNTFVSGNCDVVIGIVNNTVYDPLQPELDSFKEELDKYFKNHTSPDVDLGDISGINASVVNIQKEIDRLNEVAKNLNESLIDLQELGKYEQYIKGGGSGGGQIYEGKLTAEGLRFGIVASRFNHALVDRLVEGAIDAIVRHGGREEDITLVRVPGSWEIPVAAGELARKEDIDAVIAIGVLIRGATPHFDYIASEVSKGLADLSLELRKPITFGVITADTLEQAIERAGTKHGNKGWEAALSAIEMANLFKSLR

SEQ ID NO: 3908 - protein, 1371 aa, Artificial Sequence
  SARS-CoV-2/USA/CruiseA-23/2020__EPI_ISL_414482 spike protein (1-1211)(K986P_V987P_ H1048Q_H1064N_ H1083N_H1101N) LumSynth construct
MFVFLVLLPLVSSQCVNLTTRTQLPPAYTNSFTRGVYYPDKVFRSSVLHSTQDLFLPFFSNVTWFHAIHVSGTNGTKRFDNPVLPFNDGVYFASTEKSNIIRGWIFGTTLDSKTQSLLIVNNATNVVIKVCEFQFCNDPFLGVYYHKNNKSWMESEFRVYSSANNCTFEYVSQPFLMDLEVKQGNFKNLREFVFKNIDGYFKIYSKHTPINLVRDLPQGFSALEPLVDLPIGINITRFQTLLALHRSYLTPGDSSSGWTAGAAAYYVGYLQPRTFLLKYNENGTITDAVDCALDPLSETKCTLKSFTVEKGIYQTSNFRVQPTESIVRFPNITNLCPFGEVFNATRFASVYAWNRKRISNCVADYSVLYNSASFSTFKCYGVSPTKLNDLCFTNVYADSFVIRGDEVRQIAPGQTGKIADYNYKLPDDFTGCVIAWNSNNLDSKVGGNYNYLYRLFRKSNLKPFERDISTEIYQAGSTPCNGVEGFNCYFPLQSYGFQPTNGVGYQPYRVVVLSFELLHAPATVCGPKKSTNLVKNKCVNFNFNGLTGTGVLTESNKKFLPFQQFGRDIADTTDAVRDPQTLEILDITPCSFGGVSVITPGTNTSNQVAVLYQDVNCTEVPVAIHADQLTPTWRVYSTGSNVFQTRAGCLIGAEHVNNSYECDIPIGAGICASYQTQTNSPRRARSVASQSIIAYTMSLGAENSVAYSNNSIAIPTNFTISVTTEILPVSMTKTSVDCTMYICGDSTECSNLLLQYGSFCTQLNRALTGIAVEQDKNTQEVFAQVKQIYKTPPIKDFGGFNFSQILPDPSKPSKRSFIEDLLFNKVTLADAGFIKQYGDCLGDIAARDLICAQKFNGLTVLPPLLTDEMIAQYTSALLAGTITSGWTFGAGAALQIPFAMQMAYRFNGIGVTQNVLYENQKLIANQFNSAIGKIQDSLSSTASALGKLQDVVNQNAQALNTLVKQLSSNFGAISSVLNDILSRLDPPEAEVQIDRLITGRLQSLQTYVTQQLIRAAEIRASANLAATKMSECVLGQSKRVDFCGKGYQLMSFPQSAPHGVVFLNVTYVPAQEKNFTTAPAICNDGKAHFPREGVFVSNGTNWFVTQRNFYEPQIITTDNTFVSGNCDVVIGIVNNTVYDPLQPELDSFKEELDKYFKNHTSPDVDLGDISGINASVVNIQKEIDRLNEVAKNLNESLIDLQELGKYEQYIKGGGSGGGQIYEGKLTAEGLRFGIVASRFNHALVDRLVEGAIDAIVRHGGREEDITLVRVPGSWEIPVAAGELARKEDIDAVIAIGVLIRGATPHFDYIASEVSKGLADLSLELRKPITFGVITADTLEQAIERAGTKHGNKGWEAALSAIEMANLFKSLR

SEQ ID NO: 3909 - protein, 1371 aa, Artificial Sequence
  SARS-CoV-2/Hong Kong/case85_VM20002868/2020__EPI_ISL_414519 spike protein (1-1211)(K986P_V987P_ H1048Q_H1064N_ H1083N_H1101N) LumSynth construct
MFVFLVLVPLVSSQCVNLTTRTQLPPAYTNSFTRGVYYPDKVFRSSVLHSTQDLFLPFFSNVTWFHAIHVSGTNGTKRFDNPVLPFNDGVYFASTEKSNIIRGWIFGTTLDSKTQSLLIVNNATNVVIKVCEFQFCNDPFLGVYYHKNNKSWMESEFRVYSSANNCTFEYVSQPFLMDLEGKQGNFKNLREFVFKNIDGYFKIYSKHTPINLVRDLPQGFSALEPLVDLPIGINITRFQTLLALHRSYLTPGDSSSGWTAGAAAYYVGYLQPRTFLLKYNENGTITDAVDCALDPLSETKCTLKSFTVEKGIYQTSNFRVQPTESIVRFPNITNLCPFGEVFNATRFASVYAWNRKRISNCVADYSVLYNSASFSTFKCYGVSPTKLNDLCFTNVYADSFVIRGDEVRQIAPGQTGKIADYNYKLPDDFTGCVIAWNSNNLDSKVGGNYNYLYRLFRKSNLKPFERDISTEIYQAGSTPCNGVEGFNCYFPLQSYGFQPTNGVGYQPYRVVVLSFELLHAPATVCGPKKSTNLVKNKCVNFNFNGLTGTGVLTESNKKFLPFQQFGRDIADTTDAVRDPQTLEILDITPCSFGGVSVITPGTNTSNQVAVLYQDVNCTEVPVAIHADQLTPTWRVYSTGSNVFQTRAGCLIGAEHVNNSYECDIPIGAGICASYQTQTNSPRRARSVASQSIIAYTMSLGAENSVAYSNNSIAIPTNFTISVTTEILPVSMTKTSVDCTMYICGDSTECSNLLLQYGSFCTQLNRALTGIAVEQDKNTQEVFAQVKQIYKTPPIKDFGGFNFSQILPDPSKPSKRSFIEDLLFNKVTLADAGFIKQYGDCLGDIAARDLICAQKFNGLTVLPPLLTDEMIAQYTSALLAGTITSGWTFGAGAALQIPFAMQMAYRFNGIGVTQNVLYENQKLIANQFNSAIGKIQDSLSSTASALGKLQDVVNQNAQALNTLVKQLSSNFGAISSVLNDILSRLDPPEAEVQIDRLITGRLQSLQTYVTQQLIRAAEIRASANLAATKMSECVLGQSKRVDFCGKGYQLMSFPQSAPHGVVFLNVTYVPAQEKNFTTAPAICNDGKAHFPREGVFVSNGTNWFVTQRNFYEPQIITTDNTFVSGNCDVVIGIVNNTVYDPLQPELDSFKEELDKYFKNHTSPDVDLGDISGINASVVNIQKEIDRLNEVAKNLNESLIDLQELGKYEQYIKGGGSGGGQIYEGKLTAEGLRFGIVASRFNHALVDRLVEGAIDAIVRHGGREEDITLVRVPGSWEIPVAAGELARKEDIDAVIAIGVLIRGATPHFDYIASEVSKGLADLSLELRKPITFGVITADTLEQAIERAGTKHGNKGWEAALSAIEMANLFKSLR

SEQ ID NO: 3910 - protein, 1371 aa, Artificial Sequence; identical to SEQ ID NO: 3900
  SARS-CoV-2/England/200990660/2020__EPI_ISL_414523 spike protein (1-1211)(K986P_V987P_ H1048Q_H1064N_ H1083N_H1101N) LumSynth construct

SEQ ID NO: 3911 - protein, 1371 aa, Artificial Sequence
  SARS-CoV-2/Australia/NSW09/2020__EPI_ISL_413595 spike protein (1-1211)(K986P_V987P_ H1048Q_H1064N_ H1083N_H1101N) LumSynth construct
MFVFLVLLPLVSSQCVNLTTRTQLPPAYTNSFTRGVYYPDKVFRSSVLHSTQDLFLPFFSNVTWFHAIHVSGTNGTKRFDNPVLPFNDGVYFASTEKSNIIRGWIFGTTLDSKTQSLLIVNNATNVVIKVCEFQFCNDPFLGVYYHKNNKSWMESEFRVYSSANNCTFEYVSQPFLMDLEGKQGNFKNLREFVFKNIDGYFKIYSKHTPINLVRDLPQGFSALEPLVDLPIGINITRFQTLLALHRSYLTPGDSSSGWTAGAAAYYVGYLQPRTFLLKYNENGTITDAVDCALDPLSETKCTLKSFTVEKGIYQTSNFRVQPTESIVRFPNITNLCPFGEVFNATRFASVYAWNRKRISNCVADYSVLYNSASFSTFKCYGVSPTKLNDLCFTNVYADSFVIRGDEVRQIAPGQTGKIADYNYKLPDDFTGCVIAWNSNNLDSKVGGNYNYLYRLFRKSNLKPFERDISTEIYQAGSTPCNGVEGFNCYFPLQSYGFQPTNGVGYQPYRVVVLSFELLHAPATVCGPKKSTNLVKNKCVNFNFNGLTGTGVLTESNKKFLPFQQFGRDIADTTDAVRDPQTLEILDITPCSFGGVSVITPGTNTSNQVAVLYQDVNCTEVPVAIHADQLTPTWRVYSTGSNVFQTRAGCLIGAEHVNNSYECDIPIGAGICASYQTQTNSPRRARSVASQSIIAYTMSLGAENSVAYSNNSIAIPTNFTISVTTEILPVSMTKTSVDCTMYICGDSTECSNLLLQYGSFCTQLNRALTGIAVEQDKNTQEVFAQVKQIYKTPPIKDFGGFNFSQILPDPSKPSKRSFIEDLLFNKVTLADAGFIKQYGDCLGDIAARDLICAQKFNGLTVLPPLLTDEMIAQYTSALLAGTITSGWTFGAGAALQIPFAMQMAYRFNGIGVTQNVLYENQKLIANQFNSAIGKIQDSLSFTASALGKLQDVVNQNAQALNTLVKQLSSNFGAISSVLNDILSRLDPPEAEVQIDRLITGRLQSLQTYVTQQLIRAAEIRASANLAATKMSECVLGQSKRVDFCGKGYQLMSFPQSAPHGVVFLNVTYVPAQEKNFTTAPAICNDGKAHFPREGVFVSNGTNWFVTQRNFYEPQIITTDNTFVSGNCDVVIGIVNNTVYDPLQPELDSFKEELDKYFKNHTSPDVDLGDISGINASVVNIQKEIDRLNEVAKNLNESLIDLQELGKYEQYIKGGGSGGGQIYEGKLTAEGLRFGIVASRFNHALVDRLVEGAIDAIVRHGGREEDITLVRVPGSWEIPVAAGELARKEDIDAVIAIGVLIRGATPHFDYIASEVSKGLADLSLELRKPITFGVITADTLEQAIERAGTKHGNKGWEAALSAIEMANLFKSLR

SEQ ID NO: 3912 - protein, 1371 aa, Artificial Sequence; identical to SEQ ID NO: 3892
  SARS-CoV-2/Australia/NSW10/2020__EPI_ISL_413596 spike protein (1-1211)(K986P_V987P_ H1048Q_H1064N_ H1083N_H1101N) LumSynth construct

SEQ ID NO: 3913 - protein, 1371 aa, Artificial Sequence
  SARS-CoV-2/Switzerland/1000477797/2020__EPI_ISL_413023 spike protein (1-1211)(K986P_V987P_ H1048Q_H1064N_ H1083N_H1101N) LumSynth construct
MFVFLVLLPLVSSQCVNLTTRTQLPPAYTNSFTRGVYYPDKVFRSSVLHSTQDLFLPFFSNVTWFHAIHVSGTNGTKRFDNPVLPFNDGVYFASTEKSNIIRGWIFGTTLDSKTQSLLIVNNATNVVIKVCEFQFCNDPFLGVYYHKNNKSWMESEFRVYSSANNCTFEYVSQPFLMDLEGKQGNFKNLREFVFKNIDGYFNIYSKHTPINLVRDLPQGFSALEPLVDLPIGINITRFQTLLALHRSYLTPGDSSSGWTAGAAAYYVGYLQPRTFLLKYNENGTITDAVDCALDPLSETKCTLKSFTVEKGIYQTSNFRVQPTESIVRFPNITNLCPFGEVFNATRFASVYAWNRKRISNCVADYSVLYNSASFSTFKCYGVSPTKLNDLCFTNVYADSFVIRGDEVRQIAPGQTGKIADYNYKLPDDFTGCVIAWNSNNLDSKVGGNYNYLYRLFRKSNLKPFERDISTEIYQAGSTPCNGVEGFNCYFPLQSYGFQPTNGVGYQPYRVVVLSFELLHAPATVCGPKKSTNLVKNKCVNFNFNGLTGTGVLTESNKKFLPFQQFGRDIADTTDAVRDPQTLEILDITPCSFGGVSVITPGTNTSNQVAVLYQGVNCTEVPVAIHADQLTPTWRVYSTGSNVFQTRAGCLIGAEHVNNSYECDIPIGAGICASYQTQTNSPRRARSVASQSIIAYTMSLGAENSVAYSNNSIAIPTNFTISVTTEILPVSMTKTSVDCTMYICGDSTECSNLLLQYGSFCTQLNRALTGIAVEQDKNTQEVFAQVKQIYKTPPIKDFGGFNFSQILPDPSKPSKRSFIEDLLFNKVTLADAGFIKQYGDCLGDIAARDLICAQKFNGLTVLPPLLTDEMIAQYTSALLAGTITSGWTFGAGAALQIPFAMQMAYRFNGIGVTQNVLYENQKLIANQFNSAIGKIQDSLSSTASALGKLQDVVNQNAQALNTLVKQLSSNFGAISSVLNDILSRLDPPEAEVQIDRLITGRLQSLQTYVTQQLIRAAEIRASANLAATKMSECVLGQSKRVDFCGKGYQLMSFPQSAPHGVVFLNVTYVPAQEKNFTTAPAICNDGKAHFPREGVFVSNGTNWFVTQRNFYEPQIITTDNTFVSGNCDVVIGIVNNTVYDPLQPELDSFKEELDKYFKNHTSPDVDLGDISGINASVVNIQKEIDRLNEVAKNLNESLIDLQELGKYEQYIKGGGSGGGQIYEGKLTAEGLRFGIVASRFNHALVDRLVEGAIDAIVRHGGREEDITLVRVPGSWEIPVAAGELARKEDIDAVIAIGVLIRGATPHFDYIASEVSKGLADLSLELRKPITFGVITADTLEQAIERAGTKHGNKGWEAALSAIEMANLFKSLR

SEQ ID NO: 3914 - protein, 1371 aa, Artificial Sequence
  SARS-CoV-2/Belgium/BA-02291/2020__EPI_ISL_415159 spike protein (1-1211)(K986P_V987P_ H1048Q_H1064N_ H1083N_H1101N) LumSynth construct
MFVFLVLLPLVSSQCVNLTTRTQLPPAYTNSFTRGVYYPDKVFRSSVLHSTQDLFLPFFSNVTWFHAIHVSGTNGTKRFDNPVLPFNDGVYFASTEKSNIIRGWIFGTTLDSKTQSLLIVNNATNVVIKVCEFQFCNDPFLGVYYHKNNKSWMESEFRVYSSANNCTFEYVSQPFLMDLEGKQGNFKNLREFVFKNIDGYFKIYSKHTPINLVRDLPQGFSALEPLVDLPIGINITRFQTLLALHRSYLTPGDSSSGWTAGAAAYYVGYLQPRTFLLKYNENGTITDAVDCALDPLSETKCTLKSFTVEKGIYQTSNFRVQPTESIVRFPNITNLCPFGEVFNATRFASVYAWNRKRISNCVADYSVLYNSASFSTFKCYGVSPTKLNDLCFTNVYADSFVIRGDEVRQIAPGQTGKIADYNYKLPDDFTGCVIAWNSNNLDSKVGGNYNYLYRLFRRSNLKPFERDISTEIYQAGSTPCNGVEGFNCYFPLQSYGFQPTNGVGYQPYRVVVLSFELLPAPATVCGPKKSTNLVKNKCVNFNFNGLTGTGVLTESNKKFLPFQQFGRDIADTTDAVRDPQTLEILDITPCSFGGVSVITPGTNTSNQVAVLYQGVNCTEVPVAIHADQLTPTWRVYSTGSNVFQTRAGCLIGAEHVNNSYECDIPIGAGICASYQTQTNSPRRARSVASQSIIAYTMSLGAENSVAYSNNSIAIPTNFTISVTTEILPVSMTKTSVDCTMYICGDSTECSNLLLQYGSFCTQLNRALTGIAVEQDKNTQEVFAQVKQIYKTPPIKDFGGFNFSQILPDPSKPSKRSFIEDLLFNKVTLADAGFIKQYGDCLGDIAARDLICAQKFNGLTVLPPLLTDEMIAQYTSALLAGTITSGWTFGAGAALQIPFAMQMAYRFNGIGVTQNVLYENQKLIANQFNSAIGKIQDSLSSAAPALGKLQDVVNQNAQALNTLVKQLSSNFGAISSVLNDILSRLDPPEAEVQIDRLITGRLQSLQTYVTQQLIRAAEIRASANLAATKMSECVLGQSKRVDFCGKGYQLMSFPQSAPHGVVFLNVTYVPAQEKNFTTAPAICNDGKAHFPREGVFVSNGTNWFVTQRNFYEPQIITTDNTFVSGNCDVVIGIVNNTVYDPLQPELDSFKEELDKYFKNHTSPDVDLGDISGINASVVNIQKEIDRLNEVAKNLNESLIDLQELGKYEQYIKGGGSGGGQIYEGKLTAEGLRFGIVASRFNHALVDRLVEGAIDAIVRHGGREEDITLVRVPGSWEIPVAAGELARKEDIDAVIAIGVLIRGATPHFDYIASEVSKGLADLSLELRKPITFGVITADTLEQAIERAGTKHGNKGWEAALSAIEMANLFKSLR

SEQ ID NO: 3915 - protein, 1371 aa, Artificial Sequence
  SARS-CoV-2/USA/WA8-UW5/2020__EPI_ISL_413486 spike protein (1-1211)(K986P_V987P_ H1048Q_H1064N_ H1083N_H1101N) LumSynth construct
MFVFLVLLPLVSSQCVNLTTRTQLPPAYTNSFTRGVYYPDKVFRSSVLHSTQDLFLPFFSNVTWFHAIHVSGTNGTKRFDNPVLPFNDGVYFASTEKSNIIRGWIFGTTLDSKTQSLLIVNNATNVVIKVCEFQFCNDPFLGVYYHKNNKSWMESEFRVYSSANNCTFEYVSQPFLMDLEGKQGNFKNLREFVFKNIDGYFKIYSKHTPINLVRDLPQGFSALEPLVDLPIGINITRFQTLLALHRSYLTPGDSSSGWTAGAAAYYVGYLQPRTFLLKYNENGTITDAVDCALDPLSETKCTLKSFTVEKGIYQTSNFRVQPTESIVRFPNITNLCPFGEVFNATRFASVYAWNRKRISNCVADYSVLYNSASFSTFKCYGVSPTKLNDLCFTNVYADSFVIRGDEVRQIAPGQTGKIADYNYKLPDDFTGCVIAWNSNNLDSKVGGNYNYLYRLFRKSNLKPFERDISTEIYQAGSTPCNGVEGFNCYFPLQSYGFQPTNGVGYQPYRVVVLSFELLHAPATVCGPKKSTNLVKNKCVNFNFNGLTGTGVLTESNKKFLPFQQFGRDIADTTDAVRDPQTLEILDITPCSFGGVSVITPGTNTSNQVAVLYQDVNCTEVPVAIHADQLTPTWRVYSTGSNVFQTRAGCLIGAEYVNNSYECDIPIGAGICASYQTQTNSPRRARSVASQSIIAYTMSLGAENSVAYSNNSIAIPTNFTISVTTEILPVSMTKTSVDCTMYICGDSTECSNLLLQYGSFCTQLNRALTGIAVEQDKNTQEVFAQVKQIYKTPPIKDFGGFNFSQILPDPSKPSKRSFIEDLLFNKVTLADAGFIKQYGDCLGDIAARDLICAQKFNGLTVLPPLLTDEMIAQYTSALLAGTITSGWTFGAGAALQIPFAMQMAYRFNGIGVTQNVLYENQKLIANQFNSAIGKIQDSLSSTASALGKLQDVVNQNAQALNTLVKQLSSNFGAISSVLNDILSRLDPPEAEVQIDRLITGRLQSLQTYVTQQLIRAAEIRASANLAATKMSECVLGQSKRVDFCGKGYQLMSFPQSAPHGVVFLNVTYVPAQEKNFTTAPAICNDGKAHFPREGVFVSNGTNWFVTQRNFYEPQIITTDNTFVSGNCDVVIGIVNNTVYDPLQPELDSFKEELDKYFKNHTSPDVDLGDISGINASVVNIQKEIDRLNEVAKNLNESLIDLQELGKYEQYIKGGGSGGGQIYEGKLTAEGLRFGIVASRFNHALVDRLVEGAIDAIVRHGGREEDITLVRVPGSWEIPVAAGELARKEDIDAVIAIGVLIRGATPHFDYIASEVSKGLADLSLELRKPITFGVITADTLEQAIERAGTKHGNKGWEAALSAIEMANLFKSLR

SEQ ID NO: 3916 - protein, 1371 aa, Artificial Sequence
  SARS-CoV-2/England/20102000506/2020__EPI_ISL_415147 spike protein (1-1211)(K986P_V987P_ H1048Q_H1064N_ H1083N_H1101N) LumSynth construct
MFVFLVLLPLVSSQCVNLTTRTQLPPAYTNSFTRGVYYPDKVFRSSVLHSTQDLFLPFFSNVTWFHAIHVSGTNGTKRFDNPVLPFNDGVYFASTEKSNIIRGWIFGTTLDSKTQSLLIVNNATNVVIKVCEFQFCNDPFLGVYYHKNNKSWMESEFRVYSSANNCTFEYVSQPFLMDLEGKQGNFKNLREFVFKNIDGYFKIYSKHTPINLVRDLPQGFSALEPLVDLPIGINITRFQTLLALHRSYLTPGDSSSGWTAGAAAYYVGYLQPRTFLLKYNENGTITDAVDCALDPLSETKCTLKSFTVEKGIYQTSNFRVQPTESIVRFPNITNLCPFGEVFNATRFASVYAWNRKRISNCVADYSVLYNSASFSTFKCYGVSPTKLNDLCFTNVYADSFVIRGDEVRQIAPGQTGKIADYNYKLPDDFTGCVIAWNSNNLDSKVGGNYNYLYRLFRKSNLKPFERDISTEIYQAGSTPCNGVEGFNCYFPLQSYGFQPTNGVGYQPYRVVVLSFELLHAPATVCGPKKSTNLVKNKCVNFNFNGLTGTGVLTESNKKFLPFQQFGRDIADTTDAVRDPQTLEILDITPCSFGGVSVITPGTNTSNQVAVLYQGVNCTEVPVAIHADQLTPTWRVYSTGSNVFQTRAGCLIGAEHVNNSYECDIPIGAGICASYQTQTNSPRRARSVASQSIIAYTMSLGAENSVAYSNNSIAIPTNFTISVTTEILPVSMTKTSVDCTMYICGDSTECSNLLLQYGSFCTQLNRALTGIAVEQDKNTQEVFAQVKQIYKTPPIKDFGGFNFSQILPDPSKPSKRSFIEDLLFNKVTLADAGFIKQYGYCLGDIAARDLICAQKFNGLTVLPPLLTDEMIAQYTSALLAGTITSGWTFGAGAALQIPFAMQMAYRFNGIGVTQNVLYENQKLIANQFNSAIGKIQDSLSSTASALGKLQDVVNQNAQALNTLVKQLSSNFGAISSVLNDILSRLDPPEAEVQIDRLITGRLQSLQTYVTQQLIRAAEIRASANLAATKMSECVLGQSKRVDFCGKGYQLMSFPQSAPHGVVFLNVTYVPAQEKNFTTAPAICNDGKAHFPREGVFVSNGTNWFVTQRNFYEPQIITTDNTFVSGNCDVVIGIVNNTVYDPLQPELDSFKEELDKYFKNHTSPDVDLGDISGINASVVNIQKEIDRLNEVAKNLNESLIDLQELGKYEQYIKGGGSGGGQIYEGKLTAEGLRFGIVASRFNHALVDRLVEGAIDAIVRHGGREEDITLVRVPGSWEIPVAAGELARKEDIDAVIAIGVLIRGATPHFDYIASEVSKGLADLSLELRKPITFGVITADTLEQAIERAGTKHGNKGWEAALSAIEMANLFKSLR

SEQ ID NO: 3917 - protein, 1371 aa, Artificial Sequence
  SARS-CoV-2/Belgium/VAG-03013/2020__EPI_ISL_415155 spike protein (1-1211)(K986P_V987P_ H1048Q_H1064N_ H1083N_H1101N) LumSynth construct
MFVFLVLLPLVSSQCVNLTTRTQLPPAYTNSFTRGVYYPDKVFRSSVLHSTQDLFLPFFSNVTWFHAIHVSGTNGTKRFDNPVLPFNDGVYFASTEKSNIIRGWIFGTTLDSKTQSLLIVNNATNVVIKVCEFQFCNDPFLGVYYHKNNKSWMESEFRVYSSANNCTFEYVSQPFLMDLEGKQGNFKNLREFVFKNIDGYFKIYSKHTPINLVRDLPQGFSALEPLVDLPIGINITRFQTLLALHRSYLTPGDSSSGWTAGAAAYYVGYLQPRTFLLKYNENGTITDAVDCALDPLSETKCTLKSFTVEKGIYQTSNFRVQPTESIVRFPNITNLCPFGEVFNATRFASVYAWNRKRISNCVADYSVLYNSASFSTFKCYGVSPTKLNDLCFTNVYADSFVIRGDEVRQIAPGQTGKIADYNYKLPDDFTGCVIAWNSNNLDSKVGGNYNYLYRLFRKSNLKPFERDISTEIYQAGSTPCNGVEGFNCYFPLQSYGFQPTNGVGYQPYRVVVLSFELLHAPATVCGPKKSTNLVKNKCVNFNFNGLTGTGVLTESNKKFLPFQQFGRDIADTTDAVRDPQTLEILDITPCSFGGVSVITPGTNTSNQVAVLYQGVNCTEVPVAIHADQLTPTWRVYSTGSNVFQTRAGCLIGAEHVNNSYECDIPIGAGICASYQTQTNSPRRARSVASQSIIAYTMSLGAENSVAYSNNSIAIPTNFTISVTTEILPVSMTKTSVDCTMYICGDSTECSNLLLQYGSFCTQLNRALTGIAVEQDKNTQEVFAQVKQIYKTPPIKDFGGFNFSQILPDPSKPSKRSFIEDLLFNKVTLADAGFIKQYGDCLGDIAARDLICAQKFNGLTVLPPLLTDEMIAQYTSALLAGTITSGWTFGAGAALQIPFAMQMAYRFNGIGVTQNVLYENQKLIANQFNSAIGKIQDSLSSTATALGKLQDVVNQNAQALNTLVKQLSSNFGAISSVLNDILSRLDPPEAEVQIDRLITGRLQSLQTYVTQQLIRAAEIRASANLAATKMSECVLGQSKRVDFCGKGYQLMSFPQSAPHGVVFLNVTYVPAQEKNFTTAPAICNDGKAHFPREGVFVSNGTNWFVTQRNFYEPQIITTDNTFVSGNCDVVIGIVNNTVYDPLQPELDSFKEELDKYFKNHTSPDVDLGDISGINASVVNIQKEIDRLNEVAKNLNESLIDLQELGKYEQYIKGGGSGGGQIYEGKLTAEGLRFGIVASRFNHALVDRLVEGAIDAIVRHGGREEDITLVRVPGSWEIPVAAGELARKEDIDAVIAIGVLIRGATPHFDYIASEVSKGLADLSLELRKPITFGVITADTLEQAIERAGTKHGNKGWEAALSAIEMANLFKSLR

SEQ ID NO: 3918 - protein, 1371 aa, Artificial Sequence
  SARS-CoV-2/Belgium/BC-03016/2020__EPI_ISL_415157 spike protein (1-1211)(K986P_V987P_ H1048Q_H1064N_ H1083N_H1101N) LumSynth construct
MFVFLVLLPLVSSQCVNLTTRTQLPPAYTNSFTRGVYYPDKVFRSSVLHSTQDLFLPFFSNVTWFHAIHVSGTNGTKRFDNPVLPFNDGVYFASTEKSNIIRGWIFGTTLDSKTQSLLIVNNATNVVIKVCEFQFCNDPFLGVYYHKNNKSWMESEFRVYSSANNCTFEYVSQPFLMDLEGKQGNFKNLREFVFKNIDGYFKIYSKHTPINLVRDLPQGFSALEPLVDLPIGINITRFQTLLALHRSYLTPGDSSSGWTAGAAAYYVGYLQPRTFLLKYNENGTITDAVDCALDPLSETKCTLKSFTVEKGIYQTSNFRVQPTESIVRFPNITNLCPFGEVFNATRFASVYAWNRKRISNCVADYSVLYNSASFSTFKCYGVSPTKLNDLCFTNVYADSFVIRGDEVRQIAPGQTGKIADYNYKLPDDFTGCVIAWNSNNLDSKVGGNYNYLYRLFRKSNLKPFERDISTEIYQAGSTPCNGVEGFNCYFPLQSYGFQPTNGVGYQPYRVVVLSFELLHAPATVCGPKKSTNLVKNKCVNFNFNGLTGTGVLTESNKKFLPFQQFGRDIADTTDAVRDPQTLEILDITPCSFGGVSVITPGTNTSNQVAVLYQGVNCTEVPVAIHADQLTPTWRVYSTGSNVFQTRAGCLIGAEHVNNSYECDIPIGAGICASYQTQTNSPRRARSVASQSIIAYTMSLGAENSVAYSNNSIAIPTNFTISVTTEILPVSMTKTSVDCTMYICGDSTECSNLLLQYGSFCTQLNRALTGIAVEQDKNTQEVFAQVKQIYKTPPIKDFGGFNFSQILPDPSKPSKRSFIEDLLFNKVTLADAGFIKQYGDCLGDIAARDLICAQKFNGLTVLPPLLTDEMIAQYTSALLAGTITSGWTFGAGAALQIPFAMQMAYRFNGIGVTQNVLYENQKLIANQFNSAIGKIQDSLSSTAPALGKLQDVVNQNAQALNTLVKQLSSNFGAISSVLNDILSRLDPPEAEVQIDRLITGRLQSLQTYVTQQLIRAAEIRASANLAATKMSECVLGQSKRVDFCGKGYQLMSFPQSAPHGVVFLNVTYVPAQEKNFTTAPAICNDGKAHFPREGVFVSNGTNWFVTQRNFYEPQIITTDNTFVSGNCDVVIGIVNNTVYDPLQPELDSFKEELDKYFKNHTSPDVDLGDISGINASVVNIQKEIDRLNEVAKNLNESLIDLQELGKYEQYIKGGGSGGGQIYEGKLTAEGLRFGIVASRFNHALVDRLVEGAIDAIVRHGGREEDITLVRVPGSWEIPVAAGELARKEDIDAVIAIGVLIRGATPHFDYIASEVSKGLADLSLELRKPITFGVITADTLEQAIERAGTKHGNKGWEAALSAIEMANLFKSLR

SEQ ID NO: 3919 - protein, 1371 aa, Artificial Sequence
  SARS-CoV-2/Germany/BavPat3/2020__EPI_ISL_414521 spike protein (1-1211)(K986P_V987P_ H1048Q_H1064N_ H1083N_H1101N) LumSynth construct
MFVFLVLLPLVSSQCVNLTTRTQLPPAYTNSFTRGVYYPDKVFRSSVLHSTQDLFLPFFSNVTWFHAIHVSGTNGTKRFDNPVLPFNDGVYFASTEKSNIIRGWIFGTTLDSKTQSLLIVNNATNVVIKVCEFQFCNDPFLGVYYHKNNKSWMESEFRVYSSANNCTFEYVSQPFLMDLEGKQGNFKNLREFVFKNIDGYFKIYSKHTPINLVRDLPQGFSALEPLVDLPIGINITRFQTLLALHRSYLTPGDSSSGWTAGAAAYYVGYLQPRTFLLKYNENGTITDAVDCALDPLSETKCTLKSFTVEKGIYQTSNFRVQPTESIVRFPNITNLCPFGEVFNATRFASVYAWNRKRISNCVADYSVLYNSASFSTFKCYGVSPTKLNDLCFTNVYADSFVIRGDEVRQIAPGQTGKIADYNYKLPDDFTGCVIAWNSNNLDSKVGGNYNYLYRLFRKSNLKPFERDISTEIYQAGSTPCNGVEGFNCYFPLQSYGFQPTNGVGYQPYRVVVLSFELLHAPATVCGPKKSTNLVKNKCVNFNFNGLTGTGVLTESNKKFLPFQQFGRDIADTTDAVRDPQTLEILDITPCSFGGVSVITPGTNTSNQVAVLYQDVNCTEVPVAIHADQLTPTWRVYSTGSNVFQTRAGCLIGAEHVNNSYECDIPIGAGICASYQTQTNSPRRARSVASQSIIAYTMSLGAENSVAYSNNSIAIPTNFTISVTTEILPVSMTKTSVDCTMYICGDSTECSNLLLQYGSFCTQLNRALTGIAVEQDKNTQQVFAQVKQIYKTPPIKDFGGFNFSQILPDPSKPSKRSFIEDLLFNKVTLADAGFIKQYGDCLGDIAARDLICAQKFNGLTVLPPLLTDEMIAQYTSALLAGTITSGWTFGAGAALQIPFAMQMAYRFNGIGVTQNVLYENQKLIANQFNSAIGKIQDSLSSTASALGKLQDVVNQNAQALNTLVKQLSSNFGAISSVLNDILSRLDPPEAEVQIDRLITGRLQSLQTYVTQQLIRAAEIRASANLAATKMSECVLGQSKRVDFCGKGYQLMSFPQSAPHGVVFLNVTYVPAQEKNFTTAPAICNDGKAHFPREGVFVSNGTNWFVTQRNFYEPQIITTDNTFVSGNCDVVIGIVNNTVYDPLQPELDSFKEELDKYFKNHTSPDVDLGDISGINASVVNIQKEIDRLNEVAKNLNESLIDLQELGKYEQYIKGGGSGGGQIYEGKLTAEGLRFGIVASRFNHALVDRLVEGAIDAIVRHGGREEDITLVRVPGSWEIPVAAGELARKEDIDAVIAIGVLIRGATPHFDYIASEVSKGLADLSLELRKPITFGVITADTLEQAIERAGTKHGNKGWEAALSAIEMANLFKSLR

SEQ ID NO: 3920 - protein, 1371 aa, Artificial Sequence
  SARS-CoV-2/France/HF1805/2020__EPI_ISL_414628 spike protein (1-1211)(K986P_V987P_ H1048Q_H1064N_ H1083N_H1101N) LumSynth construct
MFVFLVLLPLVSSQCVNLTTRTQLPPAYTNSFTRGVYYPDKVFRSSVLHSTQDLFLPFFSNVTWFHAIHVSGTNGTKRFDNPVLPFNDGVYFASTEKSNIIRGWIFGTTLDSKTQSLLIVNNATNVVIKVCEFQFCNDPFLGVYYHKNNKSWMESEFRVYSSANNCTFEYVSQPFLMDLEGKQGNFKNLREFVFKNIDGYFKIYSKHTPINLVRDLPQGFSALEPLVDLPIGINITRFQTLLALHRSYLTPGDSSSGWTAGAAAYYVGYLQPRTFLLKYNENGTITDAVDCALDPLSETKCTLKSFTVEKGIYQTSNFRVQPTESIVRFPNITNLCPFGEVFNATRFASVYAWNRKRISNCVADYSVLYNSASFSTFKCYGVSPTKLNDLCFTNVYADSFVIRGDEVRQIAPGQTGKIADYNYKLPDDFTGCVIAWNSNNLDSKVGGNYNYLYRLFRKSNLKPFERDISTEIYQAGSTPCNGVEGFNCYFPLQSYGFQPTNGVGYQPYRVVVLSFELLHAPATVCGPKKSTNLVKNKCVNFNFNGLTGTGVLTESNKKFLPFQQFGRDIADTTDAVRDPQTLEILDITPCSFGGVSVITPGTNTSNQVAVLYQGVNCTEVPVAIHADQLTPTWRVYSTGSNVFQTRAGCLIGAEHVNNSYECDIPIGAGICASYQTQTNSPRRARSVASQSIIAYTMSLGAENSVAYSNNSIAIPTNFTISVTTEILPVSMTKTSVDCTMYICGDSTECSNLLLQYGSFCTQLNRALTGIAVEQDKNTQEVFAQVKQIYKTPPIKDFGGFNFSQILPDPSKPSKRSFIEDLLFNKVTLADAGFIKQYGDCLGDIAARDLICAQKFNGLTVLPPLLTDEMIAQYTSALLAGTITSGWTFGAGAALQIPFAMQMAYRFNGIGVTQNVLYENQKLIANQFNSAIGKIQDSLSSTASALGKLQDVVNQNAQALNTLVKQLSSNFGAISSVLNDILSRLDPPEAEVQIDRLITGRLQSLQTYVTQQLIRAAEIRASANLAATKMSECVLGQSKRVDFCGKGYQLMSFPQSAPHGVVFLNVTYVPAQEKNFTTAPAICNDGKAHFPREGVFVSNGTNWFVTQRNFYEPQIITTDNTFVSGNCDVVIGVVNNTVYDPLQPELDSFKEELDKYFKNHTSPDVDLGDISGINASVVNIQKEIDRLNEVAKNLNESLIDLQELGKYEQYIKGGGSGGGQIYEGKLTAEGLRFGIVASRFNHALVDRLVEGAIDAIVRHGGREEDITLVRVPGSWEIPVAAGELARKEDIDAVIAIGVLIRGATPHFDYIASEVSKGLADLSLELRKPITFGVITADTLEQAIERAGTKHGNKGWEAALSAIEMANLFKSLR

SEQ ID NO: 3921 - protein, 1371 aa, Artificial Sequence
  SARS-CoV-2/Netherlands/ZuidHolland_9/2020__EPI_ISL_414445 spike protein (1-1211)(K986P_V987P_ H1048Q_H1064N_ H1083N_H1101N) LumSynth construct
MFVFLVLLPLVSSQCVNLTTRTQLPPAYTNSFTRGVYYPDKVFRSSVLHSTQDLFLPFFSNVTWFHAIHVSGTNGTKRFDNPVLPFNDGVYFASTEKSNIIRGWIFGTTLDSKTQSLLIVNNATNVVIKVCEFQFCNDPFLGVYYHKNNKSWMESEFRVYSSANNCTFEYVSQPFLMDLEGKQGNFKNLREFVFKNIDGYFKIYSKHTPINLVRDLPQGFSALEPLVDLPIGINITRFQTLLALHRSYLTPGDSSSGWTAGAAAYYVGYLQPRTFLLKYNENGTITDAVDCALDPLSETKCTLKSFTVEKGIYQTSNFRVQPTESIVRFPNITNLCPFGEVFNATRFASVYAWNRKRISNCVADYSVLYNSASFSTFKCYGVSPTKLNDLCFTNVYADSFVIRGDEVRQIAPGQTGKIADYNYKLPDDFTGCVIAWNSNNLDSKVGGNYNYLYRLFRKSNLKPFERDISTEIYQAGSTPCNGVEGFNCYFPLQSYGFQPTNGVGYQPYRVVVLSFELLHAPATVCGPKKSTNLVKNKCVNFNFNGLTGTGVLTESNKKFLPFQQFGRDIADTTDAVRDPQTLEILDITPCSFGGVSVITPGTNTSNQVAVLYQGVNCTEVPVAIHADQLTPTWRVYSTGSNVFQTRAGCLIGAEHVNNSYECDIPIGAGICASYQTQTNSPRRARSVASQSIIAYTMSLGAENSVAYSNNSIAIPTNFTISVTTEILPVSMTKTSVDCTMYICGDSTECSNLLLQYGSFCTQLNRALTGIAVEQDKNTQEVFAQVKQIYKTPPIKDFGGFNFSQILPDPSKPSKRSFIEDLLFNKVTLADAGFIKQYGDCLGDIAARDLICVQKFNGLTVLPPLLTDEMIAQYTSALLAGTITSGWTFGAGAALQIPFAMQMAYRFNGIGVTQNVLYENQKLIANQFNSAIGKIQDSLSSTASALGKLQDVVNQNAQALNTLVKQLSSNFGAISSVLNDILSRLDPPEAEVQIDRLITGRLQSLQTYVTQQLIRAAEIRASANLAATKMSECVLGQSKRVDFCGKGYQLMSFPQSAPHGVVFLNVTYVPAQEKNFTTAPAICNDGKAHFPREGVFVSNGTNWFVTQRNFYEPQIITTDNTFVSGNCDVVIGIVNNTVYDPLQPELDSFKEELDKYFKNHTSPDVDLGDISGINASVVNIQKEIDRLNEVAKNLNESLIDLQELGKYEQYIKGGGSGGGQIYEGKLTAEGLRFGIVASRFNHALVDRLVEGAIDAIVRHGGREEDITLVRVPGSWEIPVAAGELARKEDIDAVIAIGVLIRGATPHFDYIASEVSKGLADLSLELRKPITFGVITADTLEQAIERAGTKHGNKGWEAALSAIEMANLFKSLR

SEQ ID NO: 3922 - protein, 1371 aa, Artificial Sequence
  SARS-CoV-2/Finland/FIN03032020A/2020__EPI_ISL_413602 spike protein (1-1211)(K986P_V987P_ H1048Q_H1064N_ H1083N_H1101N) LumSynth construct
MFVFLVLLPLVSSQCVNLTTRTQLPPAYTNSFTRGVYYPDKVFRSSVLHSTQDLFLPFFSNVTWFHAIHVSGTNGTKRFDNPVLPFNDGVYFASTEKSNIIRGWIFGTTLDSKTQSLLIVNNATNVVIKVCEFQFCNDPFLGVYYHKNNKSWMESEFRVYSSANNCTFEYVSQPFLMDLEGKQGNFKNLREFVFKNIDGYFKIYSKHTPINLVRDLPQGFSALEPLVDLPIGINITRFQTLLALHRSYLTPGDSSSGWTAGAAAYYVGYLQPRTFLLKYNENGTITDAVDCALDPLSETKCTLKSFTVEKGIYQTSNFRVQPTESIVRFPNITNLCPFGEVFNATRFASVYAWNRKRISNCVADYSVLYNSASFSTFKCYGVSPTKLNDLCFTNVYADSFVIRGDEVRQIAPGQTGKIADYNYKLPDDFTGCVISWNSNNLDSKVGGNYNYLYRLFRKSNLKPFERDISTEIYQAGSTPCNGVEGFNCYFPLQSYGFQPTNGVGYQPYRVVVLSFELLHAPATVCGPKKSTNLVKNKCVNFNFNGLTGTGVLTESNKKFLPFQQFGRDIADTTDAVRDPQTLEILDITPCSFGGVSVITPGTNTSNQVAVLYQGVNCTEVPVAIHADQLTPTWRVYSTGSNVFQTRAGCLIGAEHVNNSYECDIPIGAGICASYQTQTNSPRRARSVASQSIIAYTMSLGAENSVAYSNNSIAIPTNFTISVTTEILPVSMTKTSVDCTMYICGDSTECSNLLLQYGSFCTQLNRALTGIAVEQDKNTQEVFAQVKQIYKTPPIKDFGGFNFSQILPDPSKPSKRSFIEDLLFNKVTLADAGFIKQYGDCLGDIAARDLICAQKFNGLTVLPPLLTDEMIAQYTSALLAGTITSGWTFGAGAALQIPFAMQMAYRFNGIGVTQNVLYENQKLIANQFNSAIGKIQDSLSSTASALGKLQDVVNQNAQALNTLVKQLSSNFGAISSVLNDILSRLDPPEAEVQIDRLITGRLQSLQTYVTQQLIRAAEIRASANLAATKMSECVLGQSKRVDFCGKGYQLMSFPQSAPHGVVFLNVTYVPAQEKNFTTAPAICNDGKAHFPREGVFVSNGTNWFVTQRNFYEPQIITTDNTFVSGNCDVVIGIVNNTVYDPLQPELDSFKEELDKYFKNHTSPDVDLGDISGINASVVNIQKEIDRLNEVAKNLNESLIDLQELGKYEQYIKGGGSGGGQIYEGKLTAEGLRFGIVASRFNHALVDRLVEGAIDAIVRHGGREEDITLVRVPGSWEIPVAAGELARKEDIDAVIAIGVLIRGATPHFDYIASEVSKGLADLSLELRKPITFGVITADTLEQAIERAGTKHGNKGWEAALSAIEMANLFKSLR

SEQ ID NO: 3923 - protein, 1371 aa, Artificial Sequence
  SARS-CoV-2/France/GE1977/2020__EPI_ISL_414632 spike protein (1-1211)(K986P_V987P_ H1048Q_H1064N_ H1083N_H1101N) LumSynth construct
MFVFLVLLPLVSSQCVNLTTRTQLPPAYTNSFTRGVYYPDKVFRSSVLHSTQDLFLPFFSNVTWFHAIHVSGTNGTKRFDNPVLPFNDGVYFASTEKSNIIRGWIFGTTLDSKTQSLLIVNNATNVVIKVCEFQFCNDPFLGVYYHKNNKSWMESEFRVYSSANNCTFEYVSQPFLMDLEGKQGNFKNLREFVFKNIDGYFKIYSKHTPINLVRDLPQGFSALEPLVDLPIGINITRFQTLLALHRSYLTPGDSSSGWTAGAAAYYVGYLQPRTFLLKYNENGTITDAVDCALDPLSETKCTLKSFTVEKGIYQTSNFRVQPTESIVRFPNITNLCPFGEVFNATRFASVYAWNRKRISNCVADYSVLYNSASFSTFKCYGVSPTKLNDLCFTNVYADSFVIRGDEVRQIAPGQTGKIADYNYKLPDDFTGCVIAWNSNNLDSKVGGNYNYLYRLFRKSNLKPFERDISTEIYQAGSTPCNGVEGFNCYFPLQSYGFQPTNGVGYQPYRVVVLSFELLHAPATVCGPKKSTNLVKNKCVNFNFNGLTGTGVLTESNKKFLPFQQFGRDIADTTDAVRDPQTLEILDITPCSFGGVSVITPGTNTSNQVAVLYQGVNCTEVPVAIHADQLTPTWRVYSTGSNVFQTRAGCLIGAEHVNNSYECDIPIGAGICASYQTQTNSPRRARSVASQSIIAYTMSLGAENSVAYSNNSIAIPTNFTISVTTEILPVSMTKTSVDCTMYICGDSTECSNLLLQYGSFCTQLNRALTGIAVEQDKNTQEVFAQVKQIYKTPPIKDFGGFNFSQILPDPSKPSKRSFIEDLLFNKVTLADAGFIKQYGDCLGDIAARDLICAQKFNGLTVLPPLLTDEMIAQYTSALLAGTITSGWTFGAGAALQIPFAMQMAYRFNGIGVTQNVLYENQKLIANQFNSAIGKIQDSLFSTASALGKLQDVVNQNAQALNTLVKQLSSNFGAISSVLNDILSRLDPPEAEVQIDRLITGRLQSLQTYVTQQLIRAAEIRASANLAATKMSECVLGQSKRVDFCGKGYQLMSFPQSAPHGVVFLNVTYVPAQEKNFTTAPAICNDGKAHFPREGVFVSNGTNWFVTQRNFYEPQIITTDNTFVSGNCDVVIGIVNNTVYDPLQPELDSFKEELDKYFKNHTSPDVDLGDISGINASVVNIQKEIDRLNEVAKNLNESLIDLQELGKYEQYIKGGGSGGGQIYEGKLTAEGLRFGIVASRFNHALVDRLVEGAIDAIVRHGGREEDITLVRVPGSWEIPVAAGELARKEDIDAVIAIGVLIRGATPHFDYIASEVSKGLADLSLELRKPITFGVITADTLEQAIERAGTKHGNKGWEAALSAIEMANLFKSLR

SEQ ID NO: 3924 - protein, 1371 aa, Artificial Sequence
  SARS-CoV-2/Finland/FIN-313/2020__EPI_ISL_414641 spike protein (1-1211)(K986P_V987P_ H1048Q_H1064N_ H1083N_H1101N) LumSynth construct
MFVFLVLLPLVSSQCVNLTTRTQLPPAYTNSFTRGVYYPDKVFRSSVLHSTQDLFLPFFSNVTWFHAIHVSGTNGTKRFDNPVLPFNDGVYFASTEKSNIIRGWIFGTTLDSKTQSLLIVNNATNVVIKVCEFQFCNDPFLGVYYHKNNKSWMESEFRVYSSANNCTFEYVSQPFLMDLEGKQGNFKNLREFVFKNIDGYFKIYSKHTPINLVRDLPQGFSALEPLVDLPIGINITRFKTLLALHRSYLTPGDSSSGWTAGAAAYYVGYLQPRTFLLKYNENGTITDAVDCALDPLSETKCTLKSFTVEKGIYQTSNFRVQPTESIVRFPNITNLCPFGEVFNATRFASVYAWNRKRISNCVADYSVLYNSASFSTFKCYGVSPTKLNDLCFTNVYADSFVIRGDEVRQIAPGQTGKIADYNYKLPDDFTGCVIAWNSNNLDSKVGGNYNYLYRLFRKSNLKPFERDISTEIYQAGSTPCNGVEGFNCYFPLQSYGFQPTNGVGYQPYRVVVLSFELLHAPATVCGPKKSTNLVKNKCVNFNFNGLTGTGVLTESNKKFLPFQQFGRDIADTTDAVRDPQTLEILDITPCSFGGVSVITPGTNTSNQVAVLYQGVNCTEVPVAIHADQLTPTWRVYSTGSNVFQTRAGCLIGAEHVNNSYECDIPIGAGICASYQTQTNSPRRARSVASQSIIAYTMSLGAENSVAYSNNSIAIPTNFTISVTTEILPVSMTKTSVDCTMYICGDSTECSNLLLQYGSFCTQLNRALTGIAVEQDKNTQEVFAQVKQIYKTPPIKDFGGFNFSQILPDPSKPSKRSFIEDLLFNKVTLADAGFIKQYGDCLGDIAARDLICAQKFNGLTVLPPLLTDEMIAQYTSALLAGTITSGWTFGAGAALQIPFAMQMAYRFNGIGVTQNVLYENQKLIANQFNSAIGKIQDSLSSTASALGKLQDVVNQNAQALNTLVKQLSSNFGAISSVLNDILSRLDPPEAEVQIDRLITGRLQSLQTYVTQQLIRAAEIRASANLAATKMSECVLGQSKRVDFCGKGYQLMSFPQSAPHGVVFLNVTYVPAQEKNFTTAPAICNDGKAHFPREGVFVSNGTNWFVTQRNFYEPQIITTDNTFVSGNCDVVIGIVNNTVYDPLQPELDSFKEELDKYFKNHTSPDVDLGDISGINASVVNIQKEIDRLNEVAKNLNESLIDLQELGKYEQYIKGGGSGGGQIYEGKLTAEGLRFGIVASRFNHALVDRLVEGAIDAIVRHGGREEDITLVRVPGSWEIPVAAGELARKEDIDAVIAIGVLIRGATPHFDYIASEVSKGLADLSLELRKPITFGVITADTLEQAIERAGTKHGNKGWEAALSAIEMANLFKSLR

SEQ ID NO: 3925 - protein, 1371 aa, Artificial Sequence
  SARS-CoV-2/Netherlands/ZuidHolland_2/2020__EPI_ISL_414556 spike protein (1-1211)(K986P_V987P_ H1048Q_H1064N_ H1083N_H1101N) LumSynth construct
MFVFLVLLPLVSSQCVNLTTRTQLPPAYTNSFTRGVYYPDKVFRSSVLHSTQDLFLPFFSNVTWFHAIHVSGTNGTKRFDNPVLPFNDGVYFASTEKSNIIRGWIFGTTLDSKTQSLLIVNNATNVVIKVCEFQFCNDPFLGVYYHKNNKSWMESEFRVYSSANNCTFEYVSQPFLMDLEGKQGNFKNLREFVFKNIDGYFKIYSKHTPINLVRDLPQGFSALEPLVDLPIGINITRFQTLLALHRSYLTPGDSSSGWTAGAAAYYVGYLQPRTFLLKYNENGTITDAVDCALDPLSETKCTLKSFTVEKGIYQTSNFRVQPTESIVRFPNITNLCPFGEVFNATRFASVYAWNRKRISNCVADYSVLYNSASFSTFKCYGVSPTKLNDLCFTNVYADSFVIRGDEVRQIAPGQTGKIADYNYKLPDDFTGCVIAWNSNNLDSKVGGNYNYLYRLFRKSNLKPFERDISTEIYQAGSTPCNGVEGFNCYFPLQSYGFQPTNGVGYQPYRVVVLSFELLHAPATVCGPKKSTNLVKNKCVNFNFNGLTGTGVLTESNKKFLPFQQFGRDIADTTDAVRDPQTLEILDITPCSFGGVSVITPGTNTSNQVAVLYQGVNCTEVPVAIHADQLTPTWRVYSTGSNVFQTRAGCLIGAEHVNNSYECDIPIGAGICASYQTQTNSPRRARSVASQSIIAYTMSLGAENSVAYSNNSIAIPTNFTISVTTEILPVSMTKTSVDCTMYICGDSTECSNLLLQYGSFCTQLNRALTGIALEQDKNTQEVFAQVKQIYKTPPIKDFGGFNFSQILPDPSKPSKRSFIEDLLFNKVTLADAGFIKQYGDCLGDIAARDLICAQKFNGLTVLPPLLTDEMIAQYTSALLAGTITSGWTFGAGAALQIPFAMQMAYRFNGIGVTQNVLYENQKLIANQFNSAIGKIQDSLSSTASALGKLQDVVNQNAQALNTLVKQLSSNFGAISSVLNDILSRLDPPEAEVQIDRLITGRLQSLQTYVTQQLIRAAEIRASANLAATKMSECVLGQSKRVDFCGKGYQLMSFPQSAPHGVVFLNVTYVPAQEKNFTTAPAICNDGKAHFPREGVFVSNGTNWFVTQRNFYEPQIITTDNTFVSGNCDVVIGIVNNTVYDPLQPELDSFKEELDKYFKNHTSPDVDLGDISGINASVVNIQKEIDRLNEVAKNLNESLIDLQELGKYEQYIKGGGSGGGQIYEGKLTAEGLRFGIVASRFNHALVDRLVEGAIDAIVRHGGREEDITLVRVPGSWEIPVAAGELARKEDIDAVIAIGVLIRGATPHFDYIASEVSKGLADLSLELRKPITFGVITADTLEQAIERAGTKHGNKGWEAALSAIEMANLFKSLR

SEQ ID NO: 3926 - protein, 1371 aa, Artificial Sequence
  SARS-CoV-2/USA/WA-UW31/2020__EPI_ISL_414618 spike protein (1-1211)(K986P_V987P_ H1048Q_H1064N_ H1083N_H1101N) LumSynth construct
MFVFLVLLPLVSSQCVNLTTRTQLPPAYTNSFTRGVYYPDKVFRSSVLHSTQDLFLPFFSNVTWFHAIHVSGTNGTKRFDNPVLPFNDGVYFASTEKSNIIRGWIFGTTLDSKTQSLLIVNNATNVVIKVCEFQFCNDPFLGVYYHKNNKSWMESEFRVYSSANNCTFEYVSQPFLMDLEGKQGNFKNLREFVFKNIDGYFKIYSKHTPINLVRDLPQGFSALEPLVDLPIGINITRFQTLLALHRSYLTPGDSSSGWTAGAAAYYVGYLQPRTFLLKYNENGTITDAVDCALDPLSETKCTLKSFTVEKGIYQTSNFRVQPTESIVRFPNITNLCPFGEVFNATRFASVYAWNRKRISNCVADYSVLYNSASFSTFKCYGVSPTKLNDLCFTNVYADSFVIRGDEVRQIAPGQTGKIADYNYKLPDDFTGCVIAWNSNNLDSKVGGNYNYLYRLFRKSNLKPFERDISTEIYQAGSTPCNGAEGFNCYFPLQSYGFQPTNGVGYQPYRVVVLSFELLHAPATVCGPKKSTNLVKNKCVNFNFNGLTGTGVLTESNKKFLPFQQFGRDIADTTDAVRDPQTLEILDITPCSFGGVSVITPGTNTSNQVAVLYQDVNCTEVPVAIHADQLTPTWRVYSTGSNVFQTRAGCLIGAEHVNNSYECDIPIGAGICASYQTQTNSPRRARSVASQSIIAYTMSLGAENSVAYSNNSIAIPTNFTISVTTEILPVSMTKTSVDCTMYICGDSTECSNLLLQYGSFCTQLNRALTGIAVEQDKNTQEVFAQVKQIYKTPPIKDFGGFNFSQILPDPSKPSKRSFIEDLLFNKVTLADAGFIKQYGDCLGDIAARDLICAQKFNGLTVLPPLLTDEMIAQYTSALLAGTITSGWTFGAGAALQIPFAMQMAYRFNGIGVTQNVLYENQKLIANQFNSAIGKIQDSLSSTASALGKLQDVVNQNAQALNTLVKQLSSNFGAISSVLNDILSRLDPPEAEVQIDRLITGRLQSLQTYVTQQLIRAAEIRASANLAATKMSECVLGQSKRVDFCGKGYQLMSFPQSAPHGVVFLNVTYVPAQEKNFTTAPAICNDGKAHFPREGVFVSNGTNWFVTQRNFYEPQIITTDNTFVSGNCDVVIGIVNNTVYDPLQPELDSFKEELDKYFKNHTSPDVDLGDISGINASVVNIQKEIDRLNEVAKNLNESLIDLQELGKYEQYIKGGGSGGGQIYEGKLTAEGLRFGIVASRFNHALVDRLVEGAIDAIVRHGGREEDITLVRVPGSWEIPVAAGELARKEDIDAVIAIGVLIRGATPHFDYIASEVSKGLADLSLELRKPITFGVITADTLEQAIERAGTKHGNKGWEAALSAIEMANLFKSLR

SEQ ID NO: 3927 - protein, 1371 aa, Artificial Sequence
  SARS-CoV-2/South Korea/SNU01/2020__EPI_ISL_411929 spike protein (1-1211)(K986P_V987P_ H1048Q_H1064N_ H1083N_H1101N) LumSynth construct
MFVFLVLLPLVSSQCVNLTTRTQLPPAYTNSFTRGVYYPDKVFRSSVLHSTQDLFLPFFSNVTWFHAIHVSGTNGTKRFDNPVLPFNDGVYFASTEKSNIIRGWIFGTTLDSKTQSLLIVNNATNVVIKVCEFQFCNDPFLGVYYHKNNKSWMESEFRVYSSANNCTFEYVSQPFLMDLEGKQGNFKNLREFVFKNIDGYFKIYSKHTPINLVRDLPQGFWALEPLVDLPIGINITRFQTLLALHRSYLTPGDSSSGWTAGAAAYYVGYLQPRTFLLKYNENGTITDAVDCALDPLSETKCTLKSFTVEKGIYQTSNFRVQPTESIVRFPNITNLCPFGEVFNATRFASVYAWNRKRISNCVADYSVLYNSASFSTFKCYGVSPTKLNDLCFTNVYADSFVIRGDEVRQIAPGQTGKIADYNYKLPDDFTGCVIAWNSNNLDSKVGGNYNYLYRLFRKSNLKPFERDISTEIYQAGSTPCNGVEGFNCYFPLQSYGFQPTNGVGYQPYRVVVLSFELLHAPATVCGPKKSTNLVKNKCVNFNFNGLTGTGVLTESNKKFLPFQQFGRDIADTTDAVRDPQTLEILDITPCSFGGVSVITPGTNTSNQVAVLYQDVNCTEVPVAIHADQLTPTWRVYSTGSNVFQTRAGCLIGAEHVNNSYECDIPIGAGICASYQTQTNSPRRARSVASQSIIAYTMSLGAENSVAYSNNSIAIPTNFTISVTTEILPVSMTKTSVDCTMYICGDSTECSNLLLQYGSFCTQLNRALTGIAVEQDKNTQEVFAQVKQIYKTPPIKDFGGFNFSQILPDPSKPSKRSFIEDLLFNKVTLADAGFIKQYGDCLGDIAARDLICAQKFNGLTVLPPLLTDEMIAQYTSALLAGTITSGWTFGAGAALQIPFAMQMAYRFNGIGVTQNVLYENQKLIANQFNSAIGKIQDSLSSTASALGKLQDVVNQNAQALNTLVKQLSSNFGAISSVLNDILSRLDPPEAEVQIDRLITGRLQSLQTYVTQQLIRAAEIRASANLAATKMSECVLGQSKRVDFCGKGYQLMSFPQSAPHGVVFLNVTYVPAQEKNFTTAPAICNDGKAHFPREGVFVSNGTNWFVTQRNFYEPQIITTDNTFVSGNCDVVIGIVNNTVYDPLQPELDSFKEELDKYFKNHTSPDVDLGDISGINASVVNIQKEIDRLNEVAKNLNESLIDLQELGKYEQYIKGGGSGGGQIYEGKLTAEGLRFGIVASRFNHALVDRLVEGAIDAIVRHGGREEDITLVRVPGSWEIPVAAGELARKEDIDAVIAIGVLIRGATPHFDYIASEVSKGLADLSLELRKPITFGVITADTLEQAIERAGTKHGNKGWEAALSAIEMANLFKSLR

SEQ ID NO: 3928 - protein, 1371 aa, Artificial Sequence
  SARS-CoV-2/China/WF0004/2020__EPI_ISL_413694 spike protein (1-1211)(K986P_V987P_ H1048Q_H1064N_ H1083N_H1101N) LumSynth construct
MFVFLVLLPLVSSQCVNLTTRTQLPPAYTNSFTRGVYYPDKVFRSSVLHSTQDLFLPFFSNVTWFHAIHVSGTNGTKRFDNPVLPFNDGVYFASTEKSNIIRGWIFGTTLDSKTQSLLIVNNATNVVIKVCEFQFCNDPFLGVYYHKNNKSWTESEFRVYSSANNCTFEYVSQPFLMDLEGKQGNFKNLREFVFKNIDGYFKIYSKHTPINLVRDLPQGFSALEPLVDLPIGINITRFQTLLALHRSYLTPGDSSSGWTAGAAAYYVGYLQPRTFLLKYNENGTITDAVDCALDPLSETKCTLKSFTVEKGIYQTSNFRVQPTESIVRFPNITNLCPFGEVFNATRFASVYAWNRKRISNCVADYSVLYNSASFSTFKCYGVSPTKLNDLCFTNVYADSFVIRGDEVRQIAPGQTGKIADYNYKLPDDFTGCVIAWNSNNLDSKVGGNYNYLYRLFRKSNLKPFERDISTEIYQAGSTPCNGVEGFNCYFPLQSYGFQPTNGVGYQPYRVVVLSFELLHAPATVCGPKKSTNLVKNKCVNFNFNGLTGTGVLTESNKKFLPFQQFGRDIADTTDAVRDPQTLEILDITPCSFGGVSVITPGTNTSNQVAVLYQDVNCTEVPVAIHADQLTPTWRVYSTGSNVFQTRAGCLIGAEHVNNSYECDIPIGAGICASYQTQTNSPRRARSVASQSIIAYTMSLGAENSVAYSNNSIAIPTNFTISVTTEILPVSMTKTSVDCTMYICGDSTECSNLLLQYGSFCTQLNRALTGIAVEQDKNTQEVFAQVKQIYKTPPIKDFGGFNFSQILPDPSKPSKRSFIEDLLFNKVTLADAGFIKQYGDCLGDIAARDLICAQKFNGLTVLPPLLTDEMIAQYTSALLAGTITSGWTFGAGAALQIPFAMQMAYRFNGIGVTQNVLYENQKLIANQFNSAIGKIQDSLSSTASALGKLQDVVNQNAQALNTLVKQLSSNFGAISSVLNDILSRLDPPEAEVQIDRLITGRLQSLQTYVTQQLIRAAEIRASANLAATKMSECVLGQSKRFDFCGKGYQLMSFPQSAPHGVVFLNVTYVPAQEKNFTTAPAICNDGKAHFPREGVFVSNGTNWFVTQRNFYEPQIITTDNTFVSGNCDVVIGIVNNTVYDPLQPELDSFKEELDKYFKNHTSPDVDLGDISGINASVVNIQKEIDRLNEVAKNLNESLIDLQELGKYEQYIKGGGSGGGQIYEGKLTAEGLRFGIVASRFNHALVDRLVEGAIDAIVRHGGREEDITLVRVPGSWEIPVAAGELARKEDIDAVIAIGVLIRGATPHFDYIASEVSKGLADLSLELRKPITFGVITADTLEQAIERAGTKHGNKGWEAALSAIEMANLFKSLR

SEQ ID NO: 3929 - protein, 1371 aa, Artificial Sequence
  SARS-CoV-2/China/WF0028/2020__EPI_ISL_413791 spike protein (1-1211)(K986P_V987P_ H1048Q_H1064N_ H1083N_H1101N) LumSynth construct
MFVFLVLLPLVSSQCVNLTTRTQLPPAYTNSFTRGVYYPDKVFRSSVLHSTQDLFLPFFSNVTWFHAIHVSGTNGTKRFDNPVLPFNDGVYFASTEKSNIIRGWIFGTTLDSKTQSLLIVNNATNVVIKVCEFQFCNDPFLGVYYHKNNKSWMESEFRVYSSANNCTFEYVSQPFLMDLEGKQGNFKNLREFVFKNIDGYFKIYSKHTPINLVRDLPQGFSALEPLVDLPIGINITRFQTLLALHRSYLTPGDSSSGWTAGAAAYYVGYLQPRTFLLKYNENGTITDAVDCALDPLSETKCTLKSFTVEKGIYQTSNFRVQPTESIVRFPNITNLCPFGEVFNATRFASVYAWNRKRISNCVADYSVLYNSASFSTFKCYGVSPTKLNDLCFTNVYADSFVIRGDEVRQIAPGQTGKIADYNYKLPDDFTGCVIAWNSNNLDSKVGGNYNYLYRLFRKSNLKPFERDISTEIYQAGSTPCNGVEGFNCYFPLQSYGFQPTNGVGYQPYRVVVLSFELLHAPATVCGPKKSTNLVKNKCVNFNFNGLTGTGVLTESNKKFLPFQQFGRDIADTTDAVRDPQTLEILDITPCSFGGVSVITPGTNTSNQVAVLYQDVNCTEVPVAIHADQLTPTWRVYSTGSNVFQTRAGCLIGAEHVNNSYECDIPIGAGICASYQTQTNSPRRARSVASQSIIAYTMSLGAENSVAYSNNSIAIPTNFTISVTTEILPVSMTKTSVDCTMYICGDSTECSNLLLQYGSFCTQLNRALTGIAVEQDKNTQEVFAQVKQIYKTPPIKDFGGFNFSQILPDPSKPSKRSFIEDLLFNKVTLADAGFIKQYGDCLGDIAARDLICAQKFNGLTVLPPLLTDEMIAQYTSALLAGTITSGWTFGAGAALQIPFAMQMAYRFNGIGVTQNVLYENQKLIANQFNSAIGKIQDSLSSTASALGKLQDVVNQNAQALNTLVKQLSSNFGAISSVLNDILSRLDPPEAEVQIDRLITGRLQSLQTYVTQQLIRAAEIRASANLAATKMSECVLGQSKRVDFCGKGYQLMSFPQSAPHGVVFLNVTYVPAQEKNFTTAPAICNDGKAHFPREGVFVSNGTNWFVTQRNFYEPQIITTDNTFVSGNCDVVIGIVNNTVYDPLQPELESFKEELDKYFKNHTSPDVDLGDISGINASVVNIQKEIDRLNEVAKNLNESLIDLQELGKYEQYIKGGGSGGGQIYEGKLTAEGLRFGIVASRFNHALVDRLVEGAIDAIVRHGGREEDITLVRVPGSWEIPVAAGELARKEDIDAVIAIGVLIRGATPHFDYIASEVSKGLADLSLELRKPITFGVITADTLEQAIERAGTKHGNKGWEAALSAIEMANLFKSLR

SEQ ID NO: 3930 - protein, 1371 aa, Artificial Sequence
  SARS-CoV-2/2019-nCoV/USA-CruiseA-18/2020__MT159716.1 spike protein (1-1211)(K986P_V987P_ H1048Q_H1064N_ H1083N_H1101N) LumSynth construct
MFVFLVLLPLVSSQCVNLTTRTQLPPAYTNSFTRGVYYPDKVFRSSVLHSTQDLFLPFFSNVTWFHAIHVSGTNGTKRFDNPVLPFNDGVYFASTEKSNIIRGWIFGTTLDSKTQSLLIVNNATNVVIKVCEFQFCNDPFLGVYYHKNNKSWMESELRVYSSANNCTFEYVSQPFLMDLEGKQGNFKNLREFVFKNIDGYFKIYSKHTPINLVRDLPQGFSALEPLVDLPIGINITRFQTLLALHRSYLTPGDSSSGWTAGAAAYYVGYLQPRTFLLKYNENGTITDAVDCALDPLSETKCTLKSFTVEKGIYQTSNFRVQPTESIVRFPNITNLCPFGEVFNATRFASVYAWNRKRISNCVADYSVLYNSASFSTFKCYGVSPTKLNDLCFTNVYADSFVIRGDEVRQIAPGQTGKIADYNYKLPDDFTGCVIAWNSNNLDSKVGGNYNYLYRLFRKSNLKPFERDISTEIYQAGSTPCNGVEGFNCYFPLQSYGFQPTNGVGYQPYRVVVLSFELLHAPATVCGPKKSTNLVKNKCVNFNFNGLTGTGVLTESNKKFLPFQQFGRDIADTTDAVRDPQTLEILDITPCSFGGVSVITPGTNTSNQVAVLYQDVNCTEVPVAIHADQLTPTWRVYSTGSNVFQTRAGCLIGAEHVNNSYECDIPIGAGICASYQTQTNSPRRARSVASQSIIAYTMSLGAENSVAYSNNSIAIPTNFTISVTTEILPVSMTKTSVDCTMYICGDSTECSNLLLQYGSFCTQLNRALTGIAVEQDKNTQEVFAQVKQIYKTPPIKDFGGFNFSQILPDPSKPSKRSFIEDLLFNKVTLADAGFIKQYGDCLGDIAARDLICAQKFNGLTVLPPLLTDEMIAQYTSALLAGTITSGWTFGAGAALQIPFAMQMAYRFNGIGVTQNVLYENQKLIANQFNSAIGKIQDSLSSTASALGKLQDVVNQNAQALNTLVKQLSSNFGAISSVLNDILSRLDPPEAEVQIDRLITGRLQSLQTYVTQQLIRAAEIRASANLAATKMSECVLGQSKRVDFCGKGYQLMSFPQSAPHGVVFLNVTYVPAQEKNFTTAPAICNDGKAHFPREGVFVSNGTNWFVTQRNFYEPQIITTDNTFVSGNCDVVIGIVNNTVYDPLQPELDSFKEELDKYFKNHTSPDVDLGDISGINASVVNIQKEIDRLNEVAKNLNESLIDLQELGKYEQYIKGGGSGGGQIYEGKLTAEGLRFGIVASRFNHALVDRLVEGAIDAIVRHGGREEDITLVRVPGSWEIPVAAGELARKEDIDAVIAIGVLIRGATPHFDYIASEVSKGLADLSLELRKPITFGVITADTLEQAIERAGTKHGNKGWEAALSAIEMANLFKSLR

SEQ ID NO: 3931 - protein, 1371 aa, Artificial Sequence
  SARS-CoV-2/SARS-CoV-2/Yunnan-01/human/2020/CHN__MT049951.1 spike protein (1-1211)(K986P_V987P_ H1048Q_H1064N_ H1083N_H1101N) LumSynth construct
MFVFLVLLPLVSSQCVNLTTRTQLPPANTNSFTRGVYYPDKVFRSSVLHSTQDLFLPFFSNVTWFHAIHVSGTNGTKRFDNPVLPFNDGVYFASTEKSNIIRGWIFGTTLDSKTQSLLIVNNATNVVIKVCEFQFCNDPFLGVYYHKNNKSWMESEFRVYSSANNCTFEYVSQPFLMDLEGKQGNFKNLREFVFKNIDGYFKIYSKHTPINLVRDLPQGFSALEPLVDLPIGINITRFQTLLALHRSYLTPGDSSSGWTAGAAAYYVGYLQPRTFLLKYNENGTITDAVDCALDPLSETKCTLKSFTVEKGIYQTSNFRVQPTESIVRFPNITNLCPFGEVFNATRFASVYAWNRKRISNCVADYSVLYNSASFSTFKCYGVSPTKLNDLCFTNVYADSFVIRGDEVRQIAPGQTGKIADYNYKLPDDFTGCVIAWNSNNLDSKVGGNYNYLYRLFRKSNLKPFERDISTEIYQAGSTPCNGVEGFNCYFPLQSYGFQPTNGVGYQPYRVVVLSFELLHAPATVCGPKKSTNLVKNKCVNFNFNGLTGTGVLTESNKKFLPFQQFGRDIADTTDAVRDPQTLEILDITPCSFGGVSVITPGTNTSNQVAVLYQDVNCTEVPVAIHADQLTPTWRVYSTGSNVFQTRAGCLIGAEHVNNSYECDIPIGAGICASYQTQTNSPRRARSVASQSIIAYTMSLGAENSVAYSNNSIAIPTNFTISVTTEILPVSMTKTSVDCTMYICGDSTECSNLLLQYGSFCTQLNRALTGIAVEQDKNTQEVFAQVKQIYKTPPIKDFGGFNFSQILPDPSKPSKRSFIEDLLFNKVTLADAGFIKQYGDCLGDIAARDLICAQKFNGLTVLPPLLTDEMIAQYTSALLAGTITSGWTFGAGAALQIPFAMQMAYRFNGIGVTQNVLYENQKLIANQFNSAIGKIQDSLSSTASALGKLQDVVNQNAQALNTLVKQLSSNFGAISSVLNDILSRLDPPEAEVQIDRLITGRLQSLQTYVTQQLIRAAEIRASANLAATKMSECVLGQSKRVDFCGKGYQLMSFPQSAPHGVVFLNVTYVPAQEKNFTTAPAICNDGKAHFPREGVFVSNGTNWFVTQRNFYEPQIITTDNTFVSGNCDVVIGIVNNTVYDPLQPELDSFKEELDKYFKNHTSPDVDLGDISGINASVVNIQKEIDRLNEVAKNLNESLIDLQELGKYEQYIKGGGSGGGQIYEGKLTAEGLRFGIVASRFNHALVDRLVEGAIDAIVRHGGREEDITLVRVPGSWEIPVAAGELARKEDIDAVIAIGVLIRGATPHFDYIASEVSKGLADLSLELRKPITFGVITADTLEQAIERAGTKHGNKGWEAALSAIEMANLFKSLR

SEQ ID NO: 3932 - protein, 1371 aa, Artificial Sequence
  SARS-CoV-2/USA/WA-UW292/2020__EPI_ISL_418077 spike protein (1-1211)(K986P_V987P_ H1048Q_H1064N_ H1083N_H1101N) LumSynth construct
MFVFLVLLPLVSSQCVNLTTRTQLPPAYTNSFTRGVYYPDKVFRSSVLHSTQDLFLPFFSNVTWFHAIHVSGTNGTKRFDNPVLPFNDGVYFASTEKSNIIRGWIFGTTLDSKTQSLLIVNNATNVVIKVCEFQFCNDPFLGVYYHKNNKSWMESEFRVYSSANNCTFEYVSQPFLMDLEGKQGNFKNLREFVFKNIDGYFKIYSKHTPINLVRDLPQGFSALEPLVDLPIGINITRFQTLLALHRSYLTPGDSSSGWTAGAAAYYVGYLQPRTFLLKYNENGTITDAVDCALDPLSETKCTLKSFTVEKGIYQTSNFRVQPTESIVRFPNITNLCPFGEVFNATRFASVYAWNRKRISNCVADYSVLYNSASFSTFKCYGVSPTKLNDLCFTNVYADSFVIRGDEVRQIAPGQTGKIADYNYKLPDDFTGCVIAWNSNNLDSKVGGNYNYLYRLFRKSNLKPFERDISTEIYQASSTPCNGVEGFNCYFPLQSYGFQPTNGVGYQPYRVVVLSFELLHAPATVCGPKKSTNLVKNKCVNFNFNGLTGTGVLTESNKKFLPFQQFGRDIADTTDAVRDPQTLEILDITPCSFGGVSVITPGTNTSNQVAVLYQDVNCTEVPVAIHADQLTPTWRVYSTGSNVFQTRAGCLIGAEHVNNSYECDIPIGAGICASYQTQTNSPRRARSVASQSIIAYTMSLGAENSVAYSNNSIAIPTNFTISVTTEILPVSMTKTSVDCTMYICGDSTECSNLLLQYGSFCTQLNRALTGIAVEQDKNTQEVFAQVKQIYKTPPIKDFGGFNFSQILPDPSKPSKRSFIEDLLFNKVTLADAGFIKQYGDCLGDIAARDLICAQKFNGLTVLPPLLTDEMIAQYTSALLAGTITSGWTFGAGAALQIPFAMQMAYRFNGIGVTQNVLYENQKLIANQFNSAIGKIQDSLSSTASALGKLQDVVNQNAQALNTLVKQLSSNFGAISSVLNDILSRLDPPEAEVQIDRLITGRLQSLQTYVTQQLIRAAEIRASANLAATKMSECVLGQSKRVDFCGKGYQLMSFPQSAPHGVVFLNVTYVPAQEKNFTTAPAICNDGKAHFPREGVFVSNGTNWFVTQRNFYEPQIITTDNTFVSGNCDVVIGIVNNTVYDPLQPELDSFKEELDKYFKNHTSPDVDLGDISGINASVVNIQKEIDRLNEVAKNLNESLIDLQELGKYEQYIKGGGSGGGQIYEGKLTAEGLRFGIVASRFNHALVDRLVEGAIDAIVRHGGREEDITLVRVPGSWEIPVAAGELARKEDIDAVIAIGVLIRGATPHFDYIASEVSKGLADLSLELRKPITFGVITADTLEQAIERAGTKHGNKGWEAALSAIEMANLFKSLR

SEQ ID NO: 3933 - protein, 1371 aa, Artificial Sequence
  SARS-CoV-2/Iceland/192/2020__EPI_ISL_417819 spike protein (1-1211)(K986P_V987P_ H1048Q_H1064N_ H1083N_H1101N) LumSynth construct
MFVFFVLLPLVSSQCVNLTTRTQLPPAYTNSFTRGVYYPDKVFRSSVLHSTQDLFLPFFSNVTWFHAIHVSGTNGTKRFDNPVLPFNDGVYFASTEKSNIIRGWIFGTTLDSKTQSLLIVNNATNVVIKVCEFQFCNDPFLGVYYHKNNKSWMESEFRVYSSANNCTFEYVSQPFLMDLEGKQGNFKNLREFVFKNIDGYFKIYSKHTPINLVRDLPQGFSALEPLVDLPIGINITRFQTLLALHRSYLTPGDSSSGWTAGAAAYYVGYLQPRTFLLKYNENGTITDAVDCALDPLSETKCTLKSFTVEKGIYQTSNFRVQPTESIVRFPNITNLCPFGEVFNATRFASVYAWNRKRISNCVADYSVLYNSASFSTFKCYGVSPTKLNDLCFTNVYADSFVIRGDEVRQIAPGQTGKIADYNYKLPDDFTGCVIAWNSNNLDSKVGGNYNYLYRLFRKSNLKPFERDISTEIYQAGSTPCNGVEGFNCYFPLQSYGFQPTNGVGYQPYRVVVLSFELLHAPATVCGPKKSTNLVKNKCVNFNFNGLTGTGVLTESNKKFLPFQQFGRDIADTTDAVRDPQTLEILDITPCSFGGVSVITPGTNTSNQVAVLYQGVNCTEVPVAIHADQLTPTWRVYSTGSNVFQTRAGCLIGAEHVNNSYECDIPIGAGICASYQTQTNSPRRARSVASQSIIAYTMSLGAENSVAYSNNSIAIPTNFTISVTTEILPVSMTKTSVDCTMYICGDSTECSNLLLQYGSFCTQLNRALTGIAVEQDKNTQEVFAQVKQIYKTPPIKDFGGFNFSQILPDPSKPSKRSFIEDLLFNKVTLADAGFIKQYGDCLGDIAARDLICAQKFNGLTVLPPLLTDEMIAQYTSALLAGTITSGWTFGAGAALQIPFAMQMAYRFNGIGVTQNVLYENQKLIANQFNSAIGKIQDSLSSTASALGKLQDVVNQNAQALNTLVKQLSSNFGAISSVLNDILSRLDPPEAEVQIDRLITGRLQSLQTYVTQQLIRAAEIRASANLAATKMSECVLGQSKRVDFCGKGYQLMSFPQSAPHGVVFLNVTYVPAQEKNFTTAPAICNDGKAHFPREGVFVSNGTNWFVTQRNFYEPQIITTDNTFVSGNCDVVIGIVNNTVYDPLQPELDSFKEELDKYFKNHTSPDVDLGDISGINASVVNIQKEIDRLNEVAKNLNESLIDLQELGKYEQYIKGGGSGGGQIYEGKLTAEGLRFGIVASRFNHALVDRLVEGAIDAIVRHGGREEDITLVRVPGSWEIPVAAGELARKEDIDAVIAIGVLIRGATPHFDYIASEVSKGLADLSLELRKPITFGVITADTLEQAIERAGTKHGNKGWEAALSAIEMANLFKSLR

SEQ ID NO: 3934 - protein, 1371 aa, Artificial Sequence
  SARS-CoV-2/Belgium/ULG-6939/2020__EPI_ISL_417020 spike protein (1-1211)(K986P_V987P_ H1048Q_H1064N_ H1083N_H1101N) LumSynth construct
MFVFLVLLPLVSSQCVNLTTRTQLPPAYTNSFTRGVYYPDKVFRSSVLHSTQDLFLPFFSNVTWFHAIHVSGTNGTKRFDNPVLPFNDGVYFASTEKSNIIRGWIFGTTLDSKTQSLLIVNNATNVVIKVCEFQFCNDPFLGVYYHKNNKSWMESEFRVYSSANNCTFEYVSQPFLMDLEGKQGNFKNLREFVFKNIDGYFKIYSKHTPINLVRDLPQGFSALEPLVDLPIGINITRFQTLLALHRSYLTPGDSSSGWTAGAAAYYVGYLQPRTFLLKYNENGTITDAVDCALDPLSETKCTLKSFTVEKGIYQTSNFRVQPTESIVRFPNITNLCPFGEVFNATRFASVYAWNRKRISNCVADYSVLYNSASFSTFKCYGVSPTKLNDLCFTNVYADSFVIRGDEVRQIAPGQTGKIADYNYKLPDDFTGCVIAWNSNNLDSKVGGNYNYLYRLFRKSNLKPFERDISTEIYQAGSTPCNGVEGFNCYFPLQSYGFQPTNGVGYQPYRVVVLSFELLHAPATVCGPKKSTNLVKNKCVNFNFNGLTGTGVLTESNKKFLPFQQFGRDIADTTDAVRDPQTLEILDITPCSFGGVSVITPGTNTSNQVAVLYQGVNCTEVPVAIHADQLTPTWRVYSTGSNVFQTRAGCLIGAEHVNNSYECDIPIGAGICASYQTQTNSPRRARSVASQSIIAYTMSLGAENSVVYSNNSIAIPTNFTISVTTEILPVSMTKTSVDCTMYICGDSTECSNLLLQYGSFCTQLNRALTGIAVEQDKNTQEVFAQVKQIYKTPPIKDFGGFNFSQILPDPSKPSKRSFIEDLLFNKVTLADAGFIKQYGDCLGDIAARDLICAQKFNGLTVLPPLLTDEMIAQYTSALLAGTITSGWTFGAGAALQIPFAMQMAYRFNGIGVTQNVLYENQKLIANQFNSAIGKIQDSLSSTASALGKLQDVVNQNAQALNTLVKQLSSNFGAISSVLNDILSRLDPPEAEVQIDRLITGRLQSLQTYVTQQLIRAAEIRASANLAATKMSECVLGQSKRVDFCGKGYQLMSFPQSAPHGVVFLNVTYVPAQEKNFTTAPAICNDGKAHFPREGVFVSNGTNWFVTQRNFYEPQIITTDNTFVSGNCDVVIGIVNNTVYDPLQPELDSFKEELDKYFKNHTSPDVDLGDISGINASVVNIQKEIDRLNEVAKNLNESLIDLQELGKYEQYIKGGGSGGGQIYEGKLTAEGLRFGIVASRFNHALVDRLVEGAIDAIVRHGGREEDITLVRVPGSWEIPVAAGELARKEDIDAVIAIGVLIRGATPHFDYIASEVSKGLADLSLELRKPITFGVITADTLEQAIERAGTKHGNKGWEAALSAIEMANLFKSLR

SEQ ID NO: 3935 - protein, 1371 aa, Artificial Sequence
  SARS-CoV-2/France/HF2496/2020__EPI_ISL_418231 spike protein (1-1211)(K986P_V987P_ H1048Q_H1064N_ H1083N_H1101N) LumSynth construct
MFVFLVLLPLVSSQCVNLTTRTQLPPAYTNSFTRGVYYPDKVFRSSVLHSTQDLFLPFFSNVTWFHAIHVSGTNGTKRFDNPVLPFNDGVYFASTEKSNIIRGWIFGTTLDSKTQSLLIVNNATNVVIKVCEFQFCNDPFLGVYYHKNNKSWMESEFRVYSSANNCTFEYVSQPFLMDLEGKQGNFKNLREFVFKNIDGYFKIYSKHTPINLVRDLPQGFSALEPLVDLPIGINITRFQTLLALHRSYLTPGDSSSGWTAGAAAYYVGYLQPRTFLLKYNENGTITDAVDCALDPLSETKCTLKSFTVEKGIYQTSNFRVQPTESIVRFPNITNLCPFGEVFNATRFASVYAWNRKRISNCVADYSVLYNSASFSTFKCYGVSPTKLNDLCFTNVYADSFVIRGDEVRQIAPGQTGKIADYNYKLPDDFTGCVIAWNSNNLDSKVGGNYNYLYRLFRKSNLKPFERDISTEIYQAGSTPCNGVEGFNCYFPLQSYGFQPTNGVGYQPYRVVVLSFELLHAPATVCGPKKSTNLVKNKCVNFNFNGLTGTGVLTESNKKFLPFQQFGRDIADTTDAVRDPQTLEILDITPCSFGGVSVITPGTNTSNQVAVLYQGVNCTEVPVAIHADQLTPTWRVYSTGSNVFQTRAGCLIGAEHVNNSYECDIPIGAGICASYQTQTNSPRRARSVASQSIIAYTMSLGAENSVAYSNNSIAIPTNFTISVTTEILPVSMTKTSVDCTMYICGDSTECSNLLLQYGSFCTQLNRALTGIAVEQDKNTQEVFAQVKQIYKTPPIKDFGGFNFSQILPDPSKPSKRSFIEDLLFNKVTLADAGFIKQYGDCLGDIVARDLICAQKFNGLTVLPPLLTDEMIAQYTSALLAGTITSGWTFGAGAALQIPFAMQMAYRFNGIGVTQNVLYENQKLIANQFNSAIGKIQDSLSSTASALGKLQDVVNQNAQALNTLVKQLSSNFGAISSVLNDILSRLDPPEAEVQIDRLITGRLQSLQTYVTQQLIRAAEIRASANLAATKMSECVLGQSKRVDFCGKGYQLMSFPQSAPHGVVFLNVTYVPAQEKNFTTAPAICNDGKAHFPREGVFVSNGTNWFVTQRNFYEPQIITTDNTFVSGNCDVVIGIVNNTVYDPLQPELDSFKEELDKYFKNHTSPDVDLGDISGINASVVNIQKEIDRLNEVAKNLNESLIDLQELGKYEQYIKGGGSGGGQIYEGKLTAEGLRFGIVASRFNHALVDRLVEGAIDAIVRHGGREEDITLVRVPGSWEIPVAAGELARKEDIDAVIAIGVLIRGATPHFDYIASEVSKGLADLSLELRKPITFGVITADTLEQAIERAGTKHGNKGWEAALSAIEMANLFKSLR

SEQ ID NO: 3936 - protein, 1371 aa, Artificial Sequence
  SARS-CoV-2/USA/WA-UW291/2020__EPI_ISL_418076 spike protein (1-1211)(K986P_V987P_ H1048Q_H1064N_ H1083N_H1101N) LumSynth construct
MFVFLVLLPLVSSQCVNLTTRTQLPPAYTNSFTRGVYYPDKVFRSSVLHSTQDLFLPFFSNVTWFHAIHVSGTNGTKRFDNPVLPFNDGVYFASTEKSNIIRGWIFGTTLDSKTQSLLIVNNATNVVIKVCEFQFCNDPFLGVYYHKNNKSWMESEFRVYSSANNCTFEYVSQPFLMDLEGKQGNFKNLREFVFKNIDGYFKIYSKHTPINLVRDLPQGFSALEPLVDLPIGINITRFQTLLALHRSYLTPGDSSSGWTAGAAAYYVGYLQPRTFLLKYNENGTITDAVDCALDPLSETKCTLKSFTVEKGIYQTSNFRVQPTESIVRFPNITNLCPFGEVFNATRFASVYAWNRKRISNCVADYSVLYNSASFSTFKCYGVSPTKLNDLCFTNVYADSFVIRGDEVRQIAPGQTGKIADYNYKLPDDFTGCVIAWNSNNLDSKVGGNYNYLYRLFRKSNLKPFERDISTEIYQAGSTPCNGVEGFNCYFPLQSYGFQPTNGVGYQPYRVVVLSFELLHAPATVCGPKKSTNLVKNKCVNFNFNGLTGTGVLTESNKKFLPFQQFGRDIADTTDAVRDPQTLEILDITPCSFGGVSVITPGTNTSNQVAVLYQGVNCTEVPVAIHADQLTPTWRVYSTGSNVFQTRAGCLIGAEHVNNSYECDIPIGAGICASYQTQTNSPRRARSVASQSIIAYTMSLGAENSVAYSNNSIAIPTNFTISVTTEILPVSMTKTSVDCTMYICGDSTECSNLLLQYGSFCTQLNRALTGIAVEQDKNTQEVFAQVKQIYKTPPIKDFGGFNFSQILPDPSKPSKRSFIEDLLFNKVTLADAGFIKQYGDCLGDIAARDLICAQKFNGLTVLPPLLTDEMIAQYTSALLAGTITSGWTFGAGAALQIPFAMQMAYRFNGIGVTQNVLYENQKLIANQFNSAIGKIQYSLSSTASALGKLQDVVNQNAQALNTLVKQLSSNFGAISSVLNDILSRLDPPEAEVQIDRLITGRLQSLQTYVTQQLIRAAEIRASANLAATKMSECVLGQSKRVDFCGKGYQLMSFPQSAPHGVVFLNVTYVPAQEKNFTTAPAICNDGKAHFPREGVFVSNGTNWFVTQRNFYEPQIITTDNTFVSGNCDVVIGIVNNTVYDPLQPELDSFKEELDKYFKNHTSPDVDLGDISGINASVVNIQKEIDRLNEVAKNLNESLIDLQELGKYEQYIKGGGSGGGQIYEGKLTAEGLRFGIVASRFNHALVDRLVEGAIDAIVRHGGREEDITLVRVPGSWEIPVAAGELARKEDIDAVIAIGVLIRGATPHFDYIASEVSKGLADLSLELRKPITFGVITADTLEQAIERAGTKHGNKGWEAALSAIEMANLFKSLR

SEQ ID NO: 3937 - protein, 1371 aa, Artificial Sequence; identical to SEQ ID NO: 3900
  SARS-CoV-2/Portugal/PT0034/2020__EPI_ISL_418019 spike protein (1-1211)(K986P_V987P_ H1048Q_H1064N_ H1083N_H1101N) LumSynth construct

SEQ ID NO: 3938 - protein, 1371 aa, Artificial Sequence
  SARS-CoV-2/Iceland/202/2020__EPI_ISL_417750 spike protein (1-1211)(K986P_V987P_ H1048Q_H1064N_ H1083N_H1101N) LumSynth construct
MFVFLVLLPLVSSQCVNLTTRTQLPPAYTNSFTRGVYYPDKVFRSSVLHSTQDLFLPFFSNVTWFHAIHVSGTNGTKRFDNPVLPFNDGVYFASTEKSNIIRGWIFGTTLDSKTQSLLIVNNATNVVIKVCEFQFCNDPFLGVYYHKNNKSWMESEFRVYSSANNCTFEYVSQPFLMDLEGKQGNFKNLREFVFKNIDGYFKIYSKHTPINLVRDLPQGFSALEPLVDLPIGINITRFQTLLALHRSYLTPGDSSSGWTAGAAAYYVGYLQPRTFLLKYNENGTITDAVDCALDPLSETKCTLKSFTVEKGIYQTSNFRVQPTESIVRFPNITNLCPFGEVFNATRFASVYAWNRKRISNCVADYSVLYNSASFSTFKCYGVSPTKLNDLCFTNVYADSFVIRGDEVRQIAPGQTGKIADYNYKLPDDFTGCVIAWNSNNLDSKVGGNYNYLYRLFRKSNLKPFERDISTEIYQAGSTPCNGVEGFNCYFPLQSYGFQPTNGVGYQPYRVVVLSFELLHAPATVCGPKKSTNLVKNKCVNFNFNGLTGTGVLTESNKKFLPFQQFGRDIADTTDAVRDPQTLEILDITPCSFGGVSVITPGTNTSNQVAVLYQDVNCTEVPVAIHADQLTPTWRVYSTGSNVFQTRAGCLIGAEHVNNSYECDIPIGAGICASYQTQTNSPRRARSVASQSIIAYTMSLGAENSVAYSNNSIAIPTNFTISVTTEILPVSMTKTSVDCTMYICGDSTECSNLLLQYGSFCTQLNRALTGIAVEQDKNTQEVFAQVKQIYKTPPIKDFGGFNFSQILPDPSKPSKRSFIEDLLFNKVTLADAGFIKQYGDCLGDIAARDLICAQKFNGLTVLPPLLTDEMIAQYTSALLAGTITSGWTFGAGAALQIPFAMQMAYRFNGIGVTQNVLYENQKLIANQFNSAIGKIQDSLSSTASALGKLQDVVNQNAQALNTLVKQLSSNFGAISSVLNDILSRLDPPEAEVQIDRLITGRLQSLQTYVTQQLIRAAEIRASANLAATKMSECVLGQSKRVDFCGKGYQLMSFPQSAPHGVVFLNVTYVPAQEKNFTTAPAICNDGKAHFPREGVFVSNGTNWFVTQRNFYEPQIITTDNTFVSGNCDVVIGIVNNTVYDPLQPELDSFKEELDKYFKNHTSPDVDLGDIPGINASVVNIQKEIDRLNEVAKNLNESLIDLQELGKYEQYIKGGGSGGGQIYEGKLTAEGLRFGIVASRFNHALVDRLVEGAIDAIVRHGGREEDITLVRVPGSWEIPVAAGELARKEDIDAVIAIGVLIRGATPHFDYIASEVSKGLADLSLELRKPITFGVITADTLEQAIERAGTKHGNKGWEAALSAIEMANLFKSLR

SEQ ID NO: 3939 - protein, 1371 aa, Artificial Sequence
  SARS-CoV-2/USA/WA-UW261/2020__EPI_ISL_418046 spike protein (1-1211)(K986P_V987P_ H1048Q_H1064N_ H1083N_H1101N) LumSynth construct
MFVFLVLLPLVSSQCVNLTTRTQLPPAYTNSFTRGVYYPDKVFRSSVLHSTQDLFLPFFSNVTWFHAIHVSGTNGTKRFDNPVLPFNDGVYFASTEKSNIIRGWIFGTTLDSKTQSLLIVNNATNVVIKVCEFQFCNDPFLGVYYHKNNKSWMESEFRVYSSANNCTFEYVSQPFLMDLEGKQGNFKNLREFVFKNIDGYFKIYSKHTPINLVRDLPQGFSALEPLVDLPIGINITRFQTLLALHRSYLTPGDSSSGWTAGAAAYYVGYLQPRTFLLKYNENGTITDAVDCALDPLSETKCTLKSFTVEKGIYQTSNFRVQPTESIVRFPNITNLCPFGEVFNATRFTSVYAWNRKRISNCVADYSVLYNSASFSTFKCYGVSPTKLNDLCFTNVYADSFVIRGDEVRQIAPGQTGKIADYNYKLPDDFTGCVIAWNSNNLDSKVGGNYNYLYRLFRKSNLKPFERDISTEIYQAGSTPCNGVEGFNCYFPLQSYGFQPTNGVGYQPYRVVVLSFELLHAPATVCGPKKSTNLVKNKCVNFNFNGLTGTGVLTESNKKFLPFQQFGRDIADTTDAVRDPQTLEILDITPCSFGGVSVITPGTNTSNQVAVLYQDVNCTEVPVAIHADQLTPTWRVYSTGSNVFQTRAGCLIGAEHVNNSYECDIPIGAGICASYQTQTNSPRRARSVASQSIIAYTMSLGAENSVAYSNNSIAIPTNFTISVTTEILPVSMTKTSVDCTMYICGDSTECSNLLLQYGSFCTQLNRALTGIAVEQDKNTQEVFAQVKQIYKTPPIKDFGGFNFSQILPDPSKPSKRSFIEDLLFNKVTLADAGFIKQYGDCLGDIAARDLICAQKFNGLTVLPPLLTDEMIAQYTSALLAGTITSGWTFGAGAALQIPFAMQMAYRFNGIGVTQNVLYENQKLIANQFNSAIGKIQDSLSSTASALGKLQDVVNQNAQALNTLVKQLSSNFGAISSVLNDILSRLDPPEAEVQIDRLITGRLQSLQTYVTQQLIRAAEIRASANLAATKMSECVLGQSKRVDFCGKGYQLMSFPQSAPHGVVFLNVTYVPAQEKNFTTAPAICNDGKAHFPREGVFVSNGTNWFVTQRNFYEPQIITTDNTFVSGNCDVVIGIVNNTVYDPLQPELDSFKEELDKYFKNHTSPDVDLGDISGINASVVNIQKEIDRLNEVAKNLNESLIDLQELGKYEQYIKGGGSGGGQIYEGKLTAEGLRFGIVASRFNHALVDRLVEGAIDAIVRHGGREEDITLVRVPGSWEIPVAAGELARKEDIDAVIAIGVLIRGATPHFDYIASEVSKGLADLSLELRKPITFGVITADTLEQAIERAGTKHGNKGWEAALSAIEMANLFKSLR

SEQ ID NO: 3940 - protein, 1371 aa, Artificial Sequence
  SARS-CoV-2/Portugal/PT0035/2020__EPI_ISL_418020 spike protein (1-1211)(K986P_V987P_ H1048Q_H1064N_ H1083N_H1101N) LumSynth construct
MFVFLVLLPLVSSQCVNLTTRTQLPPAYTNSFTRGVYYPDKVFRSSVLHSTQDLFLPFFSNVTWFHAIHVSGTNGTKRFDNPVLPFNDGVYFASTEKSNIIRGWIFGTTLDSKTQSLLIVNNATNVVIKVCEFQFCNDPFLGVYYHKNNKSWMESEFRVYSSANNCTFEYVSQPFLMDLEGKQGNFKNLREFVFKNIDGYFKIYSKHTPINLVRDLPQGFSALEPLVDLPIGINITRFQTLLALHRSYLTPGDSSSGWTAGAAAYYVGYLQPRTFLLKYNENGTITDAVDCALDPLSETKCTLKSFTVEKGIYQTSNFRVQPTESIVRFPNITNLCPFGEVFNATRFASVYAWNRKRISNCVADYSVLYNSASFSTFKCYGVSPTKLNDLCFTNVYADSFVIRGDEVRQIAPGQTGKIADYNYKLPDDFTGCVIAWNSNNLDSKVGGNYNYLYRLFRKSNLKPFERDISTEIYQAGSTPCNGVEGFNCYFPLQSYGFQPTNGVGYQPYRVVVLSFELLHAPATVCGPKKSTNLVKNKCVNFNFNGLTGTGVLTESNKKFLPFQQFGRDIADTTDAVRDPQTLEILDITPCSFGGVSVITPGTNTSNQVAVLYQDVNCTEVPVAIHADQLTPTWRVYSTGSNVFQTRAGCLIGAEHVNNSYECDIPIGAGICASYQTQTNSPRRARSVASQSIIAYTMSLGAENSVAYSNNSIAIPTNFTISVTTEILPVSMTKTSVDCTMYICGDSTECSNLLLQYGSFCTQLNRALTGIAVEQDKNTQEVFAQVKQIYKTPPIKDFGGFNFSQILPDPSKPSKRSFIEDLLFNKVTLADAGFIKQYGDCLGDISARDLICAQKFNGLTVLPPLLTDEMIAQYTSALLAGTITSGWTFGAGAALQIPFAMQMAYRFNGIGVTQNVLYENQKLIANQFNSAIGKIQDSLSSTASALGKLQDVVNQNAQALNTLVKQLSSNFGAISSVLNDILSRLDPPEAEVQIDRLITGRLQSLQTYVTQQLIRAAEIRASANLAATKMSECVLGQSKRVDFCGKGYQLMSFPQSAPHGVVFLNVTYVPAQEKNFTTAPAICNDGKAHFPREGVFVSNGTNWFVTQRNFYEPQIITTDNTFVSGNCDVVIGIVNNTVYDPLQPELDSFKEELDKYFKNHTSPDVDLGDISGINASVVNIQKEIDRLNEVAKNLNESLIDLQELGKYEQYIKGGGSGGGQIYEGKLTAEGLRFGIVASRFNHALVDRLVEGAIDAIVRHGGREEDITLVRVPGSWEIPVAAGELARKEDIDAVIAIGVLIRGATPHFDYIASEVSKGLADLSLELRKPITFGVITADTLEQAIERAGTKHGNKGWEAALSAIEMANLFKSLR

SEQ ID NO: 3941 - protein, 1371 aa, Artificial Sequence
  SARS-CoV-2/USA/NY-NYUMC7/2020__EPI_ISL_418192 spike protein (1-1211)(K986P_V987P_ H1048Q_H1064N_ H1083N_H1101N) LumSynth construct
MFVFLVLLPLVSSQCVNLTTRTQLPPAYTNSFTRGVYYPDKVFRSSVLHSTQDLFLPFFSNVTWFHAIHVSGTNGTKRFDNPVLPFNDGVYFASTEKSNIIRGWIFGTTLDSKTQSLLIVNNATNVVIKVCEFQFCNDPFLGVYHHKNNKSWMESEFRVYSSANNCTFEYVSQPFLMDLEGKQGNFKNLREFVFKNIDGYFKIYSKHTPINLVRDLPQGFSALEPLVDLPIGINITRFQTLLALHRSYLTPGDSSSGWTAGAAAYYVGYLQPRTFLLKYNENGTITDAVDCALDPLSETKCTLKSFTVEKGIYQTSNFRVQPTESIVRFPNITNLCPFGEVFNATRFASVYAWNRKRISNCVADYSVLYNSASFSTFKCYGVSPTKLNDLCFTNVYADSFVIRGDEVRQIAPGQTGKIADYNYKLPDDFTGCVIAWNSNNLDSKVGGNYNYLYRLFRKSNLKPFERDISTEIYQAGSTPCNGVEGFNCYFPLQSYGFQPTNGVGYQPYRVVVLSFELLHAPATVCGPKKSTNLVKNKCVNFNFNGLTGTGVLTESNKKFLPFQQFGRDIADTTDAVRDPQTLEILDITPCSFGGVSVITPGTNTSNQVAVLYQGVNCTEVPVAIHADQLTPTWRVYSTGSNVFQTRAGCLIGAEHVNNSYECDIPIGAGICASYQTQTNSPRRARSVASQSIIAYTMSLGAENSVAYSNNSIAIPTNFTISVTTEILPVSMTKTSVDCTMYICGDSTECSNLLLQYGSFCTQLNRALTGIAVEQDKNTQEVFAQVKQIYKTPPIKDFGGFNFSQILPDPSKPSKRSFIEDLLFNKVTLADAGFIKQYGDCLGDIAARDLICAQKFNGLTVLPPLLTDEMIAQYTSALLAGTITSGWTFGAGAALQIPFAMQMAYRFNGIGVTQNVLYENQKLIANQFNSAIGKIQDSLSSTASALGKLQDVVNQNAQALNTLVKQLSSNFGAISSVLNDILSRLDPPEAEVQIDRLITGRLQSLQTYVTQQLIRAAEIRASANLAATKMSECVLGQSKRVDFCGKGYQLMSFPQSAPHGVVFLNVTYVPAQEKNFTTAPAICNDGKAHFPREGVFVSNGTNWFVTQRNFYEPQIITTDNTFVSGNCDVVIGIVNNTVYDPLQPELDSFKEELDKYFKNHTSPDVDLGDISGINASVVNIQKEIDRLNEVAKNLNESLIDLQELGKYEQYIKGGGSGGGQIYEGKLTAEGLRFGIVASRFNHALVDRLVEGAIDAIVRHGGREEDITLVRVPGSWEIPVAAGELARKEDIDAVIAIGVLIRGATPHFDYIASEVSKGLADLSLELRKPITFGVITADTLEQAIERAGTKHGNKGWEAALSAIEMANLFKSLR

SEQ ID NO: 3942 - protein, 1371 aa, Artificial Sequence
  SARS-CoV-2/Iceland/189/2020__EPI_ISL_417709 spike protein (1-1211)(K986P_V987P_ H1048Q_H1064N_ H1083N_H1101N) LumSynth construct
MFVFLVLLPLVSSQCVNLTTRTQLPPAYTNSFTRGVYYPDKVFRSSVLHSTQDLFLPFFSNVTWFHAIHVSGTNGTKRFDNPVLPFNDGVYFASTEKSNIIRGWIFGTTLDSKTQSLLIVNNATNVVIKVCEFQFCNDPFLGVYYHKNNKSWMESEFRVYSSANNCTFEYVSQPFLMDLEGKQGNFKNLREFVFKNIDGYFKIYSKHTPINLVRDLPQGFSALEPLVDLPIGINITRFQTLLALHRSYLTPGDSSSGWTAGAAAYYVGYLQPRTFLLKYNENGTITDAVDCALDPLSETKCTLKSFTVEKGIYQTSNFRVQPTESIVRFPNITNLCPFGEVFNATRFASVYAWNRKRISNCVADYSVLYNSASFSTFKCYGVSPTKLNDLCFTNVYADSFVIRGDEVRQIAPGQTGKIADYNYKLPDDFTGCVIAWNSNNLDSKVGGNYNYLYRLFRKSNLKPFERDISTEIYQAGSTPCNGVEGFNCYFPLQSYGFQPTNGVGYQPYRVVVLSFELLHAPATVCGPKKSTNLVKNKCVNFNFNGLTGTGVLTESNKKFLPFQQFGRDIADTTDAVRDPQTLEILDITPCSFGGVSVITPGTNTSNQVAVLYQGVNCTEVPVAIHADQLTPTWRVYSTGSNVFQTRAGCLIGAEHVNNSYECDIPIGAGICASYQTQTNSPRRARSVASQSIIAYTMSLGAENSVAYSNNSIAIPTNFTISVTTEILPVSMTKTSVDCTMYICGDSTECSNLLLQYGSFCTQLNRALTGIAVEQDKNTQEVFAQVKQIYKTPPIKDFGGFNFSQILPDPSKPSKRSFIEDLLFNKVTLADAGFTKQYGDCLGDIAARDLICAQKFNGLTVLPPLLTDEMIAQYTSALLAGTITSGWTFGAGAALQIPFAMQMAYRFNGIGVTQNVLYENQKLIANQFNSAIGKIQDSLSSTASALGKLQDVVNQNAQALNTLVKQLSSNFGAISSVLNDILSRLDPPEAEVQIDRLITGRLQSLQTYVTQQLIRAAEIRASANLAATKMSECVLGQSKRVDFCGKGYQLMSFPQSAPHGVVFLNVTYVPAQEKNFTTAPAICNDGKAHFPREGVFVSNGTNWFVTQRNFYEPQIITTDNTFVSGNCDVVIGIVNNTVYDPLQPELDSFKEELDKYFKNHTSPDVDLGDISGINASVVNIQKEIDRLNEVAKNLNESLIDLQELGKYEQYIKGGGSGGGQIYEGKLTAEGLRFGIVASRFNHALVDRLVEGAIDAIVRHGGREEDITLVRVPGSWEIPVAAGELARKEDIDAVIAIGVLIRGATPHFDYIASEVSKGLADLSLELRKPITFGVITADTLEQAIERAGTKHGNKGWEAALSAIEMANLFKSLR

SEQ ID NO: 3943 - protein, 1371 aa, Artificial Sequence
  SARS-CoV-2/Australia/NSW56/2020__EPI_ISL_417408 spike protein (1-1211)(K986P_V987P_ H1048Q_H1064N_ H1083N_H1101N) LumSynth construct
MFVFLVLLPLVSSQCVNLTTRTQLPPAYTNSFTRGVYYPDKVFRSSVLHSTQDLFLPFFSNVTWFHAIHVSGTNGTKRFDNPVLPFNDGVYFASTEKSNIIRGWIFGTTLDSKTQSLLIVNNATNVVIKVCEFQFCNDPFLGVYYHKNNKSWMESEFRVYSSANNCTFEYVSQPFLMDLEGKQGNFKNLREFVFKNIDGYFKIYSKHTPINLVRDLPQGFSALEPLVDLPIGINITRFQTLLALHRSYLTPGDSSSGWTAGAAAYYVGYLQPRTFLLKYNENGTITDAVDCALDPLSETKCTLKSFTVEKGIYQTSNFRVQPTESIVRFPNITNLCPFGEVFNATRFASVYAWNRKRISNCVADYSVLYNSASFSTFKCYGVSPTKLNDLCFTNVYADSFVIRGDEVRQIAPGQTGKIADYNYKLPDDFTGCVIAWNSNNLDSKVGGNYNYLYRLFRKSNLKPFERDISTEIYQAGSTPCNGVEGFNCYFPLQSYGFQPTNGVGYQPYRVVVLSFELLHAPATVCGPKKSTNLVKNKCVNFNFNGLTGTGVLTESNKKFLPFQQFGRDIADTTDAVRDPQTLEILDITPCSFGGVSVITPGTNTSNQVAVLYQDVNCTEVPVAIHADQLTPTWRVYSTGSNVFQTRAGCLIGAEHVNNSYECDIPIGAGICASYQTQTNSPRRARSVASQSIIAYTMSLGAENSVAYSNNSIAIPTNFTISVTTEILPVSMTKTSVDCTMYICGDSTECSNLLLQYGSFCTQLNRALTGIAVEQDKNTQEVFAQVKQIYKTPPIKDFGGFNFSQILPDSSKPSKRSFIEDLLFNKVTLADAGFIKQYGDCLGDIAARDLICAQKFNGLTVLPPLLTDEMIAQYTSALLAGTITSGWTFGAGAALQIPFAMQMAYRFNGIGVTQNVLYENQKLIANQFNSAIGKIQDSLSSTASALGKLQDVVNQNAQALNTLVKQLSSNFGAISSVLNDILSRLDPPEAEVQIDRLITGRLQSLQTYVTQQLIRAAEIRASANLAATKMSECVLGQSKRVDFCGKGYQLMSFPQSAPHGVVFLNVTYVPAQEKNFTTAPAICNDGKAHFPREGVFVSNGTNWFVTQRNFYEPQIITTDNTFVSGNCDVVIGIVNNTVYDPLQPELDSFKEELDKYFKNHTSPDVDLGDISGINASVVNIQKEIDRLNEVAKNLNESLIDLQELGKYEQYIKGGGSGGGQIYEGKLTAEGLRFGIVASRFNHALVDRLVEGAIDAIVRHGGREEDITLVRVPGSWEIPVAAGELARKEDIDAVIAIGVLIRGATPHFDYIASEVSKGLADLSLELRKPITFGVITADTLEQAIERAGTKHGNKGWEAALSAIEMANLFKSLR

SEQ ID NO: 3944 - protein, 1371 aa, Artificial Sequence
  SARS-CoV-2/Iceland/280/2020__EPI_ISL_417608 spike protein (1-1211)(K986P_V987P_ H1048Q_H1064N_ H1083N_H1101N) LumSynth construct
MFVFLVLLPLVSSQCVNLTTRTQLPPAYTNSFTRGVYYPDKVFRSSVLHSTQDLFLPFFSNVTWFHAIHVSGTNGTKRFDNPVLPFNDGVYFASTEKSNIIRGWIFGTTLDSKTQSLLIVNNATNVVIKVCEFQFCNDPFLGVYYHKNNKSWMESEFRVYSSANNCTFEYVSQPFLMDLEGKQGNFKNLREFVFKNIDGYFKIYSKHTPINLVRDLPQGFSALEPLVDLPIGINITRFQTLLALHRSYLTPGDSSSGWTAGAAAYYVGYLQPRTFLLKYNENGTITDAVDCALDPLSETKCTLKSFTVEKGIYQTSNFRVQPTESIVRFPNITNLCPFGEVFNATRFASVYAWNRKRISNCVADYSVLYNSASFSTFKCYGVSPTKLNDLCFTNVYADSFVIRGDEVRQIAPGQTGKIADYNYKLPDDFTGCVIAWNSNNLDSKVGGNYNYLYRLFRKSNLKPFERDISTEIYQAGSTPCNGVEGFNCYFPLQSYGFQPTNGVGYQPYRVVVLSFELLHAPATVCGPKKSTNLVKNKCVNFNFNGLTGTGVLTESNKKFLPFQQFGRDIADTTDAVRDPQTLEILDITPCSFGGVSVITPGTNTSNQVAVLYQGVNCTEVPVAIHADQLTPTWRVYSTGSNVFQTRAGCLIGAEHVNNSYECDIPIGAGICASYHTQTNSPRRARSVASQSIIAYTMSLGAENSVAYSNNSIAIPTNFTISVTTEILPVSMTKTSVDCTMYICGDSTECSNLLLQYGSFCTQLNRALTGIAVEQDKNTQEVFAQVKQIYKTPPIKDFGGFNFSQILPDPSKPSKRSFIEDLLFNKVTLADAGFIKQYGDCLGDIAARDLICAQKFNGLTVLPPLLTDEMIAQYTSALLAGTITSGWTFGAGAALQIPFAMQMAYRFNGIGVTQNVLYENQKLIANQFNSAIGKIQDSLSSTASALGKLQDVVNQNAQALNTLVKQLSSNFGAISSVLNDILSRLDPPEAEVQIDRLITGRLQSLQTYVTQQLIRAAEIRASANLAATKMSECVLGQSKRVDFCGKGYQLMSFPQSAPHGVVFLNVTYVPAQEKNFTTAPAICNDGKAHFPREGVFVSNGTNWFVTQRNFYEPQIITTDNTFVSGNCDVVIGIVNNTVYDPLQPELDSFKEELDKYFKNHTSPDVDLGDISGINASVVNIQKEIDRLNEVAKNLNESLIDLQELGKYEQYIKGGGSGGGQIYEGKLTAEGLRFGIVASRFNHALVDRLVEGAIDAIVRHGGREEDITLVRVPGSWEIPVAAGELARKEDIDAVIAIGVLIRGATPHFDYIASEVSKGLADLSLELRKPITFGVITADTLEQAIERAGTKHGNKGWEAALSAIEMANLFKSLR

SEQ ID NO: 3945 - protein, 1371 aa, Artificial Sequence; identical to SEQ ID NO: 3900
  SARS-CoV-2/Iceland/247/2020__EPI_ISL_417575 spike protein (1-1211)(K986P_V987P_ H1048Q_H1064N_ H1083N_H1101N) LumSynth construct

SEQ ID NO: 3946 - protein, 1371 aa, Artificial Sequence
  SARS-CoV-2/Iceland/238/2020__EPI_ISL_417566 spike protein (1-1211)(K986P_V987P_ H1048Q_H1064N_ H1083N_H1101N) LumSynth construct
MFVFLVLLPLVSSQCVNLTTRTQLPPAYTNSFTRGVYYPDKVFRSSVLHSTQDLFLPFFSNVTWFHAIHVSGTNGTKRFDNPVLPFNDGVYFASTEKSNIIRGWIFGTTLDSKTQSLLIVNNATNVVIKVCEFQFCNDPFLGVYYHKNNKSWMESEFRVYSSANNCTFEYVSQPFLMDLEGKQGNFKNLREFVFKNIDGYFKIYSKHTPINLVRDLPQGFSALEPLVDLPIGINITRFQTLLALHRSYLTPGDSSSGWTAGAAAYYVGYLQPRTFLLKYNENGTITDAVDCALDPLSETKCTLKSFTVEKGIYQTSNFRVQPTESIVRFPNITNLCPFGEVFNATRFASVYAWNRKRISNCVADYSVLYNSASFSTFKCYGVSPTKLNDLCFTNVYADSFVIRGDEVRQIAPGQTGKIADYNYKLPDDFTGCVIAWNSNNLDSKVGGNYNYLYRLFRKSNLKPFERDISTEIYQAGSTPCNGVEGFNCYFPLQSYGFQPTNGVGYQPYRVVVLSFELLHAPATVCGPKKSTNLVKNKCVNFNFNGLTGTGVLTESNKKFLPFQQFGRDIADTTDAVRDPQTLEILDITPCSFGGVSVITPGTNTSNQVAVLYQGVNCTEVPVAIHADQLTPTWRVYSTGSNVFQTRAGCLIGAEHVNNSYECDIPIGAGICASYQTQTNSPRRARSVASQSIIAYTMSLGAENSVAYSNNSIAIPTNFTISVTTEILPVSMTKTSVDCTMYICGDSTECSNLLLQYGSFCTQLNRALTGIAVEQDKNTQEVFAQVKQIYKTPPIKDFGGFNFSQILPDPSKPSKRSFIEDLLFNKVTLADVGFIKQYGDCLGDIAARDLICAQKFNGLTVLPPLLTDEMIAQYTSALLAGTITSGWTFGAGAALQIPFAMQMAYRFNGIGVTQNVLYENQKLIANQFNSAIGKIQDSLSSTASALGKLQDVVNQNAQALNTLVKQLSSNFGAISSVLNDILSRLDPPEAEVQIDRLITGRLQSLQTYVTQQLIRAAEIRASANLAATKMSECVLGQSKRVDFCGKGYQLMSFPQSAPHGVVFLNVTYVPAQEKNFTTAPAICNDGKAHFPREGVFVSNGTNWFVTQRNFYEPQIITTDNTFVSGNCDVVIGIVNNTVYDPLQPELDSFKEELDKYFKNHTSPDVDLGDISGINASVVNIQKEIDRLNEVAKNLNESLIDLQELGKYEQYIKGGGSGGGQIYEGKLTAEGLRFGIVASRFNHALVDRLVEGAIDAIVRHGGREEDITLVRVPGSWEIPVAAGELARKEDIDAVIAIGVLIRGATPHFDYIASEVSKGLADLSLELRKPITFGVITADTLEQAIERAGTKHGNKGWEAALSAIEMANLFKSLR

SEQ ID NO: 3947 - protein, 1371 aa, Artificial Sequence
  SARS-CoV-2/Greece/16/2020__EPI_ISL_418265 spike protein (1-1211)(K986P_V987P_ H1048Q_H1064N_ H1083N_H1101N) LumSynth construct
MFVFLVLLPLVSSQCVNLTTRTQLPPAYTNSFTRGVYYPDKVFRSSVLHSTQDLFLPFFSNVTWFHAIHVSGTNGTKRFDNPVLPFNDGVYFASTEKSNIIRGWIFGTTLDSKTQSLLIVNNATNVVIKVCEFQFCNDPFLGVYYHKNNKSWMESEFRVYSSANNCTFEYVSQPFLMDLEGKQGNFKNLREFVFKNVDGYFKIYSKHTPINLVRDLPQGFSALEPLVDLPIGINITRFQTLLALHRSYLTPGDSSSGWTAGAAAYYVGYLQPRTFLLKYNENGTITDAVDCALDPLSETKCTLKSFTVEKGIYQTSNFRVQPTESIVRFPNITNLCPFGEVFNATRFASVYAWNRKRISNCVADYSVLYNSASFSTFKCYGVSPTKLNDLCFTNVYADSFVIRGDEVRQIAPGQTGKIADYNYKLPDDFTGCVIAWNSNNLDSKVGGNYNYLYRLFRKSNLKPFERDISTEIYQAGSTPCNGVEGFNCYFPLQSYGFQPTNGVGYQPYRVVVLSFELLHAPATVCGPKKSTNLVKNKCVNFNFNGLTGTGVLTESNKKFLPFQQFGRDIADTTDAVRDPQTLEILDITPCSFGGVSVITPGTNTSNQVAVLYQDVNCTEVPVAIHADQLTPTWRVYSTGSNVFQTRAGCLIGAEHVNNSYECDIPIGAGICASYQTQTNSPRRARSVASQSIIAYTMSLGAENSVAYSNNSIAIPTNFTISVTTEILPVSMTKTSVDCTMYICGDSTECSNLLLQYGSFCTQLNRALTGIAVEQDKNTQEVFAQVKQIYKTPPIKDFGGFNFSQILPDPSKPSKRSFIEDLLFNKVTLADAGFIKQYGDCLGDIAARDLICAQKFNGLTVLPPLLTDEMIAQYTSALLAGTITSGWTFGAGAALQIPFAMQMAYRFNGIGVTQNVLYENQKLIANQFNSAIGKIQDSLSSTASALGKLQDVVNQNAQALNTLVKQLSSNFGAISSVLNDILSRLDPPEAEVQIDRLITGRLQSLQTYVTQQLIRAAEIRASANLAATKMSECVLGQSKRVDFCGKGYQLMSFPQSAPHGVVFLNVTYVPAQEKNFTTAPAICNDGKAHFPREGVFVSNGTNWFVTQRNFYEPQIITTDNTFVSGNCDVVIGIVNNTVYDPLQPELDSFKEELDKYFKNHTSPDVDLGDISGINASVVNIQKEIDRLNEVAKNLNESLIDLQELGKYEQYIKGGGSGGGQIYEGKLTAEGLRFGIVASRFNHALVDRLVEGAIDAIVRHGGREEDITLVRVPGSWEIPVAAGELARKEDIDAVIAIGVLIRGATPHFDYIASEVSKGLADLSLELRKPITFGVITADTLEQAIERAGTKHGNKGWEAALSAIEMANLFKSLR

SEQ ID NO: 3948 - protein, 1371 aa, Artificial Sequence
  SARS-CoV-2/Iceland/319/2020__EPI_ISL_417648 spike protein (1-1211)(K986P_V987P_ H1048Q_H1064N_ H1083N_H1101N) LumSynth construct
MFVFLVLLPLVSSQCVNLTTRTQLPPAYTNSFTRGVYYPDKVFRSSVLHSTQDLFLPFFSNVTWFHAIHVSGTNGTKRFDNPVLPFNDGVYFASTEKSNIIRGWIFGTTLDSKTQSLLIVNNATNVVIKVCEFQFCNDPFLGVYYHKNNKSWMESEFRVYSSANNCTFEYVSQPFLIDLEGKQGNFKNLREFVFKNIDGYFKIYSKHTPINLVRDLPQGFSALEPLVDLPIGINITRFQTLLALHRSYLTPGDSSSGWTAGAAAYYVGYLQPRTFLLKYNENGTITDAVDCALDPLSETKCTLKSFTVEKGIYQTSNFRVQPTESIVRFPNITNLCPFGEVFNATRFASVYAWNRKRISNCVADYSVLYNSASFSTFKCYGVSPTKLNDLCFTNVYADSFVIRGDEVRQIAPGQTGKIADYNYKLPDDFTGCVIAWNSNNLDSKVGGNYNYLYRLFRKSNLKPFERDISTEIYQAGSTPCNGVEGFNCYFPLQSYGFQPTNGVGYQPYRVVVLSFELLHAPATVCGPKKSTNLVKNKCVNFNFNGLTGTGVLTESNKKFLPFQQFGRDIADTTDAVRDPQTLEILDITPCSFGGVSVITPGTNTSNQVAVLYQGVNCTEVPVAIHADQLTPTWRVYSTGSNVFQTRAGCLIGAEHVNNSYECDIPIGAGICASYQTQTNSPRRARSVASQSIIAYTMSLGAENSVAYSNNSIAIPTNFTISVTTEILPVSMTKTSVDCTMYICGDSTECSNLLLQYGSFCTQLNRALTGIAVEQDKNTQEVFAQVKQIYKTPPIKDFGGFNFSQILPDPSKPSKRSFIEDLLFNKVTLADAGFIKQYGDCLGDIAARDLICAQKFNGLTVLPPLLTDEMIAQYTSALLAGTITSGWTFGAGAALQIPFAMQMAYRFNGIGVTQNVLYENQKLIANQFNSAIGKIQDSLSSTASALGKLQDVVNQNAQALNTLVKQLSSNFGAISSVLNDILSRLDPPEAEVQIDRLITGRLQSLQTYVTQQLIRAAEIRASANLAATKMSECVLGQSKRVDFCGKGYQLMSFPQSAPHGVVFLNVTYVPAQEKNFTTAPAICNDGKAHFPREGVFVSNGTNWFVTQRNFYEPQIITTDNTFVSGNCDVVIGIVNNTVYDPLQPELDSFKEELDKYFKNHTSPDVDLGDISGINASVVNIQKEIDRLNEVAKNLNESLIDLQELGKYEQYIKGGGSGGGQIYEGKLTAEGLRFGIVASRFNHALVDRLVEGAIDAIVRHGGREEDITLVRVPGSWEIPVAAGELARKEDIDAVIAIGVLIRGATPHFDYIASEVSKGLADLSLELRKPITFGVITADTLEQAIERAGTKHGNKGWEAALSAIEMANLFKSLR

SEQ ID NO: 3949 - protein, 1371 aa, Artificial Sequence
  SARS-CoV-2/Congo/94/2020__EPI_ISL_417947 spike protein (1-1211)(K986P_V987P_ H1048Q_H1064N_ H1083N_H1101N) LumSynth construct
MFVFLVLLPLVSSQCVNLTTRTQLPPAYTNSFTRGVYYPDKVFRSSVLHSTQDLFLPFFSNVTWFHAIHVSGTNGTKRFDNPVLPFNDGVYFASTEKSNIIRGWIFGTTLDSKTQSLLIVNNATNVVIKVCEFQFCNDPFLGVYYHKNNKSWMESEFRVYSSANNCTFEYVSQPFLMDLEGKQGNFKNLREFVFKNIDGYFKIYSKHTPINLVRDLPQGFSALEPLVDLPIGINITRFQTLLALHRSYLTPGDSSSGWTAGAAAYYVGYLQPRTFLLKYNENGTITDAVDCALDPLSETKCTLKSFTVEKGIYQTSNFRVQPTESIVRFPNITNLCPFGEVFNATRFASVYAWNRKRISNCVADYSVLYNSASFSTFKCYGVSPTKLNDLCFTNVYADSFVIRGDEVRQIAPGQTGKIADYNYKLPDDFTGCVIAWNSNNLDSKVGGNYNYLYRLFRKSNLKPFERDISTEIYQAGSTPCNGVEGFNCYFPLQSYGFQPTNGVGYQPYRVVVLSFELLHAPATVCGPKKSTNLVKNKCVNFNFNGLTGTGVLTESNKKFLPFQQFGRDIADTTDAVRDPQTLEILDITPCSFGGVSVITPGTNTSNQVAVLYQGVNCTEVPVAIHADQLTPTWRVYSTGSNVFQTRAGCLIGAEHVNNSYECDIPIGAGICASYQTQTNSPRRARSVASQSIIAYTMSLGAENSVAYSNNSIAIPTNFTISVTTEILPVSMTKTSVDCTMYICGDSTECSNLLLQYGSFCTQLNRALTGIAVEQDKNTQEVFAQVKQIYKTPPIKDFGGFNFSQILPDPSKPSKRSFIEDILFNKVTLADAGFIKQYGDCLGDIAARDLICAQKFNGLTVLPPLLTDEMIAQYTSALLAGTITSGWTFGAGAALQIPFAMQMAYRFNGIGVTQNVLYENQKLIANQFNSAIGKIQDSLSSTASALGKLQDVVNQNAQALNTLVKQLSSNFGAISSVLNDILSRLDPPEAEVQIDRLITGRLQSLQTYVTQQLIRAAEIRASANLAATKMSECVLGQSKRVDFCGKGYQLMSFPQSAPHGVVFLNVTYVPAQEKNFTTAPAICNDGKAHFPREGVFVSNGTNWFVTQRNFYEPQIITTDNTFVSGNCDVVIGIVNNTVYDPLQPELDSFKEELDKYFKNHTSPDVDLGDISGINASVVNIQKEIDRLNEVAKNLNESLIDLQELGKYEQYIKGGGSGGGQIYEGKLTAEGLRFGIVASRFNHALVDRLVEGAIDAIVRHGGREEDITLVRVPGSWEIPVAAGELARKEDIDAVIAIGVLIRGATPHFDYIASEVSKGLADLSLELRKPITFGVITADTLEQAIERAGTKHGNKGWEAALSAIEMANLFKSLR

SEQ ID NO: 3950 - protein, 1371 aa, Artificial Sequence
  SARS-CoV-2/Congo/158/2020__EPI_ISL_417950 spike protein (1-1211)(K986P_V987P_ H1048Q_H1064N_ H1083N_H1101N) LumSynth construct
MFVFLVLLPLVSSQCVNLTTRTQLPPAYTNSFTRGVYYPDKVFRSSVLHSTQDLFLPFFSNVTWFHAIHVSGTNGTKRFDNPVLPFNDGVYFASTEKSNIIRGWIFGTTLDSKTQSLLIVNNATNVVIKVCEFQFCNDPFLGVYYHKNNKSWMESEFRVYSSANNCTFEYVSQPFLMDLEGKQGNFKNLREFVFKNIDGYFKIYSKHTPINLVRDLPQGFSALEPLVDLPIGINITRFQTLLALHRSYLTPGDSSSGWTAGAAAYYVGYLQPRTFLLKYNENGTITDAVDCALDPLSETKCTLKSFTVEKGIYQTSNFRVQPTESIVRFPNITNLCPFGEVFNATRFASVYAWNRKRISNCVADYSVLYNSASFSTFKCYGVSPTKLNDLCFTNVYADSFVIRGDEVRQIAPGQTGKIADYNYKLPDDFTGCVIAWNSNNLDSKVGGNYNYLYRLFRKSNLKPFERDISTEIYQAGSTPCNGVEGFNCYFPLQSYGFQPTNGVGYQPYRVVVLSFELLHAPATVCGPKKSTNLVKNKCVNFNFNGLTGTGVLTESNKKFLPFQQFGRDIADTTDAVRDPQTLEILDITPCSFGGVSVITPGTNTSNQVAVLYQDVNCTEVPVAIHADQLTPTWRVYSTGSNVFQTRAGCLIGAEHVNNSYECDIPIGAGICASYQTQTNSPRRARSVASQSIIAYTMSLGAENSVAYSNNSIAIPTNFTISVTTEILPVSMTKTSVDCTMYICGDSTECSNLLLQYGSFCTQLNRALTGIAVEQDKNTQEVFAQVKQIYKTPPIKDFGGFNFSQILPDPSKPSKRSFIEDLLFNKVTLADAGFIKQYGDCLGDIAARDLICAQKFNGLTVLPPLLTDEMIAQYTSALLAGTITSGWTFGAGAALQIPFAMQMAYRFNGIGVTQNVLYENQKLIANQFNSAIGKIQDSLSSTASALGKLQDVVNQNAQALNTLVKQLSSNFGAISSVLNDILSRLDPPEAEVQIDRLITGRLQSLQTYVTQQLIRAAEIRASANLAATKMSECVLGQSKRVDFCGKGYQLMSFPQSAPHGVVFLNVTYVPAQEKNFTTAPAICNDGKAHFPREGVFVSNGTNWFVTQRNFYEPQIITTDNTFLSGNCDVVIGIVNNTVYDPLQPELDSFKEELDKYFKNHTSPDVDLGDISGINASVVNIQKEIDRLNEVAKNLNESLIDLQELGKYEQYIKGGGSGGGQIYEGKLTAEGLRFGIVASRFNHALVDRLVEGAIDAIVRHGGREEDITLVRVPGSWEIPVAAGELARKEDIDAVIAIGVLIRGATPHFDYIASEVSKGLADLSLELRKPITFGVITADTLEQAIERAGTKHGNKGWEAALSAIEMANLFKSLR

SEQ ID NO: 3951 - protein, 1371 aa, Artificial Sequence
  SARS-CoV-2/USA/UT-00034/2020__EPI_ISL_417977 spike protein (1-1211)(K986P_V987P_ H1048Q_H1064N_ H1083N_H1101N) LumSynth construct
MFVFLVLLPLVSSQCVNLTTRTQLPPAYTNSFTRGVYYPDKVFRSSVLHSTQDLFLPFFSNVTWFHAIHVSGTNGTKRFDNPVLPFNDGVYFASTEKSNIIRGWIFGTTLDSKTQSLLIVNNATNVVIKVCEFQFCNDPFLGVYYYKNNKSWMESEFRVYSSANNCTFEYVSQPFLMDLEGKQGNFKNLREFVFKNIDGYFKIYSKHTPINLVRDLPQGFSALEPLVDLPIGINITRFQTLLALHRSYLTPGDSSSGWTAGAAAYYVGYLQPRTFLLKYNENGTITDAVDCALDPLSETKCTLKSFTVEKGIYQTSNFRVQPTESIVRFPNITNLCPFGEVFNATRFASVYAWNRKRISNCVADYSVLYNSASFSTFKCYGVSPTKLNDLCFTNVYADSFVIRGDEVRQIAPGQTGKIADYNYKLPDDFTGCVIAWNSNNLDSKVGGNYNYLYRLFRKSNLKPFERDISTEIYQAGSTPCNGVEGFNCYFPLQSYGFQPTNGVGYQPYRVVVLSFELLHAPATVCGPKKSTNLVKNKCVNFNFNGLTGTGVLTESNKKFLPFQQFGRDIADTTDAVRDPQTLEILDITPCSFGGVSVITPGTNTSNQVAVLYQGVNCTEVPVAIHADQLTPTWRVYSTGSNVFQTRAGCLIGAEHVNNSYECDIPIGAGICASYQTQTNSPRRARSVASQSIIAYTMSLGAENSVAYSNNSIAIPTNFTISVTTEILPVSMTKTSVDCTMYICGDSTECSNLLLQYGSFCTQLNRALTGIAVEQDKNTQEVFAQVKQIYKTPPIKDFGGFNFSQILPDPSKPSKRSFIEDLLFNKVTLADAGFIKQYGDCLGDIAARDLICAQKFNGLTVLPPLLTDEMIAQYTSALLAGTITSGWTFGAGAALQIPFAMQMAYRFNGIGVTQNVLYENQKLIANQFNSAIGKIQDSLSSTASALGKLQDVVNQNAQALNTLVKQLSSNFGAISSVLNDILSRLDPPEAEVQIDRLITGRLQSLQTYVTQQLIRAAEIRASANLAATKMSECVLGQSKRVDFCGKGYQLMSFPQSAPHGVVFLNVTYVPAQEKNFTTAPAICNDGKAHFPREGVFVSNGTNWFVTQRNFYEPQIITTDNTFVSGNCDVVIGIVNNTVYDPLQPELDSFKEELDKYFKNHTSPDVDLGDISGINASVVNIQKEIDRLNEVAKNLNESLIDLQELGKYEQYIKGGGSGGGQIYEGKLTAEGLRFGIVASRFNHALVDRLVEGAIDAIVRHGGREEDITLVRVPGSWEIPVAAGELARKEDIDAVIAIGVLIRGATPHFDYIASEVSKGLADLSLELRKPITFGVITADTLEQAIERAGTKHGNKGWEAALSAIEMANLFKSLR

SEQ ID NO: 3952 - protein, 1371 aa, Artificial Sequence
  SARS-CoV-2/USA/UT-00033/2020__EPI_ISL_417976 spike protein (1-1211)(K986P_V987P_ H1048Q_H1064N_ H1083N_H1101N) LumSynth construct
MFVFLVLLPLVSSQCVNLTTRTQLPPAYTNSFTRGVYYPDKVFRSSVLHSTQDLFLPFFSNVTWFHAIHVSGTNGTKRFDNPVLPFNDGVYFASTEKSNIIRGWIFGTTLDSKTQSLLIVNNATNVVIKVCEFQFCNDPFLGVYYHKNNKSWMESEFRVYSSANNCTFEYVSQPFLMDLEGKQGNFKNLREFVFKNIDGYFKIYSKHTPINLVRDLPQGFSALEPLVDLPIGINITRFQTLLALHRSYLTPGDSSSGLTAGAAAYYVGYLQPRTFLLKYNENGTITDAVDCALDPLSETKCTLKSFTVEKGIYQTSNFRVQPTESIVRFPNITNLCPFGEVFNATRFASVYAWNRKRISNCVADYSVLYNSASFSTFKCYGVSPTKLNDLCFTNVYADSFVIRGDEVRQIAPGQTGKIADYNYKLPDDFTGCVIAWNSNNLDSKVGGNYNYLYRLFRKSNLKPFERDISTEIYQAGSTPCNGVEGFNCYFPLQSYGFQPTNGVGYQPYRVVVLSFELLHAPATVCGPKKSTNLVKNKCVNFNFNGLTGTGVLTESNKKFLPFQQFGRDIADTTDAVRDPQTLEILDITPCSFGGVSVITPGTNTSNQVAVLYQGVNCTEVPVAIHADQLTPTWRVYSTGSNVFQTRAGCLIGAEHVNNSYECDIPIGAGICASYQTQTNSPRRARSVASQSIIAYTMSLGAENSVAYSNNSIAIPTNFTISVTTEILPVSMTKTSVDCTMYICGDSTECSNLLLQYGSFCTQLNRALTGIAVEQDKNTQEVFAQVKQIYKTPPIKDFGGFNFSQILPDPSKPSKRSFIEDLLFNKVTLADAGFIKQYGDCLGDIAARDLICAQKFNGLTVLPPLLTDEMIAQYTSALLAGTITSGWTFGAGAALQIPFAMQMAYRFNGIGVTQNVLYENQKLIANQFNSAIGKIQDSLSSTASALGKLQDVVNQNAQALNTLVKQLSSNFGAISSVLNDILSRLDPPEAEVQIDRLITGRLQSLQTYVTQQLIRAAEIRASANLAATKMSECVLGQSKRVDFCGKGYQLMSFPQSAPHGVVFLNVTYVPAQEKNFTTAPAICNDGKAHFPREGVFVSNGTNWFVTQRNFYEPQIITTDNTFVSGNCDVVIGIVNNTVYDPLQPELDSFKEELDKYFKNHTSPDVDLGDISGINASVVNIQKEIDRLNEVAKNLNESLIDLQELGKYEQYIKGGGSGGGQIYEGKLTAEGLRFGIVASRFNHALVDRLVEGAIDAIVRHGGREEDITLVRVPGSWEIPVAAGELARKEDIDAVIAIGVLIRGATPHFDYIASEVSKGLADLSLELRKPITFGVITADTLEQAIERAGTKHGNKGWEAALSAIEMANLFKSLR

SEQ ID NO: 3953 - protein, 1371 aa, Artificial Sequence
  SARS-CoV-2/USA/WI-13/2020__EPI_ISL_417516 spike protein (1-1211)(K986P_V987P_ H1048Q_H1064N_ H1083N_H1101N) LumSynth construct
MFVFLVLLPLVSSQCVNLTTRTQLPPAYTNSFTRGVYYPDKVFRSSVLHSTQDLFLPFFSNVTWFHAIHVSGTNGTKRFDNPVLPFNDGVYFASTEKSNIIRGWIFGTTLDSKTQSLLIVNNATNVVIKVCEFQFCNDPFLGVYYHKNNKSWMESEFRVYSSANNCTFEYVSQPFLMDLEGKQGNFKNLREFVFKNIDGYFKIYSKHTPINLVRDLPQGFSALEPLVDLPIGINITRFQTLLALHRSYLTPGDSSSGWTAGAAAYYVGYLQPRTFLLKYNENGTITDAVDCALDPLSETKCTLKSFTVEKGIYQTSNFRVLPTESIVRFPNITNLCPFGEVFNATRFASVYAWNRKRISNCVADYSVLYNSASFSTFKCYGVSPTKLNDLCFTNVYADSFVIRGDEVRQIAPGQTGKIADYNYKLPDDFTGCVIAWNSNNLDSKVGGNYNYLYRLFRKSNLKPFERDISTEIYQAGSTPCNGVEGFNCYFPLQSYGFQPTNGVGYQPYRVVVLSFELLHAPATVCGPKKSTNLVKNKCVNFNFNGLTGTGVLTESNKKFLPFQQFGRDIADTTDAVRDPQTLEILDITPCSFGGVSVITPGTNTSNQVAVLYQGVNCTEVPVAIHADQLTPTWRVYSTGSNVFQTRAGCLIGAEHVNNSYECDIPIGAGICASYQTQTNSPRRARSVASQSIIAYTMSLGAENSVAYSNNSIAIPTNFTISVTTEILPVSMTKTSVDCTMYICGDSTECSNLLLQYGSFCTQLNRALTGIAVEQDKNTQEVFAQVKQIYKTPPIKDFGGFNFSQILPDPSKPSKRSFIEDLLFNKVTLADAGFIKQYGDCLGDIAARDLICAQKFNGLTVLPPLLTDEMIAQYTSALLAGTITSGWTFGAGAALQIPFAMQMAYRFNGIGVTQNVLYENQKLIANQFNSAIGKIQDSLSSTASALGKLQDVVNQNAQALNTLVKQLSSNFGAISSVLNDILSRLDPPEAEVQIDRLITGRLQSLQTYVTQQLIRAAEIRASANLAATKMSECVLGQSKRVDFCGKGYQLMSFPQSAPHGVVFLNVTYVPAQEKNFTTAPAICNDGKAHFPREGVFVSNGTNWFVTQRNFYEPQIITTDNTFVSGNCDVVIGIVNNTVYDPLQPELDSFKEELDKYFKNHTSPDVDLGDISGINASVVNIQKEIDRLNEVAKNLNESLIDLQELGKYEQYIKGGGSGGGQIYEGKLTAEGLRFGIVASRFNHALVDRLVEGAIDAIVRHGGREEDITLVRVPGSWEIPVAAGELARKEDIDAVIAIGVLIRGATPHFDYIASEVSKGLADLSLELRKPITFGVITADTLEQAIERAGTKHGNKGWEAALSAIEMANLFKSLR

SEQ ID NO: 3954 - protein, 1370 aa, Artificial Sequence
  SARS-CoV-2/India/1-27/2020__EPI_ISL_413522 spike protein (1-1210)(K985P_V986P_ H1047Q_H1063N_ H1082N_H1100N) LumSynth construct
MFVFLVLLPLVSSQCVNLTTRTQLPPAYTNSFTRGVYYPDKVFRSSVLHSTQDLFLPFFSNVTWFHAIHVSGTNGTKRFDNPVLPFNDGVYFASTEKSNIIRGWIFGTTLDSKTQSLLIVNNATNVVIKVCEFQFCNDPFLGVYHKNNKSWMESEFRVYSSANNCTFEYVSQPFLMDLEGKQGNFKNLREFVFKNIDGYFKIYSKHTPINLVRDLPQGFSALEPLVDLPIGINITRFQTLLALHRSYLTPGDSSSGWTAGAAAYYVGYLQPRTFLLKYNENGTITDAVDCALDPLSETKCTLKSFTVEKGIYQTSNFRVQPTESIVRFPNITNLCPFGEVFNATRFASVYAWNRKRISNCVADYSVLYNSASFSTFKCYGVSPTKLNDLCFTNVYADSFVIRGDEVIQIAPGQTGKIADYNYKLPDDFTGCVIAWNSNNLDSKVGGNYNYLYRLFRKSNLKPFERDISTEIYQAGSTPCNGVEGFNCYFPLQSYGFQPTNGVGYQPYRVVVLSFELLHAPATVCGPKKSTNLVKNKCVNFNFNGLTGTGVLTESNKKFLPFQQFGRDIADTTDAVRDPQTLEILDITPCSFGGVSVITPGTNTSNQVAVLYQDVNCTEVPVAIHADQLTPTWRVYSTGSNVFQTRAGCLIGAEHVNNSYECDIPIGAGICASYQTQTNSPRRARSVASQSIIAYTMSLGAENSVAYSNNSIAIPTNFTISVTTEILPVSMTKTSVDCTMYICGDSTECSNLLLQYGSFCTQLNRALTGIAVEQDKNTQEVFAQVKQIYKTPPIKDFGGFNFSQILPDPSKPSKRSFIEDLLFNKVTLADAGFIKQYGDCLGDIAARDLICAQKFNGLTVLPPLLTDEMIAQYTSALLAGTITSGWTFGAGAALQIPFAMQMAYRFNGIGVTQNVLYENQKLIANQFNSAIGKIQDSLSSTASALGKLQDVVNQNAQALNTLVKQLSSNFGAISSVLNDILSRLDPPEAEVQIDRLITGRLQSLQTYVTQQLIRAAEIRASANLAATKMSECVLGQSKRVDFCGKGYQLMSFPQSAPHGVVFLNVTYVPAQEKNFTTAPAICNDGKAHFPREGVFVSNGTNWFVTQRNFYEPQIITTDNTFVSGNCDVVIGIVNNTVYDPLQPELDSFKEELDKYFKNHTSPDVDLGDISGINASVVNIQKEIDRLNEVAKNLNESLIDLQELGKYEQYIKGGGSGGGQIYEGKLTAEGLRFGIVASRFNHALVDRLVEGAIDAIVRHGGREEDITLVRVPGSWEIPVAAGELARKEDIDAVIAIGVLIRGATPHFDYIASEVSKGLADLSLELRKPITFGVITADTLEQAIERAGTKHGNKGWEAALSAIEMANLFKSLR

SEQ ID NO: 3955 - protein, 1365 aa, Artificial Sequence
  SARS-CoV-2/pangolin/Guangxi/P4L/2017__EPI_ISL_410538 spike protein (1-1205)(K980P_V981P_ H1042Q_H1058N_ H1077N_H1095N) LumSynth construct
MFVFLFVLPLVSSQCVNLTTRTGIPPGYTNSSTRGVYYPDKVFRSSILHLTQDLFLPFFSNVTWFNTINYQGGFKKFDNPVLPFNDGVYFASTEKSNIIRGWIFGTTLDARTQSLLIVNNATNVVIKVCEFQFCTDPFLGVYYHNNNKTWVENEFRVYSSANNCTFEYISQPFLMDLEGKQGNFKNLREFVFKNVDGYFKIYSKHTPIDLVRDLPRGFAALEPLVDLPIGINITRFQTLLALHRSYLTPGNLESGWTTGAAAYYVGYLQQRTFLLSYNQNGTITDAVDCSLDPLSETKCTLKSLTVEKGIYQTSNFRVQPTISIVRFPNITNLCPFGEVFNASKFASVYAWNRKRISNCVADYSVLYNSTSFSTFKCYGVSPTKLNDLCFTNVYADSFVVKGDEVRQIAPGQTGVIADYNYKLPDDFTGCVIAWNSVKQDALTGGNYGYLYRLFRKSKLKPFERDISTEIYQAGSTPCNGQVGLNCYYPLERYGFHPTTGVNYQPFRVVVLSFELLNGPATVCGPKLSTTLVKDKCVNFNFNGLTGTGVLTTSKKQFLPFQQFGRDISDTTDAVRDPQTLEILDITPCSFGGVSVITPGTNTSNQVAVLYQDVNCTEVPMAIHAEQLTPAWRVYSAGANVFQTRAGCLVGAEHVNNSYECDIPVGAGICASYHSMSSLRSVNQRSIIAYTMSLGAENSVAYSNNSIAIPTNFTISVTTEILPVSMTKTSVDCTMYICGDSIECSNLLLQYGSFCTQLNRALTGIAVEQDKNTQEVFAQVKQIYKTPPIKDFGGFNFSQILPDPSKPSKRSFIEDLLFNKVTLADAGFIKQYGDCLGDIAARDLICAQKFNGLTVLPPLLTDEMIAQYTSALLAGTITSGWTFGAGAALQIPFAMQMAYRFNGIGVTQNVLYENQKLIANQFNSAIGKIQDSLSSTASALGKLQDVVNQNAQALNTLVKQLSSNFGAISSVLNDILSRLDPPEAEVQIDRLITGRLQSLQTYVTQQLIRAAEIRASANLAATKMSECVLGQSKRVDFCGKGYQLMSFPQSAPHGVVFLNVTYVPAQEKNFTTAPAICNEGKAHFPREGVFVSNGTNWFITQRNFYEPQIITTDNTFVSGSCDVVIGIVNNTVYDPLQPELDSFKEELDKYFKNHTSPDVDLGDISGINASVVNIQKEIDRLNEVAKNLNESPIDLQELGKYEQYIKGGGSGGGQIYEGKLTAEGLRFGIVASRFNHALVDRLVEGAIDAIVRHGGREEDITLVRVPGSWEIPVAAGELARKEDIDAVIAIGVLIRGATPHFDYIASEVSKGLADLSLELRKPITFGVITADTLEQAIERAGTKHGNKGWEAALSAIEMANLFKSLR

SEQ ID NO: 3956 - protein, 1365 aa, Artificial Sequence
  SARS-CoV-2/pangolin/Guangxi/P5L/2017__EPI_ISL_410540 spike protein (1-1205)(K980P_V981P_ H1042Q_H1058N_ H1077N_H1095N) LumSynth construct
MFVFLFVLPLVSSQCVNLTTRTGIPPGYTNSSTRGVYYPDKVFRSSILHLTQDLFLPFFSNVTWFNTINYQGGFKKFDNPVLPFNDGVYFASTEKSNIIRGWIFGTTLDARTQSLLIVNNATNVVIKVCEFQFCTDPFLGVYYHNNNKTWVENEFRVYSSANNCTFEYISQPFLMDLEGKQGNFKNLREFVFKNVDGYFKIYSKHTPIDLVRDLPRGFAALEPLVDLPIGINITRFQTLLALHRSYLTPGKLESGWTTGAAAYYVGYLQQRTFLLSYNQNGTITDAVDCSLDPLSETKCTLKSLTVEKGIYQTSNFRVQPTISIVRFPNITNLCPFGEVFNASKFASVYAWNRKRISNCVADYSVLYNSTSFSTFKCYGVSPTKLNDLCFTNVYADSFVVKGDEVRQIAPGQTGVIADYNYKLPDDFTGCVIAWNSVKQDALTGGNYGYLYRLFRKSKLKPFERDISTEIYQAGSTPCNGQVGLNCYYPLERYGFHPTTGVNYQPFRVVVLSFELLNGPATVCGPKLSTTLVKDKCVNFNFNGLTGTGVLTTSKKQFLPFQQFGRDISDTTDAVRDPQTLEILDITPCSFGGVSVITPGTNTSNQVAVLYQDVNCTEVPMAIHAEQLTPAWRVYSAGANVFQTRAGCLVGAEHVNNSYECDIPVGAGICASYHSMSSFRSVNQRSIIAYTMSLGAENSVAYSNNSIAIPTNFTISVTTEILPVSMTKTSVDCTMYICGDSIECSNLLLQYGSFCTQLNRALTGIAVEQDKNTQEVFAQVKQIYKTPPIKDFGGFNFSQILPDPSKPSKRSFIEDLLFNKVTLADAGFIKQYGDCLGDIAARDLICAQKFNGLTVLPPLLTDEMIAQYTSALLAGTITSGWTFGAGAALQIPFAMQMAYRFNGIGVTQNVLYENQKLIANQFNSAIGKIQDSLSSTASALGKLQDVVNQNAQALNTLVKQLSSNFGAISSVLNDILSRLDPPEAEVQIDRLITGRLQSLQTYVTQQLIRAAEIRASANLAATKMSECVLGQSKRVDFCGKGYQLMSFPQSAPHGVVFLNVTYVPAQEKNFTTAPAICNEGKAHFPREGVFVSNGTNWFITQRNFYEPQIITTDNTFVSGSCDVVIGIVNNTVYDPLQPELDSFKEELDKYFKNHTSPDVDLGDISGINASVVNIQKEIDRLNEVAKNLNESLIDLQELGKYEQYIKGGGSGGGQIYEGKLTAEGLRFGIVASRFNHALVDRLVEGAIDAIVRHGGREEDITLVRVPGSWEIPVAAGELARKEDIDAVIAIGVLIRGATPHFDYIASEVSKGLADLSLELRKPITFGVITADTLEQAIERAGTKHGNKGWEAALSAIEMANLFKSLR

SEQ ID NO: 3957 - protein, 1365 aa, Artificial Sequence
  SARS-CoV-2/pangolin/Guangxi/P5E/2017__EPI_ISL_410541 spike protein (1-1205)(K980P_V981P_ H1042Q_H1058N_ H1077N_H1095N) LumSynth construct
MFVFLFVLPLVSSQCVNLTTRTGIPPGYTNSSTRGVYYPDKVFRSSILHLTQDLFLPFFSNVTWFNTITYQGGSKKFDNPVLPFNDGVYFASTEKSNIIRGWIFGTTLDARTQSLLIVNNATNVVIKVCEFQFCTDPFLGVYYHNNNKTWVENEFRVYSSANNCTFEYISQPFLMDLEGKQGNFKNLREFVFKNVDGYFKIYSKHTPIDLVRDLPRGFAALEPLVDLPIGINITRFQTLLALHRSYLTPGKLESGWTTGAAAYYVGYLQQRTFLLSYNQNGTITDAVDCSLDPLSETKCTLKSLTVEKGIYQTSNFRVQPTISIVRFPNITNLCPFGEVFNASKFASVYAWNRKRISNCVADYSVLYNSTSFSTFKCYGVSPTKLNDLCFTNVYADSFVVKGDEVRQIAPGQTGVIADYNYKLPDDFTGCVIAWNSVKQDALTGDNYGYLYRLFRKSKLKPFERDISTEIYQAGSTPCNGQVGLNCYYPLERYGFHPTTGVNYQPFRVVVLSFELLNGPATVCGPKLSTTLVKDKCVNFNFNGLTGTGVLTTSKKQFLPFQQFGRDISDTTDAVRDPQTLEILDITPCSFGGVSVITPGTNTSNQVAVLYQDVNCTEVPMAIHAEQLTPAWRVYSAGANVFQTRAGCLVGAEHVNNSYECDIPVGAGICASYHSMSSFRSVNQRSIIAYTMSLGAENSVAYSNNSIAIPTNFTISVTTEILPVSMTKTSVDCTMYICGDSIECSNLLLQYGSFCTQLNRALTGIAVEQDKNTQEVFAQVKQIYKTPPIKDFGGFNFSQILPDPSKPSKRSFIEDLLFNKVTLADAGFIKQYGDCLGDIAARDLICAQKFNGLTVLPPLLTDEMIAQYTSALLAGTITSGWTFGAGAALQIPFAMQMAYRFNGIGVTQNVLYENQKLIANQFNSAIGKIQDSLSSTASALGKLQDVVNQNAQALNTLVKQLSSNFGAISSVLNDILSRLDPPEAEVQIDRLITGRLQSLQTYVTQQLIRAAEIRASANLAATKMSECVLGQSKRVDFCGKGYQLMSFPQSAPHGVVFLNVTYVPAQEKNFTTAPAICNEGKAHFPREGVFVSNGTNWFITQRNFYEPQIITTDNTFVSGSCDVVIGIVNNTVYDPLQPELDSFKEELDKYFKNHTSPDVDLGDISGINASVVNIQKEIDRLNEVAKNLNESLIDLQELGKYEQYIKGGGSGGGQIYEGKLTAEGLRFGIVASRFNHALVDRLVEGAIDAIVRHGGREEDITLVRVPGSWEIPVAAGELARKEDIDAVIAIGVLIRGATPHFDYIASEVSKGLADLSLELRKPITFGVITADTLEQAIERAGTKHGNKGWEAALSAIEMANLFKSLR

SEQ ID NO: 3958 - protein, 1363 aa, Artificial Sequence
  SARS-CoV-2/pangolin/Guangxi/P1E/2017__EPI_ISL_410539 spike protein (1-1203)(K978P_V979P_ H1040Q_H1056N_ H1075N_H1093N) LumSynth construct
MFVFLFVLPLVSSQCVNLTTRTGIQPGYTNSSTRGVYYPDKVFRSSILHLTQDLFLPFFSNVTWFNTINYQGGFKKFDNPVLPFNDGVYFASTEKSNIIRGWIFGTTLDARTQSLLIVNNATNVVIKVCEFQFCTDPFLGVYYHNNNKTWVENEFRVYSSANNCTFEYISQPFLMDLEGKQGNFKNLREFVFKNVDGYFKIYSKHTPIDLVRDLPRGFAALEPLVDLPIGINITRFQTLLALHRSYLTPGKLESGWTTGAAAYYVGYLQQRTFLLSYNQNGTITDAVDCSLDPLSETKCTLKSLTVEKGIYQTSNFRVQPTISIVRFPNITNLCPFGEVFNASKFASVYAWNRKRISNCVADYSVLYNSTSFSTFKCYGVSPTKLNDLCFTNVYADSFVVKGDEVRQIAPGQTGVIADYNYKLPDDFTGCVIAWNSVKQDALTGGNYLYRLFRKSKLKPFERDISTEIYQAGSTPCNGQVGLNCYYPLERYGFHPTTGVNYQPFRVVVLSFELLNGPATVCGPKLSTTLVKDKCVNFNFNGLTGTGVLTTSKKQFLPFQQFGRDISDTTDAVRDPQTLEILDITPCSFGGVSVITPGTNTSNQVAVLYQDVNCTEVPMAIHAEQLTPAWRVYSAGANVFQTRAGCLVGAEHVNNSYECDIPVGAGICASYHSMSSLRSVNQRSIIAYTMSLGAENSVAYSNNSIAIPTNFTISVTTEILPVSMTKTSVDCTMYICGDSIECSNLLLQYGSFCTQLNRALTGIAVEQDKNTQEVFAQVKQIYKTPPIKDFGGFNFSQILPDPSKPSKRSFIEDLLFNKVTLADAGFIKQYGDCLGDIAARDLICAQKFNGLTVLPPLLTDEMIAQYTSALLAGTITSGWTFGAGAALQIPFAMQMAYRFNGIGVTQNVLYENQKLIANQFNSAIGKIQDSLSSTASALGKLQDVVNQNAQALNTLVKQLSSNFGAISSVLNDILSRLDPPEAEVQIDRLITGRLQSLQTYVTQQLIRAAEIRASANLAATKMSECVLGQSKRVDFCGKGYQLMSFPQSAPHGVVFLNVTYVPAQEKNFTTAPAICNEGKAHFPREGVFVSNGTNWFITQRNFYEPQIITTDNTFVSGSCDVVIGIVNNTVYDPLQPELDSFKEELDKYFKNHTSPDVDLGDISGINASVVNIQKEIDRLNEVAKNLNESLIDLQELGKYEQYIKGGGSGGGQIYEGKLTAEGLRFGIVASRFNHALVDRLVEGAIDAIVRHGGREEDITLVRVPGSWEIPVAAGELARKEDIDAVIAIGVLIRGATPHFDYIASEVSKGLADLSLELRKPITFGVITADTLEQAIERAGTKHGNKGWEAALSAIEMANLFKSLR

SEQ ID NO: 3959 - protein, 1371 aa, Artificial Sequence
  SARS-CoV-2/Wuhan/WIV05/2019__EPI_ISL_402128 spike protein (1-1211)(I712C_T1077C) LumSynth construct
MFVFLVLLPLVSSQCVNLTTRTQLPPAYTNSFTRGVYYPDKVFRSSVLHSTQDLFLPFFSNVTWFHAIHVSGTNGTKRFDNPVLPFNDGVYFASTEKSNIIRGWIFGTTLDSKTQSLLIVNNATNVVIKVCEFQFCNDPFLGVYYHKNNKSWMESEFRVYSSANNCTFEYVSQPFLMDLEGKQGNFKNLREFVFKNIDGYFKIYSKHTPINLVRDLPQGFSALEPLVDLPIGINITRFQTLLALHRSYLTPGDSSSGWTAGAAAYYVGYLQPRTFLLKYNENGTITDAVDCALDPLSETKCTLKSFTVEKGIYQTSNFRVQPTESIVRFPNITNLCPFGEVFNATRFASVYAWNRKRISNCVADYSVLYNSASFSTFKCYGVSPTKLNDLCFTNVYADSFVIRGDEVRQIAPGQTGKIADYNYKLPDDFTGCVIAWNSNNLDSKVGGNYNYLYRLFRKSNLKPFERDISTEIYQAGSTPCNGVEGFNCYFPLQSYGFQPTNGVGYQPYRVVVLSFELLHAPATVCGPKKSTNLVKNKCVNFNFNGLTGTGVLTESNKKFLPFQQFGRDIADTTDAVRDPQTLEILDITPCSFGGVSVITPGTNTSNQVAVLYQDVNCTEVPVAIHADQLTPTWRVYSTGSNVFQTRAGCLIGAEHVNNSYECDIPIGAGICASYQTQTNSPRRARSVASQSIIAYTMSLGAENSVAYSNNSCAIPTNFTISVTTEILPVSMTKTSVDCTMYICGDSTECSNLLLQYGSFCTQLNRALTGIAVEQDKNTQEVFAQVKQIYKTPPIKDFGGFNFSQILPDPSKPSKRSFIEDLLFNKVTLADAGFIKQYGDCLGDIAARDLICAQKFNGLTVLPPLLTDEMIAQYTSALLAGTITSGWTFGAGAALQIPFAMQMAYRFNGIGVTQNVLYENQKLIANQFNSAIGKIQDSLSSTASALGKLQDVVNQNAQALNTLVKQLSSNFGAISSVLNDILSRLDKVEAEVQIDRLITGRLQSLQTYVTQQLIRAAEIRASANLAATKMSECVLGQSKRVDFCGKGYHLMSFPQSAPHGVVFLHVTYVPAQEKNFTCAPAICHDGKAHFPREGVFVSNGTHWFVTQRNFYEPQIITTDNTFVSGNCDVVIGIVNNTVYDPLQPELDSFKEELDKYFKNHTSPDVDLGDISGINASVVNIQKEIDRLNEVAKNLNESLIDLQELGKYEQYIKGGGSGGGQIYEGKLTAEGLRFGIVASRFNHALVDRLVEGAIDAIVRHGGREEDITLVRVPGSWEIPVAAGELARKEDIDAVIAIGVLIRGATPHFDYIASEVSKGLADLSLELRKPITFGVITADTLEQAIERAGTKHGNKGWEAALSAIEMANLFKSLR

SEQ ID NO: 3960 - protein, 1367 aa, Artificial Sequence
  SARS-CoV-2/bat/Yunnan/RaTG13/2013__EPI_ISL_402131 spike protein (1-1207)(I708C_T1073C) LumSynth construct
MFVFLVLLPLVSSQCVNLTTRTQLPPAYTNSSTRGVYYPDKVFRSSVLHLTQDLFLPFFSNVTWFHAIHVSGTNGIKRFDNPVLPFNDGVYFASTEKSNIIRGWIFGTTLDSKTQSLLIVNNATNVVIKVCEFQFCNDPFLGVYYHKNNKSWMESEFRVYSSANNCTFEYVSQPFLMDLEGKQGNFKNLREFVFKNIDGYFKIYSKHTPINLVRDLPPGFSALEPLVDLPIGINITRFQTLLALHRSYLTPGDSSSGWTAGAAAYYVGYLQPRTFLLKYNENGTITDAVDCALDPLSETKCTLKSFTVEKGIYQTSNFRVQPTDSIVRFPNITNLCPFGEVFNATTFASVYAWNRKRISNCVADYSVLYNSTSFSTFKCYGVSPTKLNDLCFTNVYADSFVITGDEVRQIAPGQTGKIADYNYKLPDDFTGCVIAWNSKHIDAKEGGNFNYLYRLFRKANLKPFERDISTEIYQAGSKPCNGQTGLNCYYPLYRYGFYPTDGVGHQPYRVVVLSFELLNAPATVCGPKKSTNLVKNKCVNFNFNGLTGTGVLTESNKKFLPFQQFGRDIADTTDAVRDPQTLEILDITPCSFGGVSVITPGTNASNQVAVLYQDVNCTEVPVAIHADQLTPTWRVYSTGSNVFQTRAGCLIGAEHVNNSYECDIPIGAGICASYQTQTNSRSVASQSIIAYTMSLGAENSVAYSNNSCAIPTNFTISVTTEILPVSMTKTSVDCTMYICGDSTECSNLLLQYGSFCTQLNRALTGIAVEQDKNTQEVFAQVKQIYKTPPIKDFGGFNFSQILPDPSKPSKRSFIEDLLFNKVTLADAGFIKQYGDCLGDIAARDLICAQKFNGLTVLPPLLTDEMIAQYTSALLAGTITSGWTFGAGAALQIPFAMQMAYRFNGIGVTQNVLYENQKLIANQFNSAIGKIQDSLSSTASALGKLQDVVNQNAQALNTLVKQLSSNFGAISSVLNDILSRLDKVEAEVQIDRLITGRLQSLQTYVTQQLIRAAEIRASANLAATKMSECVLGQSKRVDFCGKGYHLMSFPQSAPHGVVFLHVTYVPAQEKNFTCAPAICHDGKAHFPREGVFVSNGTHWFVTQRNFYEPQIITTDNTFVSGSCDVVIGIVNNTVYDPLQPELDSFKEELDKYFKNHTSPDVDLGDISGINASVVNIQKEIDRLNEVAKNLNESLIDLQELGKYEQYIKGGGSGGGQIYEGKLTAEGLRFGIVASRFNHALVDRLVEGAIDAIVRHGGREEDITLVRVPGSWEIPVAAGELARKEDIDAVIAIGVLIRGATPHFDYIASEVSKGLADLSLELRKPITFGVITADTLEQAIERAGTKHGNKGWEAALSAIEMANLFKSLR

SEQ ID NO: 3961 - protein, 1371 aa, Artificial Sequence
  SARS-CoV-2/Wuhan/HBCDC-HB-01/2019__EPI_ISL_402132 spike protein (1-1211)(I712C_T1077C) LumSynth construct
MFVFLVLLPLVSSQCVNLTTRTQLPPAYTNSITRGVYYPDKVFRSSVLHSTQDLFLPFFSNVTWFHAIHVSGTNGTKRFDNPVLPFNDGVYFASTEKSNIIRGWIFGTTLDSKTQSLLIVNNATNVVIKVCEFQFCNDPFLGVYYHKNNKSWMESEFRVYSSANNCTFEYVSQPFLMDLEGKQGNFKNLREFVFKNIDGYFKIYSKHTPINLVRDLPQGFSALEPLVDLPIGINITRFQTLLALHRSYLTPGDSSSGWTAGAAAYYVGYLQPRTFLLKYNENGTITDAVDCALDPLSETKCTLKSFTVEKGIYQTSNFRVQPTESIVRFPNITNLCPFGEVFNATRFASVYAWNRKRISNCVADYSVLYNSASFSTFKCYGVSPTKLNDLCFTNVYADSFVIRGDEVRQIAPGQTGKIADYNYKLPDDFTGCVIAWNSNNLDSKVGGNYNYLYRLFRKSNLKPFERDISTEIYQAGSTPCNGVEGFNCYFPLQSYGFQPTNGVGYQPYRVVVLSFELLHAPATVCGPKKSTNLVKNKCVNFNFNGLTGTGVLTESNKKFLPFQQFGRDIADTTDAVRDPQTLEILDITPCSFGGVSVITPGTNTSNQVAVLYQDVNCTEVPVAIHADQLTPTWRVYSTGSNVFQTRAGCLIGAEHVNNSYECDIPIGAGICASYQTQTNSPRRARSVASQSIIAYTMSLGAENSVAYSNNSCAIPTNFTISVTTEILPVSMTKTSVDCTMYICGDSTECSNLLLQYGSFCTQLNRALTGIAVEQDKNTQEVFAQVKQIYKTPPIKDFGGFNFSQILPDPSKPSKRSFIEDLLFNKVTLADAGFIKQYGDCLGDIAARDLICAQKFNGLTVLPPLLTDEMIAQYTSALLAGTITSGWTFGAGAALQIPFAMQMAYRFNGIGVTQNVLYENQKLIANQFNSAIGKIQDSLSSTASALGKLQDVVNQNAQALNTLVKQLSSNFGAISSVLNDILSRLDKVEAEVQIDRLITGRLQSLQTYVTQQLIRAAEIRASANLAATKMSECVLGQSKRVDFCGKGYHLMSFPQSAPHGVVFLHVTYVPAQEKNFTCAPAICHDGKAHFPREGVFVSNGTHWFVTQRNFYEPQIITTDNTFVSGNCDVVIGIVNNTVYDPLQPELDSFKEELDKYFKNHTSPDVDLGDISGINASVVNIQKEIDRLNEVAKNLNESLIDLQELGKYEQYIKGGGSGGGQIYEGKLTAEGLRFGIVASRFNHALVDRLVEGAIDAIVRHGGREEDITLVRVPGSWEIPVAAGELARKEDIDAVIAIGVLIRGATPHFDYIASEVSKGLADLSLELRKPITFGVITADTLEQAIERAGTKHGNKGWEAALSAIEMANLFKSLR

SEQ ID NO: 3962 - protein, 1371 aa, Artificial Sequence
  SARS-CoV-2/Guangdong/20SF028/2020__EPI_ISL_403936 spike protein (1-1211)(I712C_T1077C) LumSynth construct
MFVFLVLLPLVSSQCVNLTTRTQLPPAYTNSFTRGVYYPDKVFRSSVLYSTQDLFLPFFSNVTWFHAIHVSGTNGTKRFDNPVLPFNDGVYFASTEKSNIIRGWIFGTTLDSKTQSLLIVNNATNVVIKVCEFQFCNDPFLGVYYHKNNKSWMESEFRVYSSANNCTFEYVSQPFLMDLEGKQGNFKNLREFVFKNIDGYFKIYSKHTPINLVRDLPQGFSALEPLVDLPIGINITRFQTLLALHRSYLTPGDSSSGWTAGAAAYYVGYLQPRTFLLKYNENGTITDAVDCALDPLSETKCTLKSFTVEKGIYQTSNFRVQPTESIVRFPNITNLCPFGEVFNATRFASVYAWNRKRISNCVADYSVLYNSASFSTFKCYGVSPTKLNDLCFTNVYADSFVIRGDEVRQIAPGQTGKIADYNYKLPDDFTGCVIAWNSNNLDSKVGGNYNYLYRLFRKSNLKPFERDISTEIYQAGSTPCNGVEGFNCYFPLQSYGFQPTNGVGYQPYRVVVLSFELLHAPATVCGPKKSTNLVKNKCVNFNFNGLTGTGVLTESNKKFLPFQQFGRDIADTTDAVRDPQTLEILDITPCSFGGVSVITPGTNTSNQVAVLYQDVNCTEVPVAIHADQLTPTWRVYSTGSNVFQTRAGCLIGAEHVNNSYECDIPIGAGICASYQTQTNSPRRARSVASQSIIAYTMSLGAENSVAYSNNSCAIPTNFTISVTTEILPVSMTKTSVDCTMYICGDSTECSNLLLQYGSFCTQLNRALTGIAVEQDKNTQEVFAQVKQIYKTPPIKDFGGFNFSQILPDPSKPSKRSFIEDLLFNKVTLADAGFIKQYGDCLGDIAARDLICAQKFNGLTVLPPLLTDEMIAQYTSALLAGTITSGWTFGAGAALQIPFAMQMAYRFNGIGVTQNVLYENQKLIANQFNSAIGKIQDSLSSTASALGKLQDVVNQNAQALNTLVKQLSSNFGAISSVLNDILSRLDKVEAEVQIDRLITGRLQSLQTYVTQQLIRAAEIRASANLAATKMSECVLGQSKRVDFCGKGYHLMSFPQSAPHGVVFLHVTYVPAQEKNFTCAPAICHDGKAHFPREGVFVSNGTHWFVTQRNFYEPQIITTDNTFVSGNCDVVIGIVNNTVYDPLQPELDSFKEELDKYFKNHTSPDVDLGDISGINASVVNIQKEIDRLNEVAKNLNESLIDLQELGKYEQYIKGGGSGGGQIYEGKLTAEGLRFGIVASRFNHALVDRLVEGAIDAIVRHGGREEDITLVRVPGSWEIPVAAGELARKEDIDAVIAIGVLIRGATPHFDYIASEVSKGLADLSLELRKPITFGVITADTLEQAIERAGTKHGNKGWEAALSAIEMANLFKSLR

SEQ ID NO: 3963 - protein, 1371 aa, Artificial Sequence
  SARS-CoV-2/Shenzhen/SZTH-001/2020__EPI_ISL_406592 spike protein (1-1211)(I712C_T1077C) LumSynth construct
MFVFLVLLPLVSSQCVNLTTRTQLPPAYTNSFTRGVYYPDKVFRSSVLHSTQDLFLPFFSNVTWFHAIHVSGTNGTKRFDNPVLPFNDGVYFASTEKSNIIRGWIFGTTLDSKTQSLLIVNNATNVVIKVCEFQFCNDPFLGVYYHKNNKSWMESEFRVYSSANNCTFEYVSQPFLMDLEGKQGNFKNLREFVFKNIDGYFKIYSKHTPINLVRDLPQGFSALEPLVDLPIGINITRFQTLLALHRSYLTPGDSSSGWTAGAAAYYVGYLQPRTFLLKYNENGTITDAVDCALDPLSETKCTLKSFTVEKGIYQTSNFRVQPTESIVRFPNITNLCPFGEVFNATRFASVYAWNRKRISNCVADYSVLYNSASFSTFKCYGVSPTKLNDLCFTNVYADSFVIRGDEVRQIAPGQTGKIADYNYKLPDDFTGCVIAWNSNNLDSKVGGNYNYLYRLFRKSNLKPFERDISTEIYQAGSTPCNGVEGFNCYFPLQSYGFQPTNGVGYQPYRVVVLSFELLHAPATVCGPKKSTNLVKNKCVNFNFNGLTGTGVLTESNKKFLPFQQFGRDIADTTDAVRDPQTLEILDITPCSFGGVSVITPGTNTSNQVAVLYQDVNCTEVPVAIHADQLTPTWRVYSTGSNVFQTRAGCLIGAEHVNNSYECDIPIGAGICASYQTQTNSPRRARSVASQSIIAYTMSLGAENSVAYSNNSCAIPTNFTISVTTEILPVSMTKTSVDCTMYICGDSTECSNLLLQYGSFCTQLNRALTGIAVEQDKNTQEVFAQVKQIYKTPPIKDFGGFNFSQILPDPSKPSKRSFIEDLLFNKVTLADAGFIKQYGDCLGDIAARDLICAQKFNGLTVLPPLLTDEMIAQYTSALLAGTITSGWTFGAGAALQIPFAMQMAYRFNGIGVTQNVLYENQKLIANQFNSAIGKIQDSLSSTASALGKLQDVVNQNAQALNTLVKQLSSNFGAISSVLNDILSRLDKVEAEVQIDRLITGRLQSLQTYVTQQLIRAAEIRASANLAATKMSECVLGQSKRVDFCGKGYHLMSFPQSAPHGVVFLHVTYVPAQEKNFTCAPAICHDGKAHFPREGVFVSNGTHWFVTQRNFYEPQIITTDNTFVSGNCDVLIGIVNNTVYDPLQPELDSFKEELDKYFKNHTSPDVDLGDISGINASVVNIQKEIDRLNEVAKNLNESLIDLQELGKYEQYIKGGGSGGGQIYEGKLTAEGLRFGIVASRFNHALVDRLVEGAIDAIVRHGGREEDITLVRVPGSWEIPVAAGELARKEDIDAVIAIGVLIRGATPHFDYIASEVSKGLADLSLELRKPITFGVITADTLEQAIERAGTKHGNKGWEAALSAIEMANLFKSLR

SEQ ID NO: 3964 - protein, 1371 aa, Artificial Sequence
  SARS-CoV-2/Shenzhen/SZTH-004/2020__EPI_ISL_406595 spike protein (1-1211)(I712C_T1077C) LumSynth construct
MFVFLVLLPLVSSQCVNLTTRTQLPPAYTNSFTRGVYYPDKVFRSSVLHSTQDLFLPFFSNVTWFHAIHVSGTNGTKRFDNPVLPFNDGVYFASTEKSNIIRGWIFGTTLDSKTQSLLIVNNATNVVIKVCEFQFCNDPFLGVYYHKNNKSWMESEFRVYSSANNCTFEYVSQPFLMDLEGKQGNFKNLREFVFKNIDGYFKIYSKHTPINLVRDLPQGFSALEPLVDLPIGINITRFQTLLALHRSYLTPGDSSSGWTAGAAAYYVGYLQPRTFLLKYNENGTITDAVDCALDPLSETKCTLKSFTVEKGIYQTSNFRVQPTESIVRFPNITNLCPFGEVFNATRFASVYAWDRKRISNCVAYYSVLYNSASFSTFKCYGVSPTKLNDLCFTNVYADSFVIRGDEVRQIAPGQTGKIADYNYKLPDDFTGCVIAWNSNNLDSKVGGNYNYLYRLFRKSNLKPFERDISTEIYQAGSTPCNGVEGFNCYFPLQSYGFQPTNGVGYQPYRVVVLSFELLHAPATVCGPKKSTNLVKNKCVNFNFNGLTGTGVLTESNKKFLPFQQFGRDIADTTDAVRDPQTLEILDITPCSFGGVSVITPGTNTSNQVAVLYQDVNCTEVPVAIHADQLTPTWRVYSTGSNVFQTRAGCLIGAEHVNNSYECDIPIGAGICASYQTQTNSPRRARSVASQSIIAYTMSLGAENSVAYSNNSCAIPTNFTISVTTEILPVSMTKTSVDCTMYICGDSTECSNLLLQYGSFCTQLNRALTGIAVEQDKNTQEVFAQVKQIYKTPPIKDFGGFNFSQILPDPSKPSKRSFIEDLLFNKVTLADAGFIKQYGDCLGDIAARDLICAQKFNGLTVLPPLLTDEMIAQYTSALLAGTITSGWTFGAGAALQIPFAMQMAYRFNGIGVTQNVLYENQKLIANQFNSAIGKIQDSLSSTASALGKLQDVVNQNAQALNTLVKQLSSNFGAISSVLNDILSRLDKVEAEVQIDRLITGRLQSLQTYVTQQLIRAAEIRASANLAATKMSECVLGQSKRVDFCGKGYHLMSFPQSAPHGVVFLHVTYVPAQEKNFTCAPAICHDGKAHFPREGVFVSNGTHWFVTQRNFYEPQIITTDNTFVSGNCDVVIGIVNNTVYDPLQPELDSFKEELDKYFKNHTSPDVDLGDISGINASVVNIQKEIDRLNEVAKNLNESLIDLQELGKYEQYIKGGGSGGGQIYEGKLTAEGLRFGIVASRFNHALVDRLVEGAIDAIVRHGGREEDITLVRVPGSWEIPVAAGELARKEDIDAVIAIGVLIRGATPHFDYIASEVSKGLADLSLELRKPITFGVITADTLEQAIERAGTKHGNKGWEAALSAIEMANLFKSLR

SEQ ID NO: 3965 - protein, 1371 aa, Artificial Sequence
  SARS-CoV-2/France/IDF0372/2020__EPI_ISL_406596 spike protein (1-1211)(I712C_T1077C) LumSynth construct
MFVFLVLLPLVSSQCVNLTTRTQLPPAYTNSFTRGVYYPDKVFRSSVLHSTQDLFLPFFSNVTWFHAIHVSGTNGTKRFDNPVLPFNDGVYFASTEKSNIIRGWIFGTTLDSKTQSLLIVNNATNVVIKVCEFQFCNDPFLGVYYHKNNKSWMESEFRVYSSANNCTFEYVSQPFLMDLEGKQGNFKNLREFVFKNIDGYFKIYSKHTPINLVRDLPQGFSALEPLVDLPIGINITRFQTLLALHRSYLTPGDSSSGWTAGAAAYYVGYLQPRTFLLKYNENGTITDAVDCALDPLSETKCTLKSFTVEKGIYQTSNFRVQPTESIVRFPNITNLCPFGEVFNATRFASVYAWNRKRISNCVADYSFLYNSASFSTFKCYGVSPTKLNDLCFTNVYADSFVIRGDEVRQIAPGQTGKIADYNYKLPDDFTGCVIAWNSNNLDSKVGGNYNYLYRLFRKSNLKPFERDISTEIYQAGSTPCNGVEGFNCYFPLQSYGFQPTNGVGYQPYRVVVLSFELLHAPATVCGPKKSTNLVKNKCVNFNFNGLTGTGVLTESNKKFLPFQQFGRDIADTTDAVRDPQTLEILDITPCSFGGVSVITPGTNTSNQVAVLYQDVNCTEVPVAIHADQLTPTWRVYSTGSNVFQTRAGCLIGAEHVNNSYECDIPIGAGICASYQTQTNSPRRARSVASQSIIAYTMSLGAENSVAYSNNSCAIPTNFTISVTTEILPVSMTKTSVDCTMYICGDSTECSNLLLQYGSFCTQLNRALTGIAVEQDKNTQEVFAQVKQIYKTPPIKDFGGFNFSQILPDPSKPSKRSFIEDLLFNKVTLADAGFIKQYGDCLGDIAARDLICAQKFNGLTVLPPLLTDEMIAQYTSALLAGTITSGWTFGAGAALQIPFAMQMAYRFNGIGVTQNVLYENQKLIANQFNSAIGKIQDSLSSTASALGKLQDVVNQNAQALNTLVKQLSSNFGAISSVLNDILSRLDKVEAEVQIDRLITGRLQSLQTYVTQQLIRAAEIRASANLAATKMSECVLGQSKRVDFCGKGYHLMSFPQSAPHGVVFLHVTYVPAQEKNFTCAPAICHDGKAHFPREGVFVSNGTHWFVTQRNFYEPQIITTDNTFVSGNCDVVIGIVNNTVYDPLQPELDSFKEELDKYFKNHTSPDVDLGDISGINASVVNIQKEIDRLNEVAKNLNESLIDLQELGKYEQYIKGGGSGGGQIYEGKLTAEGLRFGIVASRFNHALVDRLVEGAIDAIVRHGGREEDITLVRVPGSWEIPVAAGELARKEDIDAVIAIGVLIRGATPHFDYIASEVSKGLADLSLELRKPITFGVITADTLEQAIERAGTKHGNKGWEAALSAIEMANLFKSLR

SEQ ID NO: 3966 - protein, 1371 aa, Artificial Sequence
  SARS-CoV-2/Australia/VIC01/2020__EPI_ISL_406844 spike protein (1-1211)(I712C_T1077C) LumSynth construct
MFVFLVLLPLVSSQCVNLTTRTQLPPAYTNSFTRGVYYPDKVFRSSVLHSTQDLFLPFFSNVTWFHAIHVSGTNGTKRFDNPVLPFNDGVYFASTEKSNIIRGWIFGTTLDSKTQSLLIVNNATNVVIKVCEFQFCNDPFLGVYYHKNNKSWMESEFRVYSSANNCTFEYVSQPFLMDLEGKQGNFKNLREFVFKNIDGYFKIYSKHTPINLVRDLPQGFSALEPLVDLPIGINITRFQTLLALHRRYLTPGDSSSGWTAGAAAYYVGYLQPRTFLLKYNENGTITDAVDCALDPLSETKCTLKSFTVEKGIYQTSNFRVQPTESIVRFPNITNLCPFGEVFNATRFASVYAWNRKRISNCVADYSVLYNSASFSTFKCYGVSPTKLNDLCFTNVYADSFVIRGDEVRQIAPGQTGKIADYNYKLPDDFTGCVIAWNSNNLDSKVGGNYNYLYRLFRKSNLKPFERDISTEIYQAGSTPCNGVEGFNCYFPLQSYGFQPTNGVGYQPYRVVVLSFELLHAPATVCGPKKSTNLVKNKCVNFNFNGLTGTGVLTESNKKFLPFQQFGRDIADTTDAVRDPQTLEILDITPCSFGGVSVITPGTNTSNQVAVLYQDVNCTEVPVAIHADQLTPTWRVYSTGSNVFQTRAGCLIGAEHVNNSYECDIPIGAGICASYQTQTNSPRRARSVASQSIIAYTMSLGAENSVAYSNNSCAIPTNFTISVTTEILPVSMTKTSVDCTMYICGDSTECSNLLLQYGSFCTQLNRALTGIAVEQDKNTQEVFAQVKQIYKTPPIKDFGGFNFSQILPDPSKPSKRSFIEDLLFNKVTLADAGFIKQYGDCLGDIAARDLICAQKFNGLTVLPPLLTDEMIAQYTSALLAGTITSGWTFGAGAALQIPFAMQMAYRFNGIGVTQNVLYENQKLIANQFNSAIGKIQDSLSSTASALGKLQDVVNQNAQALNTLVKQLSSNFGAISSVLNDILSRLDKVEAEVQIDRLITGRLQSLQTYVTQQLIRAAEIRASANLAATKMSECVLGQSKRVDFCGKGYHLMSFPQSAPHGVVFLHVTYVPAQEKNFTCAPAICHDGKAHFPREGVFVSNGTHWFVTQRNFYEPQIITTDNTFVSGNCDVVIGIVNNTVYDPLQPELDSFKEELDKYFKNHTSPDVDLGDISGINASVVNIQKEIDRLNEVAKNLNESLIDLQELGKYEQYIKGGGSGGGQIYEGKLTAEGLRFGIVASRFNHALVDRLVEGAIDAIVRHGGREEDITLVRVPGSWEIPVAAGELARKEDIDAVIAIGVLIRGATPHFDYIASEVSKGLADLSLELRKPITFGVITADTLEQAIERAGTKHGNKGWEAALSAIEMANLFKSLR

SEQ ID NO: 3967 - protein, 1371 aa, Artificial Sequence
  SARS-CoV-2/Germany/BavPat1/2020__EPI_ISL_406862 spike protein (1-1211)(I712C_T1077C) LumSynth construct
MFVFLVLLPLVSSQCVNLTTRTQLPPAYTNSFTRGVYYPDKVFRSSVLHSTQDLFLPFFSNVTWFHAIHVSGTNGTKRFDNPVLPFNDGVYFASTEKSNIIRGWIFGTTLDSKTQSLLIVNNATNVVIKVCEFQFCNDPFLGVYYHKNNKSWMESEFRVYSSANNCTFEYVSQPFLMDLEGKQGNFKNLREFVFKNIDGYFKIYSKHTPINLVRDLPQGFSALEPLVDLPIGINITRFQTLLALHRSYLTPGDSSSGWTAGAAAYYVGYLQPRTFLLKYNENGTITDAVDCALDPLSETKCTLKSFTVEKGIYQTSNFRVQPTESIVRFPNITNLCPFGEVFNATRFASVYAWNRKRISNCVADYSVLYNSASFSTFKCYGVSPTKLNDLCFTNVYADSFVIRGDEVRQIAPGQTGKIADYNYKLPDDFTGCVIAWNSNNLDSKVGGNYNYLYRLFRKSNLKPFERDISTEIYQAGSTPCNGVEGFNCYFPLQSYGFQPTNGVGYQPYRVVVLSFELLHAPATVCGPKKSTNLVKNKCVNFNFNGLTGTGVLTESNKKFLPFQQFGRDIADTTDAVRDPQTLEILDITPCSFGGVSVITPGTNTSNQVAVLYQGVNCTEVPVAIHADQLTPTWRVYSTGSNVFQTRAGCLIGAEHVNNSYECDIPIGAGICASYQTQTNSPRRARSVASQSIIAYTMSLGAENSVAYSNNSCAIPTNFTISVTTEILPVSMTKTSVDCTMYICGDSTECSNLLLQYGSFCTQLNRALTGIAVEQDKNTQEVFAQVKQIYKTPPIKDFGGFNFSQILPDPSKPSKRSFIEDLLFNKVTLADAGFIKQYGDCLGDIAARDLICAQKFNGLTVLPPLLTDEMIAQYTSALLAGTITSGWTFGAGAALQIPFAMQMAYRFNGIGVTQNVLYENQKLIANQFNSAIGKIQDSLSSTASALGKLQDVVNQNAQALNTLVKQLSSNFGAISSVLNDILSRLDKVEAEVQIDRLITGRLQSLQTYVTQQLIRAAEIRASANLAATKMSECVLGQSKRVDFCGKGYHLMSFPQSAPHGVVFLHVTYVPAQEKNFTCAPAICHDGKAHFPREGVFVSNGTHWFVTQRNFYEPQIITTDNTFVSGNCDVVIGIVNNTVYDPLQPELDSFKEELDKYFKNHTSPDVDLGDISGINASVVNIQKEIDRLNEVAKNLNESLIDLQELGKYEQYIKGGGSGGGQIYEGKLTAEGLRFGIVASRFNHALVDRLVEGAIDAIVRHGGREEDITLVRVPGSWEIPVAAGELARKEDIDAVIAIGVLIRGATPHFDYIASEVSKGLADLSLELRKPITFGVITADTLEQAIERAGTKHGNKGWEAALSAIEMANLFKSLR

SEQ ID NO: 3968 - protein, 1371 aa, Artificial Sequence
  SARS-CoV-2/Wuhan/HBCDC-HB-02/2020__EPI_ISL_412978 spike protein (1-1211)(I712C_T1077C) LumSynth construct
MFVFLVLLPLVSSQCVNLTTRTQLPPAYTNSFTRGVYYPDKVFRSSVLHSTQDLFLPFFSNVTWFHAIHVSGTNGTKRFDNPVLPFNDGVYFASTEKSNIIRGWIFGTTLDSKTQSLLIVNNATNVVIKVCEFQFCNDPFLGVYYHKNNKSWMESEFRVYSSANNCTFEYVSQPFLMDLEGKQGNFKNLREFVFKNIDGYFKIYSKHTPINLVRDLPQGFSALEPLVDLPIGINITRFQTLLALHRSYLTPGDSSSGWTAGAAAYYVGYLQPRTFLLKYNENGTITDAVDCALDPLSETKCTLKSFTVEKGIYQTSNFRVQPTESIVRFPNITNLCPFGEVFNATRFASVYAWNRKRISNCVADYSVLYNSASFSTFKCYGVSPTKLNDLCFTNVYADSFVIRGDEVRQIAPGQTGKIADYNYKLPDDFTGCVIAWNSNNLDSKVGGNYNYLYRLFRKSNLKPFERDISTEIYQAGSTPCNGVEGFNCYFPLQSYGFQPTNGVGYQPYRVVVLSFELLHAPATVCGPKKSTNLVKNKCVNFNFNGLTGTGVLTESNKKFLPFQQFGRDIADTTDAVRDPQTLEILDITPCSFGGVSVITPGTNTSNQVAVLYQDVNCTEVPVAIHADQLTPTWRVYSTGSNVFQTRAGCLIGAEHVNNSYECDIPIGAGICASYQTQTNSPRRARSVASQSIIAYTMSLGAENSVAYSNNSCAIPTNFTISVTTEILPVSMTKTSVDCTMYICGDSTECSNFLLQYGSFCTQLNRALTGIAVEQDKNTQEVFAQVKQIYKTPPIKDFGGFNFSQILPDPSKPSKRSFIEDLLFNKVTLADAGFIKQYGDCLGDIAARDLICAQKFNGLTVLPPLLTDEMIAQYTSALLAGTITSGWTFGAGAALQIPFAMQMAYRFNGIGVTQNVLYENQKLIANQFNSAIGKIQDSLSSTASALGKLQDVVNQNAQALNTLVKQLSSNFGAISSVLNDILSRLDKVEAEVQIDRLITGRLQSLQTYVTQQLIRAAEIRASANLAATKMSECVLGQSKRVDFCGKGYHLMSFPQSAPHGVVFLHVTYVPAQEKNFTCAPAICHDGKAHFPREGVFVSNGTHWFVTQRNFYEPQIITTDNTFVSGNCDVVIGIVNNTVYDPLQPELDSFKEELDKYFKNHTSPDVDLGDISGINASVVNIQKEIDRLNEVAKNLNESLIDLQELGKYEQYIKGGGSGGGQIYEGKLTAEGLRFGIVASRFNHALVDRLVEGAIDAIVRHGGREEDITLVRVPGSWEIPVAAGELARKEDIDAVIAIGVLIRGATPHFDYIASEVSKGLADLSLELRKPITFGVITADTLEQAIERAGTKHGNKGWEAALSAIEMANLFKSLR

SEQ ID NO: 3969 - protein, 1371 aa, Artificial Sequence
  SARS-CoV-2/Australia/QLD02/2020__EPI_ISL_407896 spike protein (1-1211)(I712C_T1077C) LumSynth construct
MFVFLVLLPLVSSQCVNLTTRTQLPPAYTNSFTRGVYYPDKVFRSSVLHSTQDLFLPFFSNVTWFHAIHVSGTNGTKRFDNPVLPFNDGVYFASTEKSNIIRGWIFGTTLDSKTQSLLIVNNATNVVIKVCEFQFCNDPFLGVYYHKNNKSWMESEFRVYSSANNCTFEYVSQPFLMDLEGKQGNFKNLREFVFKNIDGYFKIYSKHTPINLVRDLPQGFSALEPLVDLPIGINITRFQTLLALHRSYLTPGDSSSGWTAGAAAYYVGYLQPRTFLLKYNENGTITDAVDCALDPLSETKCTLKSFTVEKGIYQTSNFRVQPTESIVRFPNITNLCPFGEVFNATRFASVYAWNRKRISNCVADYSVLYNSASFSTFKCYGVSPTKLNDLCFTNVYADSFVIRGDEVRQIAPGQTGKIADYNYKLPDDFTGCVIAWNSNNLDSKVGGNYNYLYRLFRKSNLKPFERDISTEIYQAGSTPCNGVEGFNCYFPLQSYGFQPTNGVGYQPYRVVVLSFELLHAPATVCGPKKSTNLVKNKCVNFNFNGLTGTGVLTESNKKFLPFQQFGRDIADTTDAVRDPQTLEILDITPCSFGGVSVITPGTNTSNQVAVLYQDVNCTEVPVAIHADQLTPTWRVYSTGSNVFQTRAGCLIGAEHVNNSYECDIPIGAGICASYQTQTNSPRRARSVASQSIIAYTMSLGAENSVAYSNNSCAIPTNFTISVTTEILPVSMTKTSVDCTMYICGDSTECSNLLLQYGSFCTQLNRALTGIAVEQDKNTQEVFAQVKQIYKTPPIKDFGGFNFSQILPDPSKPSKRSFIEDLLFNKVTLADAGFIKQYGDCLGDIAARDLICAQKFNGLTVLPPLLTDEMIAQYTSALLAGTITSGWTFGAGAALQIPFAMQMAYRFNGIGVTQNVLYENQKLIANQFNSAIGKIQDSLSSTASALGKLQDVVNQNAQALNTLVKQLSSNFGAISSVLNDILSRLDKVEAEVQIDRLITGRLQSLQTYVTQQLIRAAEIRASANLAATKMSECVLGQSKRVDFCGKGYHLMSFPQSAPHGVVFLHVTYVPAQEKNFTCAPAICHDGKAHFPREGVFVSNGTHWFVTQRNFYEPQIITTDNTFVSGNCDVVIGIVNNTVYDPLQLELDSFKEELDKYFKNHTSPDVDLGDISGINASVVNIQKEIDRLNEVAKNLNESLIDLQELGKYEQYIKGGGSGGGQIYEGKLTAEGLRFGIVASRFNHALVDRLVEGAIDAIVRHGGREEDITLVRVPGSWEIPVAAGELARKEDIDAVIAIGVLIRGATPHFDYIASEVSKGLADLSLELRKPITFGVITADTLEQAIERAGTKHGNKGWEAALSAIEMANLFKSLR

SEQ ID NO: 3970 - protein, 1371 aa, Artificial Sequence
  SARS-CoV-2/India/1-31/2020__EPI_ISL_413523 spike protein (1-1211)(I712C_T1077C) LumSynth construct
MFVFLVLLPLVSSQCVNLTTRTQLPPAYTNSFTRGVYYPDKVFRSSVLHSTQDLFLPFFSNVTWFHAIHVSGTNGTKRFDNPVLPFNDGVYFASTEKSNIIRGWIFGTTLDSKTQSLLIVNNATNVVIKVCEFQFCNDPFLGVYYHKNNKSWMESEFRVYSSANNCTFEYVSQPFLMDLEGKQGNFKNLREFVFKNIDGYFKIYSKHTPINLVRDLPQGFSALEPLVDLPIGINITRFQTLLALHRSYLTPGDSSSGWTAGAAAYYVGYLQPRTFLLKYNENGTITDAVDCALDPLSETKCTLKSFTVEKGIYQTSNFRVQPTESIVRFPNITNLCPFGEVFNATRFASVYAWNRKRISNCVADYSVLYNSASFSTFKCYGVSPTKLNDLCFTNVYADSFVIRGDEVRQIAPGQTGKIADYNYKLPDDFTGCVIAWNSNNLDSKVGGNYNYLYRLFRKSNLKPFERDISTEIYQAGSTPCNGVEGFNCYFPLQSYGFQPTNGVGYQPYRVVVLSFELLHAPATVCGPKKSTNLVKNKCVNFNFNGLTGTGVLTESNKKFLPFQQFGRDIADTTDAVRDPQTLEILDITPCSFGGVSVITPGTNTSNQVAVLYQDVNCTEVPVAIHADQLTPTWRVYSTGSNVFQTRAGCLIGAEHVNNSYECDIPIGAGICASYQTQTNSPRRARSVASQSIIAYTMSLGAENSVAYSNNSCAIPTNFTISVTTEILPVSMTKTSVDCTMYICGDSTECSNLLLQYGSFCTQLNRALTGIAVEQDKNTQEVFAQVKQIYKTPPIKDFGGFNFSQILPDPSKPSKRSFIEDLLFNKVTLADAGFIKQYGDCLGDIAARDLICAQKFNGLTVLPPLLTDEMIAQYTSALLAGTITSGWTFGAGAALQIPFAMQMAYRFNGIGVTQNVLYENQKLIANQFNSVIGKIQDSLSSTASALGKLQDVVNQNAQALNTLVKQLSSNFGAISSVLNDILSRLDKVEAEVQIDRLITGRLQSLQTYVTQQLIRAAEIRASANLAATKMSECVLGQSKRVDFCGKGYHLMSFPQSAPHGVVFLHVTYVPAQEKNFTCAPAICHDGKAHFPREGVFVSNGTHWFVTQRNFYEPQIITTDNTFVSGNCDVVIGIVNNTVYDPLQPELDSFKEELDKYFKNHTSPDVDLGDISGINASVVNIQKEIDRLNEVAKNLNESLIDLQELGKYEQYIKGGGSGGGQIYEGKLTAEGLRFGIVASRFNHALVDRLVEGAIDAIVRHGGREEDITLVRVPGSWEIPVAAGELARKEDIDAVIAIGVLIRGATPHFDYIASEVSKGLADLSLELRKPITFGVITADTLEQAIERAGTKHGNKGWEAALSAIEMANLFKSLR

SEQ ID NO: 3971 - protein, 1371 aa, Artificial Sequence
  SARS-CoV-2/Guangdong/GD2020087-P0008/2020__EPI_ISL_413863 spike protein (1-1211)(I712C_T1077C) LumSynth construct
MFVFLVLLPLVSSQCVNLTTRTQLPPAYTNSFTRGVYYPDKVFRSSVLHSTQDLFLPFFSNVTWFHAIHVSGTNGTKRFDNPVLPFNDGVYFASTEKSNIIRGWIFGTTLDSKTQSLLIVNNATNVVIKVCEFQFCNDPFLGVYYHKNNKSWMESEFRVYSSANNCTFEYVSQPFLMDLEGKQGNFKNLREFVFKNIDGYFKIYSKHTPINLVRDLPQGFSALEPLVDLPIGINITRFQTLLALHRSYLTPGDSSSGWTAGAAAYYVGYLQPRTFLLKYNENGTITDAVDCALDPLSETKCTLKSFTVEKGIYQTSNFRVQPTESIVRFPNITNLCPFGEVFNATRFASVYAWNRKRISNCVADYSVLYNSASFSTFKCYGVSPTKLNDLCFTNVYADSFVIRGDEVREIAPGQTGKIADYNYKLPDDFTGCVIAWNSNNLDSKVGGNYNYLYRLFRKSNLKPFERDISTEIYQAGSTPCNGVEGFNCYFPLQSYGFQPTNGVGYQPYRVVVLSFELLHAPATVCGPKKSTNLVKNKCVNFNFNGLTGTGVLTESNKKFLPFQQFGRDIADTTDAVRDPQTLEILDITPCSFGGVSVITPGTNTSNQVAVLYQDVNCTEVPVAIHADQLTPTWRVYSTGSNVFQTRAGCLIGAEHVNNSYECDIPIGAGICASYQTQTNSPRRARSVASQSIIAYTMSLGAENSVAYSNNSCAIPTNFTISVTTEILPVSMTKTSVDCTMYICGDSTECSNLLLQYGSFCTQLNRALTGIAVEQDKNTQEVFAQVKQIYKTPPIKDFGGFNFSQILPDPSKPSKRSFIEDLLFNKVTLADAGFIKQYGDCLGDIAARDLICAQKFNGLTVLPPLLTDEMIAQYTSALLAGTITSGWTFGAGAALQIPFAMQMAYRFNGIGVTQNVLYENQKLIANQFNSAIGKIQDSLSSTASALGKLQDVVNQNAQALNTLVKQLSSNFGAISSVLNDILSRLDKVEAEVQIDRLITGRLQSLQTYVTQQLIRAAEIRASANLAATKMSECVLGQSKRVDFCGKGYHLMSFPQSAPHGVVFLHVTYVPAQEKNFTCAPAICHDGKAHFPREGVFVSNGTHWFVTQRNFYEPQIITTDNTFVSGNCDVVIGIVNNTVYDPLQPELDSFKEELDKYFKNHTSPDVDLGDISGINASVVNIQKEIDRLNEVAKNLNESLIDLQELGKYEQYIKGGGSGGGQIYEGKLTAEGLRFGIVASRFNHALVDRLVEGAIDAIVRHGGREEDITLVRVPGSWEIPVAAGELARKEDIDAVIAIGVLIRGATPHFDYIASEVSKGLADLSLELRKPITFGVITADTLEQAIERAGTKHGNKGWEAALSAIEMANLFKSLR

SEQ ID NO: 3972 - protein, 1371 aa, Artificial Sequence
  SARS-CoV-2/Sweden/01/2020__EPI_ISL_411951 spike protein (1-1211)(I712C_T1077C) LumSynth construct
MFVFLVLLPLVSSQCVNLTTRTQLPPAYTNSFTRGVYYPDKVFRSSVLHSTQDLFLPFFSNVTWFHAIHVSGTNGTKRFDNPVLPFNDGVYFASTEKSNIIRGWIFGTTLDSKTQSLLIVNNATNVVIKVCEFQFCNDPFLGVYYHKNNKSWMESEFRVYSSANNCTFEYVSQPFLMDLEGKQGNFKNLREFVFKNIDGYFKIYSKHTPINLVRDLPQGFSALEPLVDLPIGINITRFQTLLALHRSYLTPGDSSSGWTAGAAAYYVGYLQPRTFLLKYNENGTITDAVDCALDPLSETKCTLKSFTVEKGIYQTSNFRVQPTESIVRFPNITNLCPFGEVFNATRFASVYAWNRKRISNCVADYSVLYNSASFSTFKCYGVSPTKLNDLCFTNVYADSFVIRGDEVRQIAPGQTGKIADYNYKLPDDFTGCVIAWNSNNLDSKVGGNYNYLYRLFRKSNLKPFERDISTEIYQAGSTPCNGVEGFNCYFPLQSYGFQPTNGVGYQPYRVVVLSFELLHAPATVCGPKKSTNLVKNKCVNFNFNGLTGTGVLTESNKKFLPFQQFGRDIADTTDAVRDPQTLEILDITPCSFGGVSVITPGTNTSNQVAVLYQDVNCTEVPVAIHADQLTPTWRVYSTGSNVFQTRAGCLIGAEHVNNSYECDIPIGAGICASYQTQTNSPRRARSVASQSIIAYTMSLGAENSVAYSNNSCAIPTNFTISVTTEILPVSMTKTSVDCTMYICGDSTECSNLLLQYGSFCTQLNRALTGIAVEQDKNTQEVFAQVKQIYKTPPIKDCGGFNFSQILPDPSKPSKRSFIEDLLFNKVTLADAGFIKQYGDCLGDIAARDLICAQKFNGLTVLPPLLTDEMIAQYTSALLAGTITSGWTFGAGAALQIPFAMQMAYRFNGIGVTQNVLYENQKLIANQFNSAIGKIQDSLSSTASALGKLQDVVNQNAQALNTLVKQLSSNFGAISSVLNDILSRLDKVEAEVQIDRLITGRLQSLQTYVTQQLIRAAEIRASANLAATKMSECVLGQSKRVDFCGKGYHLMSFPQSAPHGVVFLHVTYVPAQEKNFTCAPAICHDGKAHFPREGVFVSNGTHWFVTQRNFYEPQIITTDNTFVSGNCDVVIGIVNNTVYDPLQPELDSFKEELDKYFKNHTSPDVDLGDISGINASVVNIQKEIDRLNEVAKNLNESLIDLQELGKYEQYIKGGGSGGGQIYEGKLTAEGLRFGIVASRFNHALVDRLVEGAIDAIVRHGGREEDITLVRVPGSWEIPVAAGELARKEDIDAVIAIGVLIRGATPHFDYIASEVSKGLADLSLELRKPITFGVITADTLEQAIERAGTKHGNKGWEAALSAIEMANLFKSLR

SEQ ID NO: 3973 - protein, 1371 aa, Artificial Sequence
  SARS-CoV-2/Tianmen/HBCDC-HB-07/2020__EPI_ISL_412983 spike protein (1-1211)(I712C_T1077C) LumSynth construct
MFVFLVLLPLVSSQCVNLTTRTQLPPAYTNSFTRGVYYPDKVFRSSVLHSTQDLFLPFFSNVTWFHAIHVSGTNGTKRFDNPVLPFNDGVYFASTEKSNIIRGWIFGTTLDSKTQSLLIVNNATNVVIKVCEFQFCNDPFLGVYYHKNNKSWMESEFRVYSSANNCTFEYVSQPFLMDLEGKQGNFKNLREFVFKNIDGYFKIYSKHTPINLVRDLPQGFSALEPLVDLPIGINITRFQTLLALHRSYLTPGDSSSGWTAGAAAYYVGYLQPRTFLLKYNENGTITDAVDCALDPLSETKCTLKSFTVEKGIYQTSNFRVQPTESIVRFPNITNLCPFGEVFNATRFASVYAWNRKRISNCVADYSVLYNSASFSTFKCYGVSPTKLNDLCFTNVYADSFVIRGDEVRQIAPGQTGKIADYNYKLPDDFTGCVIAWNSNNLDSKVGGNYNYLYRLFRKSNLKPFERDISTEIYQAGSTPCNGVEGFNCYFPLQSYGFQPTNGVGYQPYRVVVLSFELLHAPATVCGPKKSTNLVKNKCVNFNFNGLTGTGVLTESNKKFLPFQQFGRDIADTTDAVRDPQTLEILDITPCSFGGVSVITPGTNTSNQVAVLYQDLNCTEVPVAIHADQLTPTWRVYSTGSNVFQTRAGCLIGAEHVNNSYECDIPIGAGICASYQTQTNSPRRARSVASQSIIAYTMSLGAENSVAYSNNSCAIPTNFTISVTTEILPVSMTKTSVDCTMYICGDSTECSNLLLQYGSFCTQLNRALTGIAVEQDKNTQEVFAQVKQIYKTPPIKDFGGFNFSQILPDPSKPSKRSFIEDLLFNKVTLADAGFIKQYGDCLGDIAARDLICAQKFNGLTVLPPLLTDEMIAQYTSALLAGTITSGWTFGAGAALQIPFAMQMAYRFNGIGVTQNVLYENQKLIANQFNSAIGKIQDSLSSTASALGKLQDVVNQNAQALNTLVKQLSSNFGAISSVLNDILSRLDKVEAEVQIDRLITGRLQSLQTYVTQQLIRAAEIRASANLAATKMSECVLGQSKRVDFCGKGYHLMSFPQSAPHGVVFLHVTYVPAQEKNFTCAPAICHDGKAHFPREGVFVSNGTHWFVTQRNFYEPQIITTDNTFVSGNCDVVIGIVNNTVYDPLQPELDSFKEELDKYFKNHTSPDVDLGDISGINASVVNIQKEIDRLNEVAKNLNESLIDLQELGKYEQYIKGGGSGGGQIYEGKLTAEGLRFGIVASRFNHALVDRLVEGAIDAIVRHGGREEDITLVRVPGSWEIPVAAGELARKEDIDAVIAIGVLIRGATPHFDYIASEVSKGLADLSLELRKPITFGVITADTLEQAIERAGTKHGNKGWEAALSAIEMANLFKSLR

SEQ ID NO: 3974 - protein, 1371 aa, Artificial Sequence
  SARS-CoV-2/Hong Kong/case42_VM20002493/2020__EPI_ISL_414527 spike protein (1-1211)(I712C_T1077C) LumSynth construct
MFVFLVLLPLVSSQCVNLTTRTQLPPAYTNSFTRGVYYPDKVFRSSVLHSTQDLFLPFFSNVTWFHAIHVSGTNGTKRFDNPVLPFNDGVYFASTEKSNIIRGWIFGTTLDSKTQSLLIVNNATNVVIKVCEFQFCNDPFLGVYYHKNNKSWMESEFRVYSSANNCTFEYVSQPFLMDLEGKQGNFKNLREFVFKNIDGYFKIYSKHTPINLVRDLPQGFSALEPLVDLPIGINITRFQTLLALHRSYLTPGDSSSGWTAGAAAYYVGYLQPRTFLLKYNENGTITDAVDCALDPLSETKCTLKSFTVEKGIYQTSNFRVQPTESIVRFPNITNLCPFGEVFNATRFASVYAWNRKRISNCVADYSVLYNSASFSTFKCYGVSPTKLNDLCFTNVYADSFVIRGDEVRQIAPGQTGKIADYNYKLPDDFTGCVIAWNSNNLDSKVGGNYNYLYRLFRKSNLKPFERDISTEIYQAGSTPCNGVEGFNCYFPLQSYGFQPTNGVGYQPYRVVVLSFELLHAPATVCGPKKSTNLVKNKCVNFNFNGLTGTGVLTESNKKFLPFQQFGRDIADTTDAVRDPQTLEILDITPCSFGGVSVITPGTNTSNQVAVLYQDVNCTEVPVAIHADQLTPTWRVYSTGSNVFQTRAGCLIGAEHVNNSYECDIPIGAGICASYQTQTNSPRRARSVASQSIIAYTMSLGAENSVAYSNNSCAIPTNFAISVTTEILPVSMTKTSVDCTMYICGDSTECSNLLLQYGSFCTQLNRALTGIAVEQDKNTQEVFAQVKQIYKTPPIKDFGGFNFSQILPDPSKPSKRSFIEDLLFNKVTLADAGFIKQYGDCLGDIAARDLICAQKFNGLTVLPPLLTDEMIAQYTSALLAGTITSGWTFGAGAALQIPFAMQMAYRFNGIGVTQNVLYENQKLIANQFNSAIGKIQDSLSSTASALGKLQDVVNQNAQALNTLVKQLSSNFGAISSVLNDILSRLDKVEAEVQIDRLITGRLQSLQTYVTQQLIRAAEIRASANLAATKMSECVLGQSKRVDFCGKGYHLMSFPQSAPHGVVFLHVTYVPAQEKNFTCAPAICHDGKAHFPREGVFVSNGTHWFVTQRNFYEPQIITTDNTFVSGNCDVVIGIVNNTVYDPLQPELDSFKEELDKYFKNHTSPDVDLGDISGINASVVNIQKEIDRLNEVAKNLNESLIDLQELGKYEQYIKGGGSGGGQIYEGKLTAEGLRFGIVASRFNHALVDRLVEGAIDAIVRHGGREEDITLVRVPGSWEIPVAAGELARKEDIDAVIAIGVLIRGATPHFDYIASEVSKGLADLSLELRKPITFGVITADTLEQAIERAGTKHGNKGWEAALSAIEMANLFKSLR

SEQ ID NO: 3975 - protein, 1371 aa, Artificial Sequence
  SARS-CoV-2/USA/CruiseA-23/2020__EPI_ISL_414482 spike protein (1-1211)(I712C_T1077C) LumSynth construct
MFVFLVLLPLVSSQCVNLTTRTQLPPAYTNSFTRGVYYPDKVFRSSVLHSTQDLFLPFFSNVTWFHAIHVSGTNGTKRFDNPVLPFNDGVYFASTEKSNIIRGWIFGTTLDSKTQSLLIVNNATNVVIKVCEFQFCNDPFLGVYYHKNNKSWMESEFRVYSSANNCTFEYVSQPFLMDLEVKQGNFKNLREFVFKNIDGYFKIYSKHTPINLVRDLPQGFSALEPLVDLPIGINITRFQTLLALHRSYLTPGDSSSGWTAGAAAYYVGYLQPRTFLLKYNENGTITDAVDCALDPLSETKCTLKSFTVEKGIYQTSNFRVQPTESIVRFPNITNLCPFGEVFNATRFASVYAWNRKRISNCVADYSVLYNSASFSTFKCYGVSPTKLNDLCFTNVYADSFVIRGDEVRQIAPGQTGKIADYNYKLPDDFTGCVIAWNSNNLDSKVGGNYNYLYRLFRKSNLKPFERDISTEIYQAGSTPCNGVEGFNCYFPLQSYGFQPTNGVGYQPYRVVVLSFELLHAPATVCGPKKSTNLVKNKCVNFNFNGLTGTGVLTESNKKFLPFQQFGRDIADTTDAVRDPQTLEILDITPCSFGGVSVITPGTNTSNQVAVLYQDVNCTEVPVAIHADQLTPTWRVYSTGSNVFQTRAGCLIGAEHVNNSYECDIPIGAGICASYQTQTNSPRRARSVASQSIIAYTMSLGAENSVAYSNNSCAIPTNFTISVTTEILPVSMTKTSVDCTMYICGDSTECSNLLLQYGSFCTQLNRALTGIAVEQDKNTQEVFAQVKQIYKTPPIKDFGGFNFSQILPDPSKPSKRSFIEDLLFNKVTLADAGFIKQYGDCLGDIAARDLICAQKFNGLTVLPPLLTDEMIAQYTSALLAGTITSGWTFGAGAALQIPFAMQMAYRFNGIGVTQNVLYENQKLIANQFNSAIGKIQDSLSSTASALGKLQDVVNQNAQALNTLVKQLSSNFGAISSVLNDILSRLDKVEAEVQIDRLITGRLQSLQTYVTQQLIRAAEIRASANLAATKMSECVLGQSKRVDFCGKGYHLMSFPQSAPHGVVFLHVTYVPAQEKNFTCAPAICHDGKAHFPREGVFVSNGTHWFVTQRNFYEPQIITTDNTFVSGNCDVVIGIVNNTVYDPLQPELDSFKEELDKYFKNHTSPDVDLGDISGINASVVNIQKEIDRLNEVAKNLNESLIDLQELGKYEQYIKGGGSGGGQIYEGKLTAEGLRFGIVASRFNHALVDRLVEGAIDAIVRHGGREEDITLVRVPGSWEIPVAAGELARKEDIDAVIAIGVLIRGATPHFDYIASEVSKGLADLSLELRKPITFGVITADTLEQAIERAGTKHGNKGWEAALSAIEMANLFKSLR

SEQ ID NO: 3976 - protein, 1371 aa, Artificial Sequence
  SARS-CoV-2/Hong Kong/case85_VM20002868/2020__EPI_ISL_414519 spike protein (1-1211)(I712C_T1077C) LumSynth construct
MFVFLVLVPLVSSQCVNLTTRTQLPPAYTNSFTRGVYYPDKVFRSSVLHSTQDLFLPFFSNVTWFHAIHVSGTNGTKRFDNPVLPFNDGVYFASTEKSNIIRGWIFGTTLDSKTQSLLIVNNATNVVIKVCEFQFCNDPFLGVYYHKNNKSWMESEFRVYSSANNCTFEYVSQPFLMDLEGKQGNFKNLREFVFKNIDGYFKIYSKHTPINLVRDLPQGFSALEPLVDLPIGINITRFQTLLALHRSYLTPGDSSSGWTAGAAAYYVGYLQPRTFLLKYNENGTITDAVDCALDPLSETKCTLKSFTVEKGIYQTSNFRVQPTESIVRFPNITNLCPFGEVFNATRFASVYAWNRKRISNCVADYSVLYNSASFSTFKCYGVSPTKLNDLCFTNVYADSFVIRGDEVRQIAPGQTGKIADYNYKLPDDFTGCVIAWNSNNLDSKVGGNYNYLYRLFRKSNLKPFERDISTEIYQAGSTPCNGVEGFNCYFPLQSYGFQPTNGVGYQPYRVVVLSFELLHAPATVCGPKKSTNLVKNKCVNFNFNGLTGTGVLTESNKKFLPFQQFGRDIADTTDAVRDPQTLEILDITPCSFGGVSVITPGTNTSNQVAVLYQDVNCTEVPVAIHADQLTPTWRVYSTGSNVFQTRAGCLIGAEHVNNSYECDIPIGAGICASYQTQTNSPRRARSVASQSIIAYTMSLGAENSVAYSNNSCAIPTNFTISVTTEILPVSMTKTSVDCTMYICGDSTECSNLLLQYGSFCTQLNRALTGIAVEQDKNTQEVFAQVKQIYKTPPIKDFGGFNFSQILPDPSKPSKRSFIEDLLFNKVTLADAGFIKQYGDCLGDIAARDLICAQKFNGLTVLPPLLTDEMIAQYTSALLAGTITSGWTFGAGAALQIPFAMQMAYRFNGIGVTQNVLYENQKLIANQFNSAIGKIQDSLSSTASALGKLQDVVNQNAQALNTLVKQLSSNFGAISSVLNDILSRLDKVEAEVQIDRLITGRLQSLQTYVTQQLIRAAEIRASANLAATKMSECVLGQSKRVDFCGKGYHLMSFPQSAPHGVVFLHVTYVPAQEKNFTCAPAICHDGKAHFPREGVFVSNGTHWFVTQRNFYEPQIITTDNTFVSGNCDVVIGIVNNTVYDPLQPELDSFKEELDKYFKNHTSPDVDLGDISGINASVVNIQKEIDRLNEVAKNLNESLIDLQELGKYEQYIKGGGSGGGQIYEGKLTAEGLRFGIVASRFNHALVDRLVEGAIDAIVRHGGREEDITLVRVPGSWEIPVAAGELARKEDIDAVIAIGVLIRGATPHFDYIASEVSKGLADLSLELRKPITFGVITADTLEQAIERAGTKHGNKGWEAALSAIEMANLFKSLR

SEQ ID NO: 3977 - protein, 1371 aa, Artificial Sequence; identical to SEQ ID NO: 3967
  SARS-CoV-2/England/200990660/2020__EPI_ISL_414523 spike protein (1-1211)(I712C_T1077C) LumSynth construct

SEQ ID NO: 3978 - protein, 1371 aa, Artificial Sequence
  SARS-CoV-2/Australia/NSW09/2020__EPI_ISL_413595 spike protein (1-1211)(I712C_T1077C) LumSynth construct
MFVFLVLLPLVSSQCVNLTTRTQLPPAYTNSFTRGVYYPDKVFRSSVLHSTQDLFLPFFSNVTWFHAIHVSGTNGTKRFDNPVLPFNDGVYFASTEKSNIIRGWIFGTTLDSKTQSLLIVNNATNVVIKVCEFQFCNDPFLGVYYHKNNKSWMESEFRVYSSANNCTFEYVSQPFLMDLEGKQGNFKNLREFVFKNIDGYFKIYSKHTPINLVRDLPQGFSALEPLVDLPIGINITRFQTLLALHRSYLTPGDSSSGWTAGAAAYYVGYLQPRTFLLKYNENGTITDAVDCALDPLSETKCTLKSFTVEKGIYQTSNFRVQPTESIVRFPNITNLCPFGEVFNATRFASVYAWNRKRISNCVADYSVLYNSASFSTFKCYGVSPTKLNDLCFTNVYADSFVIRGDEVRQIAPGQTGKIADYNYKLPDDFTGCVIAWNSNNLDSKVGGNYNYLYRLFRKSNLKPFERDISTEIYQAGSTPCNGVEGFNCYFPLQSYGFQPTNGVGYQPYRVVVLSFELLHAPATVCGPKKSTNLVKNKCVNFNFNGLTGTGVLTESNKKFLPFQQFGRDIADTTDAVRDPQTLEILDITPCSFGGVSVITPGTNTSNQVAVLYQDVNCTEVPVAIHADQLTPTWRVYSTGSNVFQTRAGCLIGAEHVNNSYECDIPIGAGICASYQTQTNSPRRARSVASQSIIAYTMSLGAENSVAYSNNSCAIPTNFTISVTTEILPVSMTKTSVDCTMYICGDSTECSNLLLQYGSFCTQLNRALTGIAVEQDKNTQEVFAQVKQIYKTPPIKDFGGFNFSQILPDPSKPSKRSFIEDLLFNKVTLADAGFIKQYGDCLGDIAARDLICAQKFNGLTVLPPLLTDEMIAQYTSALLAGTITSGWTFGAGAALQIPFAMQMAYRFNGIGVTQNVLYENQKLIANQFNSAIGKIQDSLSFTASALGKLQDVVNQNAQALNTLVKQLSSNFGAISSVLNDILSRLDKVEAEVQIDRLITGRLQSLQTYVTQQLIRAAEIRASANLAATKMSECVLGQSKRVDFCGKGYHLMSFPQSAPHGVVFLHVTYVPAQEKNFTCAPAICHDGKAHFPREGVFVSNGTHWFVTQRNFYEPQIITTDNTFVSGNCDVVIGIVNNTVYDPLQPELDSFKEELDKYFKNHTSPDVDLGDISGINASVVNIQKEIDRLNEVAKNLNESLIDLQELGKYEQYIKGGGSGGGQIYEGKLTAEGLRFGIVASRFNHALVDRLVEGAIDAIVRHGGREEDITLVRVPGSWEIPVAAGELARKEDIDAVIAIGVLIRGATPHFDYIASEVSKGLADLSLELRKPITFGVITADTLEQAIERAGTKHGNKGWEAALSAIEMANLFKSLR

SEQ ID NO: 3979 - protein, 1371 aa, Artificial Sequence; identical to SEQ ID NO: 3959
  SARS-CoV-2/Australia/NSW10/2020__EPI_ISL_413596 spike protein (1-1211)(I712C_T1077C) LumSynth construct

SEQ ID NO: 3980 - protein, 1371 aa, Artificial Sequence
  SARS-CoV-2/Switzerland/1000477797/2020__EPI_ISL_413023 spike protein (1-1211)(I712C_T1077C) LumSynth construct
MFVFLVLLPLVSSQCVNLTTRTQLPPAYTNSFTRGVYYPDKVFRSSVLHSTQDLFLPFFSNVTWFHAIHVSGTNGTKRFDNPVLPFNDGVYFASTEKSNIIRGWIFGTTLDSKTQSLLIVNNATNVVIKVCEFQFCNDPFLGVYYHKNNKSWMESEFRVYSSANNCTFEYVSQPFLMDLEGKQGNFKNLREFVFKNIDGYFNIYSKHTPINLVRDLPQGFSALEPLVDLPIGINITRFQTLLALHRSYLTPGDSSSGWTAGAAAYYVGYLQPRTFLLKYNENGTITDAVDCALDPLSETKCTLKSFTVEKGIYQTSNFRVQPTESIVRFPNITNLCPFGEVFNATRFASVYAWNRKRISNCVADYSVLYNSASFSTFKCYGVSPTKLNDLCFTNVYADSFVIRGDEVRQIAPGQTGKIADYNYKLPDDFTGCVIAWNSNNLDSKVGGNYNYLYRLFRKSNLKPFERDISTEIYQAGSTPCNGVEGFNCYFPLQSYGFQPTNGVGYQPYRVVVLSFELLHAPATVCGPKKSTNLVKNKCVNFNFNGLTGTGVLTESNKKFLPFQQFGRDIADTTDAVRDPQTLEILDITPCSFGGVSVITPGTNTSNQVAVLYQGVNCTEVPVAIHADQLTPTWRVYSTGSNVFQTRAGCLIGAEHVNNSYECDIPIGAGICASYQTQTNSPRRARSVASQSIIAYTMSLGAENSVAYSNNSCAIPTNFTISVTTEILPVSMTKTSVDCTMYICGDSTECSNLLLQYGSFCTQLNRALTGIAVEQDKNTQEVFAQVKQIYKTPPIKDFGGFNFSQILPDPSKPSKRSFIEDLLFNKVTLADAGFIKQYGDCLGDIAARDLICAQKFNGLTVLPPLLTDEMIAQYTSALLAGTITSGWTFGAGAALQIPFAMQMAYRFNGIGVTQNVLYENQKLIANQFNSAIGKIQDSLSSTASALGKLQDVVNQNAQALNTLVKQLSSNFGAISSVLNDILSRLDKVEAEVQIDRLITGRLQSLQTYVTQQLIRAAEIRASANLAATKMSECVLGQSKRVDFCGKGYHLMSFPQSAPHGVVFLHVTYVPAQEKNFTCAPAICHDGKAHFPREGVFVSNGTHWFVTQRNFYEPQIITTDNTFVSGNCDVVIGIVNNTVYDPLQPELDSFKEELDKYFKNHTSPDVDLGDISGINASVVNIQKEIDRLNEVAKNLNESLIDLQELGKYEQYIKGGGSGGGQIYEGKLTAEGLRFGIVASRFNHALVDRLVEGAIDAIVRHGGREEDITLVRVPGSWEIPVAAGELARKEDIDAVIAIGVLIRGATPHFDYIASEVSKGLADLSLELRKPITFGVITADTLEQAIERAGTKHGNKGWEAALSAIEMANLFKSLR

SEQ ID NO: 3981 - protein, 1371 aa, Artificial Sequence
  SARS-CoV-2/Belgium/BA-02291/2020__EPI_ISL_415159 spike protein (1-1211)(I712C_T1077C) LumSynth construct
MFVFLVLLPLVSSQCVNLTTRTQLPPAYTNSFTRGVYYPDKVFRSSVLHSTQDLFLPFFSNVTWFHAIHVSGTNGTKRFDNPVLPFNDGVYFASTEKSNIIRGWIFGTTLDSKTQSLLIVNNATNVVIKVCEFQFCNDPFLGVYYHKNNKSWMESEFRVYSSANNCTFEYVSQPFLMDLEGKQGNFKNLREFVFKNIDGYFKIYSKHTPINLVRDLPQGFSALEPLVDLPIGINITRFQTLLALHRSYLTPGDSSSGWTAGAAAYYVGYLQPRTFLLKYNENGTITDAVDCALDPLSETKCTLKSFTVEKGIYQTSNFRVQPTESIVRFPNITNLCPFGEVFNATRFASVYAWNRKRISNCVADYSVLYNSASFSTFKCYGVSPTKLNDLCFTNVYADSFVIRGDEVRQIAPGQTGKIADYNYKLPDDFTGCVIAWNSNNLDSKVGGNYNYLYRLFRRSNLKPFERDISTEIYQAGSTPCNGVEGFNCYFPLQSYGFQPTNGVGYQPYRVVVLSFELLPAPATVCGPKKSTNLVKNKCVNFNFNGLTGTGVLTESNKKFLPFQQFGRDIADTTDAVRDPQTLEILDITPCSFGGVSVITPGTNTSNQVAVLYQGVNCTEVPVAIHADQLTPTWRVYSTGSNVFQTRAGCLIGAEHVNNSYECDIPIGAGICASYQTQTNSPRRARSVASQSIIAYTMSLGAENSVAYSNNSCAIPTNFTISVTTEILPVSMTKTSVDCTMYICGDSTECSNLLLQYGSFCTQLNRALTGIAVEQDKNTQEVFAQVKQIYKTPPIKDFGGFNFSQILPDPSKPSKRSFIEDLLFNKVTLADAGFIKQYGDCLGDIAARDLICAQKFNGLTVLPPLLTDEMIAQYTSALLAGTITSGWTFGAGAALQIPFAMQMAYRFNGIGVTQNVLYENQKLIANQFNSAIGKIQDSLSSAAPALGKLQDVVNQNAQALNTLVKQLSSNFGAISSVLNDILSRLDKVEAEVQIDRLITGRLQSLQTYVTQQLIRAAEIRASANLAATKMSECVLGQSKRVDFCGKGYHLMSFPQSAPHGVVFLHVTYVPAQEKNFTCAPAICHDGKAHFPREGVFVSNGTHWFVTQRNFYEPQIITTDNTFVSGNCDVVIGIVNNTVYDPLQPELDSFKEELDKYFKNHTSPDVDLGDISGINASVVNIQKEIDRLNEVAKNLNESLIDLQELGKYEQYIKGGGSGGGQIYEGKLTAEGLRFGIVASRFNHALVDRLVEGAIDAIVRHGGREEDITLVRVPGSWEIPVAAGELARKEDIDAVIAIGVLIRGATPHFDYIASEVSKGLADLSLELRKPITFGVITADTLEQAIERAGTKHGNKGWEAALSAIEMANLFKSLR

SEQ ID NO: 3982 - protein, 1371 aa, Artificial Sequence
  SARS-CoV-2/USA/WA8-UW5/2020__EPI_ISL_413486 spike protein (1-1211)(I712C_T1077C) LumSynth construct
MFVFLVLLPLVSSQCVNLTTRTQLPPAYTNSFTRGVYYPDKVFRSSVLHSTQDLFLPFFSNVTWFHAIHVSGTNGTKRFDNPVLPFNDGVYFASTEKSNIIRGWIFGTTLDSKTQSLLIVNNATNVVIKVCEFQFCNDPFLGVYYHKNNKSWMESEFRVYSSANNCTFEYVSQPFLMDLEGKQGNFKNLREFVFKNIDGYFKIYSKHTPINLVRDLPQGFSALEPLVDLPIGINITRFQTLLALHRSYLTPGDSSSGWTAGAAAYYVGYLQPRTFLLKYNENGTITDAVDCALDPLSETKCTLKSFTVEKGIYQTSNFRVQPTESIVRFPNITNLCPFGEVFNATRFASVYAWNRKRISNCVADYSVLYNSASFSTFKCYGVSPTKLNDLCFTNVYADSFVIRGDEVRQIAPGQTGKIADYNYKLPDDFTGCVIAWNSNNLDSKVGGNYNYLYRLFRKSNLKPFERDISTEIYQAGSTPCNGVEGFNCYFPLQSYGFQPTNGVGYQPYRVVVLSFELLHAPATVCGPKKSTNLVKNKCVNFNFNGLTGTGVLTESNKKFLPFQQFGRDIADTTDAVRDPQTLEILDITPCSFGGVSVITPGTNTSNQVAVLYQDVNCTEVPVAIHADQLTPTWRVYSTGSNVFQTRAGCLIGAEYVNNSYECDIPIGAGICASYQTQTNSPRRARSVASQSIIAYTMSLGAENSVAYSNNSCAIPTNFTISVTTEILPVSMTKTSVDCTMYICGDSTECSNLLLQYGSFCTQLNRALTGIAVEQDKNTQEVFAQVKQIYKTPPIKDFGGFNFSQILPDPSKPSKRSFIEDLLFNKVTLADAGFIKQYGDCLGDIAARDLICAQKFNGLTVLPPLLTDEMIAQYTSALLAGTITSGWTFGAGAALQIPFAMQMAYRFNGIGVTQNVLYENQKLIANQFNSAIGKIQDSLSSTASALGKLQDVVNQNAQALNTLVKQLSSNFGAISSVLNDILSRLDKVEAEVQIDRLITGRLQSLQTYVTQQLIRAAEIRASANLAATKMSECVLGQSKRVDFCGKGYHLMSFPQSAPHGVVFLHVTYVPAQEKNFTCAPAICHDGKAHFPREGVFVSNGTHWFVTQRNFYEPQIITTDNTFVSGNCDVVIGIVNNTVYDPLQPELDSFKEELDKYFKNHTSPDVDLGDISGINASVVNIQKEIDRLNEVAKNLNESLIDLQELGKYEQYIKGGGSGGGQIYEGKLTAEGLRFGIVASRFNHALVDRLVEGAIDAIVRHGGREEDITLVRVPGSWEIPVAAGELARKEDIDAVIAIGVLIRGATPHFDYIASEVSKGLADLSLELRKPITFGVITADTLEQAIERAGTKHGNKGWEAALSAIEMANLFKSLR

SEQ ID NO: 3983 - protein, 1371 aa, Artificial Sequence
  SARS-CoV-2/England/20102000506/2020__EPI_ISL_415147 spike protein (1-1211)(I712C_T1077C) LumSynth construct
MFVFLVLLPLVSSQCVNLTTRTQLPPAYTNSFTRGVYYPDKVFRSSVLHSTQDLFLPFFSNVTWFHAIHVSGTNGTKRFDNPVLPFNDGVYFASTEKSNIIRGWIFGTTLDSKTQSLLIVNNATNVVIKVCEFQFCNDPFLGVYYHKNNKSWMESEFRVYSSANNCTFEYVSQPFLMDLEGKQGNFKNLREFVFKNIDGYFKIYSKHTPINLVRDLPQGFSALEPLVDLPIGINITRFQTLLALHRSYLTPGDSSSGWTAGAAAYYVGYLQPRTFLLKYNENGTITDAVDCALDPLSETKCTLKSFTVEKGIYQTSNFRVQPTESIVRFPNITNLCPFGEVFNATRFASVYAWNRKRISNCVADYSVLYNSASFSTFKCYGVSPTKLNDLCFTNVYADSFVIRGDEVRQIAPGQTGKIADYNYKLPDDFTGCVIAWNSNNLDSKVGGNYNYLYRLFRKSNLKPFERDISTEIYQAGSTPCNGVEGFNCYFPLQSYGFQPTNGVGYQPYRVVVLSFELLHAPATVCGPKKSTNLVKNKCVNFNFNGLTGTGVLTESNKKFLPFQQFGRDIADTTDAVRDPQTLEILDITPCSFGGVSVITPGTNTSNQVAVLYQGVNCTEVPVAIHADQLTPTWRVYSTGSNVFQTRAGCLIGAEHVNNSYECDIPIGAGICASYQTQTNSPRRARSVASQSIIAYTMSLGAENSVAYSNNSCAIPTNFTISVTTEILPVSMTKTSVDCTMYICGDSTECSNLLLQYGSFCTQLNRALTGIAVEQDKNTQEVFAQVKQIYKTPPIKDFGGFNFSQILPDPSKPSKRSFIEDLLFNKVTLADAGFIKQYGYCLGDIAARDLICAQKFNGLTVLPPLLTDEMIAQYTSALLAGTITSGWTFGAGAALQIPFAMQMAYRFNGIGVTQNVLYENQKLIANQFNSAIGKIQDSLSSTASALGKLQDVVNQNAQALNTLVKQLSSNFGAISSVLNDILSRLDKVEAEVQIDRLITGRLQSLQTYVTQQLIRAAEIRASANLAATKMSECVLGQSKRVDFCGKGYHLMSFPQSAPHGVVFLHVTYVPAQEKNFTCAPAICHDGKAHFPREGVFVSNGTHWFVTQRNFYEPQIITTDNTFVSGNCDVVIGIVNNTVYDPLQPELDSFKEELDKYFKNHTSPDVDLGDISGINASVVNIQKEIDRLNEVAKNLNESLIDLQELGKYEQYIKGGGSGGGQIYEGKLTAEGLRFGIVASRFNHALVDRLVEGAIDAIVRHGGREEDITLVRVPGSWEIPVAAGELARKEDIDAVIAIGVLIRGATPHFDYIASEVSKGLADLSLELRKPITFGVITADTLEQAIERAGTKHGNKGWEAALSAIEMANLFKSLR

SEQ ID NO: 3984 - protein, 1371 aa, Artificial Sequence
  SARS-CoV-2/Belgium/VAG-03013/2020__EPI_ISL_415155 spike protein (1-1211)(I712C_T1077C) LumSynth construct
MFVFLVLLPLVSSQCVNLTTRTQLPPAYTNSFTRGVYYPDKVFRSSVLHSTQDLFLPFFSNVTWFHAIHVSGTNGTKRFDNPVLPFNDGVYFASTEKSNIIRGWIFGTTLDSKTQSLLIVNNATNVVIKVCEFQFCNDPFLGVYYHKNNKSWMESEFRVYSSANNCTFEYVSQPFLMDLEGKQGNFKNLREFVFKNIDGYFKIYSKHTPINLVRDLPQGFSALEPLVDLPIGINITRFQTLLALHRSYLTPGDSSSGWTAGAAAYYVGYLQPRTFLLKYNENGTITDAVDCALDPLSETKCTLKSFTVEKGIYQTSNFRVQPTESIVRFPNITNLCPFGEVFNATRFASVYAWNRKRISNCVADYSVLYNSASFSTFKCYGVSPTKLNDLCFTNVYADSFVIRGDEVRQIAPGQTGKIADYNYKLPDDFTGCVIAWNSNNLDSKVGGNYNYLYRLFRKSNLKPFERDISTEIYQAGSTPCNGVEGFNCYFPLQSYGFQPTNGVGYQPYRVVVLSFELLHAPATVCGPKKSTNLVKNKCVNFNFNGLTGTGVLTESNKKFLPFQQFGRDIADTTDAVRDPQTLEILDITPCSFGGVSVITPGTNTSNQVAVLYQGVNCTEVPVAIHADQLTPTWRVYSTGSNVFQTRAGCLIGAEHVNNSYECDIPIGAGICASYQTQTNSPRRARSVASQSIIAYTMSLGAENSVAYSNNSCAIPTNFTISVTTEILPVSMTKTSVDCTMYICGDSTECSNLLLQYGSFCTQLNRALTGIAVEQDKNTQEVFAQVKQIYKTPPIKDFGGFNFSQILPDPSKPSKRSFIEDLLFNKVTLADAGFIKQYGDCLGDIAARDLICAQKFNGLTVLPPLLTDEMIAQYTSALLAGTITSGWTFGAGAALQIPFAMQMAYRFNGIGVTQNVLYENQKLIANQFNSAIGKIQDSLSSTATALGKLQDVVNQNAQALNTLVKQLSSNFGAISSVLNDILSRLDKVEAEVQIDRLITGRLQSLQTYVTQQLIRAAEIRASANLAATKMSECVLGQSKRVDFCGKGYHLMSFPQSAPHGVVFLHVTYVPAQEKNFTCAPAICHDGKAHFPREGVFVSNGTHWFVTQRNFYEPQIITTDNTFVSGNCDVVIGIVNNTVYDPLQPELDSFKEELDKYFKNHTSPDVDLGDISGINASVVNIQKEIDRLNEVAKNLNESLIDLQELGKYEQYIKGGGSGGGQIYEGKLTAEGLRFGIVASRFNHALVDRLVEGAIDAIVRHGGREEDITLVRVPGSWEIPVAAGELARKEDIDAVIAIGVLIRGATPHFDYIASEVSKGLADLSLELRKPITFGVITADTLEQAIERAGTKHGNKGWEAALSAIEMANLFKSLR

SEQ ID NO: 3985 - protein, 1371 aa, Artificial Sequence
  SARS-CoV-2/Belgium/BC-03016/2020__EPI_ISL_415157 spike protein (1-1211)(I712C_T1077C) LumSynth construct
MFVFLVLLPLVSSQCVNLTTRTQLPPAYTNSFTRGVYYPDKVFRSSVLHSTQDLFLPFFSNVTWFHAIHVSGTNGTKRFDNPVLPFNDGVYFASTEKSNIIRGWIFGTTLDSKTQSLLIVNNATNVVIKVCEFQFCNDPFLGVYYHKNNKSWMESEFRVYSSANNCTFEYVSQPFLMDLEGKQGNFKNLREFVFKNIDGYFKIYSKHTPINLVRDLPQGFSALEPLVDLPIGINITRFQTLLALHRSYLTPGDSSSGWTAGAAAYYVGYLQPRTFLLKYNENGTITDAVDCALDPLSETKCTLKSFTVEKGIYQTSNFRVQPTESIVRFPNITNLCPFGEVFNATRFASVYAWNRKRISNCVADYSVLYNSASFSTFKCYGVSPTKLNDLCFTNVYADSFVIRGDEVRQIAPGQTGKIADYNYKLPDDFTGCVIAWNSNNLDSKVGGNYNYLYRLFRKSNLKPFERDISTEIYQAGSTPCNGVEGFNCYFPLQSYGFQPTNGVGYQPYRVVVLSFELLHAPATVCGPKKSTNLVKNKCVNFNFNGLTGTGVLTESNKKFLPFQQFGRDIADTTDAVRDPQTLEILDITPCSFGGVSVITPGTNTSNQVAVLYQGVNCTEVPVAIHADQLTPTWRVYSTGSNVFQTRAGCLIGAEHVNNSYECDIPIGAGICASYQTQTNSPRRARSVASQSIIAYTMSLGAENSVAYSNNSCAIPTNFTISVTTEILPVSMTKTSVDCTMYICGDSTECSNLLLQYGSFCTQLNRALTGIAVEQDKNTQEVFAQVKQIYKTPPIKDFGGFNFSQILPDPSKPSKRSFIEDLLFNKVTLADAGFIKQYGDCLGDIAARDLICAQKFNGLTVLPPLLTDEMIAQYTSALLAGTITSGWTFGAGAALQIPFAMQMAYRFNGIGVTQNVLYENQKLIANQFNSAIGKIQDSLSSTAPALGKLQDVVNQNAQALNTLVKQLSSNFGAISSVLNDILSRLDKVEAEVQIDRLITGRLQSLQTYVTQQLIRAAEIRASANLAATKMSECVLGQSKRVDFCGKGYHLMSFPQSAPHGVVFLHVTYVPAQEKNFTCAPAICHDGKAHFPREGVFVSNGTHWFVTQRNFYEPQIITTDNTFVSGNCDVVIGIVNNTVYDPLQPELDSFKEELDKYFKNHTSPDVDLGDISGINASVVNIQKEIDRLNEVAKNLNESLIDLQELGKYEQYIKGGGSGGGQIYEGKLTAEGLRFGIVASRFNHALVDRLVEGAIDAIVRHGGREEDITLVRVPGSWEIPVAAGELARKEDIDAVIAIGVLIRGATPHFDYIASEVSKGLADLSLELRKPITFGVITADTLEQAIERAGTKHGNKGWEAALSAIEMANLFKSLR

SEQ ID NO: 3986 - protein, 1371 aa, Artificial Sequence
  SARS-CoV-2/Germany/BavPat3/2020__EPI_ISL_414521 spike protein (1-1211)(I712C_T1077C) LumSynth construct
MFVFLVLLPLVSSQCVNLTTRTQLPPAYTNSFTRGVYYPDKVFRSSVLHSTQDLFLPFFSNVTWFHAIHVSGTNGTKRFDNPVLPFNDGVYFASTEKSNIIRGWIFGTTLDSKTQSLLIVNNATNVVIKVCEFQFCNDPFLGVYYHKNNKSWMESEFRVYSSANNCTFEYVSQPFLMDLEGKQGNFKNLREFVFKNIDGYFKIYSKHTPINLVRDLPQGFSALEPLVDLPIGINITRFQTLLALHRSYLTPGDSSSGWTAGAAAYYVGYLQPRTFLLKYNENGTITDAVDCALDPLSETKCTLKSFTVEKGIYQTSNFRVQPTESIVRFPNITNLCPFGEVFNATRFASVYAWNRKRISNCVADYSVLYNSASFSTFKCYGVSPTKLNDLCFTNVYADSFVIRGDEVRQIAPGQTGKIADYNYKLPDDFTGCVIAWNSNNLDSKVGGNYNYLYRLFRKSNLKPFERDISTEIYQAGSTPCNGVEGFNCYFPLQSYGFQPTNGVGYQPYRVVVLSFELLHAPATVCGPKKSTNLVKNKCVNFNFNGLTGTGVLTESNKKFLPFQQFGRDIADTTDAVRDPQTLEILDITPCSFGGVSVITPGTNTSNQVAVLYQDVNCTEVPVAIHADQLTPTWRVYSTGSNVFQTRAGCLIGAEHVNNSYECDIPIGAGICASYQTQTNSPRRARSVASQSIIAYTMSLGAENSVAYSNNSCAIPTNFTISVTTEILPVSMTKTSVDCTMYICGDSTECSNLLLQYGSFCTQLNRALTGIAVEQDKNTQQVFAQVKQIYKTPPIKDFGGFNFSQILPDPSKPSKRSFIEDLLFNKVTLADAGFIKQYGDCLGDIAARDLICAQKFNGLTVLPPLLTDEMIAQYTSALLAGTITSGWTFGAGAALQIPFAMQMAYRFNGIGVTQNVLYENQKLIANQFNSAIGKIQDSLSSTASALGKLQDVVNQNAQALNTLVKQLSSNFGAISSVLNDILSRLDKVEAEVQIDRLITGRLQSLQTYVTQQLIRAAEIRASANLAATKMSECVLGQSKRVDFCGKGYHLMSFPQSAPHGVVFLHVTYVPAQEKNFTCAPAICHDGKAHFPREGVFVSNGTHWFVTQRNFYEPQIITTDNTFVSGNCDVVIGIVNNTVYDPLQPELDSFKEELDKYFKNHTSPDVDLGDISGINASVVNIQKEIDRLNEVAKNLNESLIDLQELGKYEQYIKGGGSGGGQIYEGKLTAEGLRFGIVASRFNHALVDRLVEGAIDAIVRHGGREEDITLVRVPGSWEIPVAAGELARKEDIDAVIAIGVLIRGATPHFDYIASEVSKGLADLSLELRKPITFGVITADTLEQAIERAGTKHGNKGWEAALSAIEMANLFKSLR

SEQ ID NO: 3987 - protein, 1371 aa, Artificial Sequence
  SARS-CoV-2/France/HF1805/2020__EPI_ISL_414628 spike protein (1-1211)(I712C_T1077C) LumSynth construct
MFVFLVLLPLVSSQCVNLTTRTQLPPAYTNSFTRGVYYPDKVFRSSVLHSTQDLFLPFFSNVTWFHAIHVSGTNGTKRFDNPVLPFNDGVYFASTEKSNIIRGWIFGTTLDSKTQSLLIVNNATNVVIKVCEFQFCNDPFLGVYYHKNNKSWMESEFRVYSSANNCTFEYVSQPFLMDLEGKQGNFKNLREFVFKNIDGYFKIYSKHTPINLVRDLPQGFSALEPLVDLPIGINITRFQTLLALHRSYLTPGDSSSGWTAGAAAYYVGYLQPRTFLLKYNENGTITDAVDCALDPLSETKCTLKSFTVEKGIYQTSNFRVQPTESIVRFPNITNLCPFGEVFNATRFASVYAWNRKRISNCVADYSVLYNSASFSTFKCYGVSPTKLNDLCFTNVYADSFVIRGDEVRQIAPGQTGKIADYNYKLPDDFTGCVIAWNSNNLDSKVGGNYNYLYRLFRKSNLKPFERDISTEIYQAGSTPCNGVEGFNCYFPLQSYGFQPTNGVGYQPYRVVVLSFELLHAPATVCGPKKSTNLVKNKCVNFNFNGLTGTGVLTESNKKFLPFQQFGRDIADTTDAVRDPQTLEILDITPCSFGGVSVITPGTNTSNQVAVLYQGVNCTEVPVAIHADQLTPTWRVYSTGSNVFQTRAGCLIGAEHVNNSYECDIPIGAGICASYQTQTNSPRRARSVASQSIIAYTMSLGAENSVAYSNNSCAIPTNFTISVTTEILPVSMTKTSVDCTMYICGDSTECSNLLLQYGSFCTQLNRALTGIAVEQDKNTQEVFAQVKQIYKTPPIKDFGGFNFSQILPDPSKPSKRSFIEDLLFNKVTLADAGFIKQYGDCLGDIAARDLICAQKFNGLTVLPPLLTDEMIAQYTSALLAGTITSGWTFGAGAALQIPFAMQMAYRFNGIGVTQNVLYENQKLIANQFNSAIGKIQDSLSSTASALGKLQDVVNQNAQALNTLVKQLSSNFGAISSVLNDILSRLDKVEAEVQIDRLITGRLQSLQTYVTQQLIRAAEIRASANLAATKMSECVLGQSKRVDFCGKGYHLMSFPQSAPHGVVFLHVTYVPAQEKNFTCAPAICHDGKAHFPREGVFVSNGTHWFVTQRNFYEPQIITTDNTFVSGNCDVVIGVVNNTVYDPLQPELDSFKEELDKYFKNHTSPDVDLGDISGINASVVNIQKEIDRLNEVAKNLNESLIDLQELGKYEQYIKGGGSGGGQIYEGKLTAEGLRFGIVASRFNHALVDRLVEGAIDAIVRHGGREEDITLVRVPGSWEIPVAAGELARKEDIDAVIAIGVLIRGATPHFDYIASEVSKGLADLSLELRKPITFGVITADTLEQAIERAGTKHGNKGWEAALSAIEMANLFKSLR

SEQ ID NO: 3988 - protein, 1371 aa, Artificial Sequence
  SARS-CoV-2/Netherlands/ZuidHolland_9/2020__EPI_ISL_414445 spike protein (1-1211)(I712C_T1077C) LumSynth construct
MFVFLVLLPLVSSQCVNLTTRTQLPPAYTNSFTRGVYYPDKVFRSSVLHSTQDLFLPFFSNVTWFHAIHVSGTNGTKRFDNPVLPFNDGVYFASTEKSNIIRGWIFGTTLDSKTQSLLIVNNATNVVIKVCEFQFCNDPFLGVYYHKNNKSWMESEFRVYSSANNCTFEYVSQPFLMDLEGKQGNFKNLREFVFKNIDGYFKIYSKHTPINLVRDLPQGFSALEPLVDLPIGINITRFQTLLALHRSYLTPGDSSSGWTAGAAAYYVGYLQPRTFLLKYNENGTITDAVDCALDPLSETKCTLKSFTVEKGIYQTSNFRVQPTESIVRFPNITNLCPFGEVFNATRFASVYAWNRKRISNCVADYSVLYNSASFSTFKCYGVSPTKLNDLCFTNVYADSFVIRGDEVRQIAPGQTGKIADYNYKLPDDFTGCVIAWNSNNLDSKVGGNYNYLYRLFRKSNLKPFERDISTEIYQAGSTPCNGVEGFNCYFPLQSYGFQPTNGVGYQPYRVVVLSFELLHAPATVCGPKKSTNLVKNKCVNFNFNGLTGTGVLTESNKKFLPFQQFGRDIADTTDAVRDPQTLEILDITPCSFGGVSVITPGTNTSNQVAVLYQGVNCTEVPVAIHADQLTPTWRVYSTGSNVFQTRAGCLIGAEHVNNSYECDIPIGAGICASYQTQTNSPRRARSVASQSIIAYTMSLGAENSVAYSNNSCAIPTNFTISVTTEILPVSMTKTSVDCTMYICGDSTECSNLLLQYGSFCTQLNRALTGIAVEQDKNTQEVFAQVKQIYKTPPIKDFGGFNFSQILPDPSKPSKRSFIEDLLFNKVTLADAGFIKQYGDCLGDIAARDLICVQKFNGLTVLPPLLTDEMIAQYTSALLAGTITSGWTFGAGAALQIPFAMQMAYRFNGIGVTQNVLYENQKLIANQFNSAIGKIQDSLSSTASALGKLQDVVNQNAQALNTLVKQLSSNFGAISSVLNDILSRLDKVEAEVQIDRLITGRLQSLQTYVTQQLIRAAEIRASANLAATKMSECVLGQSKRVDFCGKGYHLMSFPQSAPHGVVFLHVTYVPAQEKNFTCAPAICHDGKAHFPREGVFVSNGTHWFVTQRNFYEPQIITTDNTFVSGNCDVVIGIVNNTVYDPLQPELDSFKEELDKYFKNHTSPDVDLGDISGINASVVNIQKEIDRLNEVAKNLNESLIDLQELGKYEQYIKGGGSGGGQIYEGKLTAEGLRFGIVASRFNHALVDRLVEGAIDAIVRHGGREEDITLVRVPGSWEIPVAAGELARKEDIDAVIAIGVLIRGATPHFDYIASEVSKGLADLSLELRKPITFGVITADTLEQAIERAGTKHGNKGWEAALSAIEMANLFKSLR

SEQ ID NO: 3989 - protein, 1371 aa, Artificial Sequence
  SARS-CoV-2/Finland/FIN03032020A/2020__EPI_ISL_413602 spike protein (1-1211)(I712C_T1077C) LumSynth construct
MFVFLVLLPLVSSQCVNLTTRTQLPPAYTNSFTRGVYYPDKVFRSSVLHSTQDLFLPFFSNVTWFHAIHVSGTNGTKRFDNPVLPFNDGVYFASTEKSNIIRGWIFGTTLDSKTQSLLIVNNATNVVIKVCEFQFCNDPFLGVYYHKNNKSWMESEFRVYSSANNCTFEYVSQPFLMDLEGKQGNFKNLREFVFKNIDGYFKIYSKHTPINLVRDLPQGFSALEPLVDLPIGINITRFQTLLALHRSYLTPGDSSSGWTAGAAAYYVGYLQPRTFLLKYNENGTITDAVDCALDPLSETKCTLKSFTVEKGIYQTSNFRVQPTESIVRFPNITNLCPFGEVFNATRFASVYAWNRKRISNCVADYSVLYNSASFSTFKCYGVSPTKLNDLCFTNVYADSFVIRGDEVRQIAPGQTGKIADYNYKLPDDFTGCVISWNSNNLDSKVGGNYNYLYRLFRKSNLKPFERDISTEIYQAGSTPCNGVEGFNCYFPLQSYGFQPTNGVGYQPYRVVVLSFELLHAPATVCGPKKSTNLVKNKCVNFNFNGLTGTGVLTESNKKFLPFQQFGRDIADTTDAVRDPQTLEILDITPCSFGGVSVITPGTNTSNQVAVLYQGVNCTEVPVAIHADQLTPTWRVYSTGSNVFQTRAGCLIGAEHVNNSYECDIPIGAGICASYQTQTNSPRRARSVASQSIIAYTMSLGAENSVAYSNNSCAIPTNFTISVTTEILPVSMTKTSVDCTMYICGDSTECSNLLLQYGSFCTQLNRALTGIAVEQDKNTQEVFAQVKQIYKTPPIKDFGGFNFSQILPDPSKPSKRSFIEDLLFNKVTLADAGFIKQYGDCLGDIAARDLICAQKFNGLTVLPPLLTDEMIAQYTSALLAGTITSGWTFGAGAALQIPFAMQMAYRFNGIGVTQNVLYENQKLIANQFNSAIGKIQDSLSSTASALGKLQDVVNQNAQALNTLVKQLSSNFGAISSVLNDILSRLDKVEAEVQIDRLITGRLQSLQTYVTQQLIRAAEIRASANLAATKMSECVLGQSKRVDFCGKGYHLMSFPQSAPHGVVFLHVTYVPAQEKNFTCAPAICHDGKAHFPREGVFVSNGTHWFVTQRNFYEPQIITTDNTFVSGNCDVVIGIVNNTVYDPLQPELDSFKEELDKYFKNHTSPDVDLGDISGINASVVNIQKEIDRLNEVAKNLNESLIDLQELGKYEQYIKGGGSGGGQIYEGKLTAEGLRFGIVASRFNHALVDRLVEGAIDAIVRHGGREEDITLVRVPGSWEIPVAAGELARKEDIDAVIAIGVLIRGATPHFDYIASEVSKGLADLSLELRKPITFGVITADTLEQAIERAGTKHGNKGWEAALSAIEMANLFKSLR

SEQ ID NO: 3990 - protein, 1371 aa, Artificial Sequence
  SARS-CoV-2/France/GE1977/2020__EPI_ISL_414632 spike protein (1-1211)(I712C_T1077C) LumSynth construct
MFVFLVLLPLVSSQCVNLTTRTQLPPAYTNSFTRGVYYPDKVFRSSVLHSTQDLFLPFFSNVTWFHAIHVSGTNGTKRFDNPVLPFNDGVYFASTEKSNIIRGWIFGTTLDSKTQSLLIVNNATNVVIKVCEFQFCNDPFLGVYYHKNNKSWMESEFRVYSSANNCTFEYVSQPFLMDLEGKQGNFKNLREFVFKNIDGYFKIYSKHTPINLVRDLPQGFSALEPLVDLPIGINITRFQTLLALHRSYLTPGDSSSGWTAGAAAYYVGYLQPRTFLLKYNENGTITDAVDCALDPLSETKCTLKSFTVEKGIYQTSNFRVQPTESIVRFPNITNLCPFGEVFNATRFASVYAWNRKRISNCVADYSVLYNSASFSTFKCYGVSPTKLNDLCFTNVYADSFVIRGDEVRQIAPGQTGKIADYNYKLPDDFTGCVIAWNSNNLDSKVGGNYNYLYRLFRKSNLKPFERDISTEIYQAGSTPCNGVEGFNCYFPLQSYGFQPTNGVGYQPYRVVVLSFELLHAPATVCGPKKSTNLVKNKCVNFNFNGLTGTGVLTESNKKFLPFQQFGRDIADTTDAVRDPQTLEILDITPCSFGGVSVITPGTNTSNQVAVLYQGVNCTEVPVAIHADQLTPTWRVYSTGSNVFQTRAGCLIGAEHVNNSYECDIPIGAGICASYQTQTNSPRRARSVASQSIIAYTMSLGAENSVAYSNNSCAIPTNFTISVTTEILPVSMTKTSVDCTMYICGDSTECSNLLLQYGSFCTQLNRALTGIAVEQDKNTQEVFAQVKQIYKTPPIKDFGGFNFSQILPDPSKPSKRSFIEDLLFNKVTLADAGFIKQYGDCLGDIAARDLICAQKFNGLTVLPPLLTDEMIAQYTSALLAGTITSGWTFGAGAALQIPFAMQMAYRFNGIGVTQNVLYENQKLIANQFNSAIGKIQDSLFSTASALGKLQDVVNQNAQALNTLVKQLSSNFGAISSVLNDILSRLDKVEAEVQIDRLITGRLQSLQTYVTQQLIRAAEIRASANLAATKMSECVLGQSKRVDFCGKGYHLMSFPQSAPHGVVFLHVTYVPAQEKNFTCAPAICHDGKAHFPREGVFVSNGTHWFVTQRNFYEPQIITTDNTFVSGNCDVVIGIVNNTVYDPLQPELDSFKEELDKYFKNHTSPDVDLGDISGINASVVNIQKEIDRLNEVAKNLNESLIDLQELGKYEQYIKGGGSGGGQIYEGKLTAEGLRFGIVASRFNHALVDRLVEGAIDAIVRHGGREEDITLVRVPGSWEIPVAAGELARKEDIDAVIAIGVLIRGATPHFDYIASEVSKGLADLSLELRKPITFGVITADTLEQAIERAGTKHGNKGWEAALSAIEMANLFKSLR

SEQ ID NO: 3991 - protein, 1371 aa, Artificial Sequence
  SARS-CoV-2/Finland/FIN-313/2020__EPI_ISL_414641 spike protein (1-1211)(I712C_T1077C) LumSynth construct
MFVFLVLLPLVSSQCVNLTTRTQLPPAYTNSFTRGVYYPDKVFRSSVLHSTQDLFLPFFSNVTWFHAIHVSGTNGTKRFDNPVLPFNDGVYFASTEKSNIIRGWIFGTTLDSKTQSLLIVNNATNVVIKVCEFQFCNDPFLGVYYHKNNKSWMESEFRVYSSANNCTFEYVSQPFLMDLEGKQGNFKNLREFVFKNIDGYFKIYSKHTPINLVRDLPQGFSALEPLVDLPIGINITRFKTLLALHRSYLTPGDSSSGWTAGAAAYYVGYLQPRTFLLKYNENGTITDAVDCALDPLSETKCTLKSFTVEKGIYQTSNFRVQPTESIVRFPNITNLCPFGEVFNATRFASVYAWNRKRISNCVADYSVLYNSASFSTFKCYGVSPTKLNDLCFTNVYADSFVIRGDEVRQIAPGQTGKIADYNYKLPDDFTGCVIAWNSNNLDSKVGGNYNYLYRLFRKSNLKPFERDISTEIYQAGSTPCNGVEGFNCYFPLQSYGFQPTNGVGYQPYRVVVLSFELLHAPATVCGPKKSTNLVKNKCVNFNFNGLTGTGVLTESNKKFLPFQQFGRDIADTTDAVRDPQTLEILDITPCSFGGVSVITPGTNTSNQVAVLYQGVNCTEVPVAIHADQLTPTWRVYSTGSNVFQTRAGCLIGAEHVNNSYECDIPIGAGICASYQTQTNSPRRARSVASQSIIAYTMSLGAENSVAYSNNSCAIPTNFTISVTTEILPVSMTKTSVDCTMYICGDSTECSNLLLQYGSFCTQLNRALTGIAVEQDKNTQEVFAQVKQIYKTPPIKDFGGFNFSQILPDPSKPSKRSFIEDLLFNKVTLADAGFIKQYGDCLGDIAARDLICAQKFNGLTVLPPLLTDEMIAQYTSALLAGTITSGWTFGAGAALQIPFAMQMAYRFNGIGVTQNVLYENQKLIANQFNSAIGKIQDSLSSTASALGKLQDVVNQNAQALNTLVKQLSSNFGAISSVLNDILSRLDKVEAEVQIDRLITGRLQSLQTYVTQQLIRAAEIRASANLAATKMSECVLGQSKRVDFCGKGYHLMSFPQSAPHGVVFLHVTYVPAQEKNFTCAPAICHDGKAHFPREGVFVSNGTHWFVTQRNFYEPQIITTDNTFVSGNCDVVIGIVNNTVYDPLQPELDSFKEELDKYFKNHTSPDVDLGDISGINASVVNIQKEIDRLNEVAKNLNESLIDLQELGKYEQYIKGGGSGGGQIYEGKLTAEGLRFGIVASRFNHALVDRLVEGAIDAIVRHGGREEDITLVRVPGSWEIPVAAGELARKEDIDAVIAIGVLIRGATPHFDYIASEVSKGLADLSLELRKPITFGVITADTLEQAIERAGTKHGNKGWEAALSAIEMANLFKSLR

SEQ ID NO: 3992 - protein, 1371 aa, Artificial Sequence
  SARS-CoV-2/Netherlands/ZuidHolland_2/2020__EPI_ISL_414556 spike protein (1-1211)(I712C_T1077C) LumSynth construct
MFVFLVLLPLVSSQCVNLTTRTQLPPAYTNSFTRGVYYPDKVFRSSVLHSTQDLFLPFFSNVTWFHAIHVSGTNGTKRFDNPVLPFNDGVYFASTEKSNIIRGWIFGTTLDSKTQSLLIVNNATNVVIKVCEFQFCNDPFLGVYYHKNNKSWMESEFRVYSSANNCTFEYVSQPFLMDLEGKQGNFKNLREFVFKNIDGYFKIYSKHTPINLVRDLPQGFSALEPLVDLPIGINITRFQTLLALHRSYLTPGDSSSGWTAGAAAYYVGYLQPRTFLLKYNENGTITDAVDCALDPLSETKCTLKSFTVEKGIYQTSNFRVQPTESIVRFPNITNLCPFGEVFNATRFASVYAWNRKRISNCVADYSVLYNSASFSTFKCYGVSPTKLNDLCFTNVYADSFVIRGDEVRQIAPGQTGKIADYNYKLPDDFTGCVIAWNSNNLDSKVGGNYNYLYRLFRKSNLKPFERDISTEIYQAGSTPCNGVEGFNCYFPLQSYGFQPTNGVGYQPYRVVVLSFELLHAPATVCGPKKSTNLVKNKCVNFNFNGLTGTGVLTESNKKFLPFQQFGRDIADTTDAVRDPQTLEILDITPCSFGGVSVITPGTNTSNQVAVLYQGVNCTEVPVAIHADQLTPTWRVYSTGSNVFQTRAGCLIGAEHVNNSYECDIPIGAGICASYQTQTNSPRRARSVASQSIIAYTMSLGAENSVAYSNNSCAIPTNFTISVTTEILPVSMTKTSVDCTMYICGDSTECSNLLLQYGSFCTQLNRALTGIALEQDKNTQEVFAQVKQIYKTPPIKDFGGFNFSQILPDPSKPSKRSFIEDLLFNKVTLADAGFIKQYGDCLGDIAARDLICAQKFNGLTVLPPLLTDEMIAQYTSALLAGTITSGWTFGAGAALQIPFAMQMAYRFNGIGVTQNVLYENQKLIANQFNSAIGKIQDSLSSTASALGKLQDVVNQNAQALNTLVKQLSSNFGAISSVLNDILSRLDKVEAEVQIDRLITGRLQSLQTYVTQQLIRAAEIRASANLAATKMSECVLGQSKRVDFCGKGYHLMSFPQSAPHGVVFLHVTYVPAQEKNFTCAPAICHDGKAHFPREGVFVSNGTHWFVTQRNFYEPQIITTDNTFVSGNCDVVIGIVNNTVYDPLQPELDSFKEELDKYFKNHTSPDVDLGDISGINASVVNIQKEIDRLNEVAKNLNESLIDLQELGKYEQYIKGGGSGGGQIYEGKLTAEGLRFGIVASRFNHALVDRLVEGAIDAIVRHGGREEDITLVRVPGSWEIPVAAGELARKEDIDAVIAIGVLIRGATPHFDYIASEVSKGLADLSLELRKPITFGVITADTLEQAIERAGTKHGNKGWEAALSAIEMANLFKSLR

SEQ ID NO: 3993 - protein, 1371 aa, Artificial Sequence
  SARS-CoV-2/USA/WA-UW31/2020__EPI_ISL_414618 spike protein (1-1211)(I712C_T1077C) LumSynth construct
MFVFLVLLPLVSSQCVNLTTRTQLPPAYTNSFTRGVYYPDKVFRSSVLHSTQDLFLPFFSNVTWFHAIHVSGTNGTKRFDNPVLPFNDGVYFASTEKSNIIRGWIFGTTLDSKTQSLLIVNNATNVVIKVCEFQFCNDPFLGVYYHKNNKSWMESEFRVYSSANNCTFEYVSQPFLMDLEGKQGNFKNLREFVFKNIDGYFKIYSKHTPINLVRDLPQGFSALEPLVDLPIGINITRFQTLLALHRSYLTPGDSSSGWTAGAAAYYVGYLQPRTFLLKYNENGTITDAVDCALDPLSETKCTLKSFTVEKGIYQTSNFRVQPTESIVRFPNITNLCPFGEVFNATRFASVYAWNRKRISNCVADYSVLYNSASFSTFKCYGVSPTKLNDLCFTNVYADSFVIRGDEVRQIAPGQTGKIADYNYKLPDDFTGCVIAWNSNNLDSKVGGNYNYLYRLFRKSNLKPFERDISTEIYQAGSTPCNGAEGFNCYFPLQSYGFQPTNGVGYQPYRVVVLSFELLHAPATVCGPKKSTNLVKNKCVNFNFNGLTGTGVLTESNKKFLPFQQFGRDIADTTDAVRDPQTLEILDITPCSFGGVSVITPGTNTSNQVAVLYQDVNCTEVPVAIHADQLTPTWRVYSTGSNVFQTRAGCLIGAEHVNNSYECDIPIGAGICASYQTQTNSPRRARSVASQSIIAYTMSLGAENSVAYSNNSCAIPTNFTISVTTEILPVSMTKTSVDCTMYICGDSTECSNLLLQYGSFCTQLNRALTGIAVEQDKNTQEVFAQVKQIYKTPPIKDFGGFNFSQILPDPSKPSKRSFIEDLLFNKVTLADAGFIKQYGDCLGDIAARDLICAQKFNGLTVLPPLLTDEMIAQYTSALLAGTITSGWTFGAGAALQIPFAMQMAYRFNGIGVTQNVLYENQKLIANQFNSAIGKIQDSLSSTASALGKLQDVVNQNAQALNTLVKQLSSNFGAISSVLNDILSRLDKVEAEVQIDRLITGRLQSLQTYVTQQLIRAAEIRASANLAATKMSECVLGQSKRVDFCGKGYHLMSFPQSAPHGVVFLHVTYVPAQEKNFTCAPAICHDGKAHFPREGVFVSNGTHWFVTQRNFYEPQIITTDNTFVSGNCDVVIGIVNNTVYDPLQPELDSFKEELDKYFKNHTSPDVDLGDISGINASVVNIQKEIDRLNEVAKNLNESLIDLQELGKYEQYIKGGGSGGGQIYEGKLTAEGLRFGIVASRFNHALVDRLVEGAIDAIVRHGGREEDITLVRVPGSWEIPVAAGELARKEDIDAVIAIGVLIRGATPHFDYIASEVSKGLADLSLELRKPITFGVITADTLEQAIERAGTKHGNKGWEAALSAIEMANLFKSLR

SEQ ID NO: 3994 - protein, 1371 aa, Artificial Sequence
  SARS-CoV-2/South Korea/SNU01/2020__EPI_ISL_411929 spike protein (1-1211)(I712C_T1077C) LumSynth construct
MFVFLVLLPLVSSQCVNLTTRTQLPPAYTNSFTRGVYYPDKVFRSSVLHSTQDLFLPFFSNVTWFHAIHVSGTNGTKRFDNPVLPFNDGVYFASTEKSNIIRGWIFGTTLDSKTQSLLIVNNATNVVIKVCEFQFCNDPFLGVYYHKNNKSWMESEFRVYSSANNCTFEYVSQPFLMDLEGKQGNFKNLREFVFKNIDGYFKIYSKHTPINLVRDLPQGFWALEPLVDLPIGINITRFQTLLALHRSYLTPGDSSSGWTAGAAAYYVGYLQPRTFLLKYNENGTITDAVDCALDPLSETKCTLKSFTVEKGIYQTSNFRVQPTESIVRFPNITNLCPFGEVFNATRFASVYAWNRKRISNCVADYSVLYNSASFSTFKCYGVSPTKLNDLCFTNVYADSFVIRGDEVRQIAPGQTGKIADYNYKLPDDFTGCVIAWNSNNLDSKVGGNYNYLYRLFRKSNLKPFERDISTEIYQAGSTPCNGVEGFNCYFPLQSYGFQPTNGVGYQPYRVVVLSFELLHAPATVCGPKKSTNLVKNKCVNFNFNGLTGTGVLTESNKKFLPFQQFGRDIADTTDAVRDPQTLEILDITPCSFGGVSVITPGTNTSNQVAVLYQDVNCTEVPVAIHADQLTPTWRVYSTGSNVFQTRAGCLIGAEHVNNSYECDIPIGAGICASYQTQTNSPRRARSVASQSIIAYTMSLGAENSVAYSNNSCAIPTNFTISVTTEILPVSMTKTSVDCTMYICGDSTECSNLLLQYGSFCTQLNRALTGIAVEQDKNTQEVFAQVKQIYKTPPIKDFGGFNFSQILPDPSKPSKRSFIEDLLFNKVTLADAGFIKQYGDCLGDIAARDLICAQKFNGLTVLPPLLTDEMIAQYTSALLAGTITSGWTFGAGAALQIPFAMQMAYRFNGIGVTQNVLYENQKLIANQFNSAIGKIQDSLSSTASALGKLQDVVNQNAQALNTLVKQLSSNFGAISSVLNDILSRLDKVEAEVQIDRLITGRLQSLQTYVTQQLIRAAEIRASANLAATKMSECVLGQSKRVDFCGKGYHLMSFPQSAPHGVVFLHVTYVPAQEKNFTCAPAICHDGKAHFPREGVFVSNGTHWFVTQRNFYEPQIITTDNTFVSGNCDVVIGIVNNTVYDPLQPELDSFKEELDKYFKNHTSPDVDLGDISGINASVVNIQKEIDRLNEVAKNLNESLIDLQELGKYEQYIKGGGSGGGQIYEGKLTAEGLRFGIVASRFNHALVDRLVEGAIDAIVRHGGREEDITLVRVPGSWEIPVAAGELARKEDIDAVIAIGVLIRGATPHFDYIASEVSKGLADLSLELRKPITFGVITADTLEQAIERAGTKHGNKGWEAALSAIEMANLFKSLR

SEQ ID NO: 3995 - protein, 1371 aa, Artificial Sequence
  SARS-CoV-2/China/WF0004/2020__EPI_ISL_413694 spike protein (1-1211)(I712C_T1077C) LumSynth construct
MFVFLVLLPLVSSQCVNLTTRTQLPPAYTNSFTRGVYYPDKVFRSSVLHSTQDLFLPFFSNVTWFHAIHVSGTNGTKRFDNPVLPFNDGVYFASTEKSNIIRGWIFGTTLDSKTQSLLIVNNATNVVIKVCEFQFCNDPFLGVYYHKNNKSWTESEFRVYSSANNCTFEYVSQPFLMDLEGKQGNFKNLREFVFKNIDGYFKIYSKHTPINLVRDLPQGFSALEPLVDLPIGINITRFQTLLALHRSYLTPGDSSSGWTAGAAAYYVGYLQPRTFLLKYNENGTITDAVDCALDPLSETKCTLKSFTVEKGIYQTSNFRVQPTESIVRFPNITNLCPFGEVFNATRFASVYAWNRKRISNCVADYSVLYNSASFSTFKCYGVSPTKLNDLCFTNVYADSFVIRGDEVRQIAPGQTGKIADYNYKLPDDFTGCVIAWNSNNLDSKVGGNYNYLYRLFRKSNLKPFERDISTEIYQAGSTPCNGVEGFNCYFPLQSYGFQPTNGVGYQPYRVVVLSFELLHAPATVCGPKKSTNLVKNKCVNFNFNGLTGTGVLTESNKKFLPFQQFGRDIADTTDAVRDPQTLEILDITPCSFGGVSVITPGTNTSNQVAVLYQDVNCTEVPVAIHADQLTPTWRVYSTGSNVFQTRAGCLIGAEHVNNSYECDIPIGAGICASYQTQTNSPRRARSVASQSIIAYTMSLGAENSVAYSNNSCAIPTNFTISVTTEILPVSMTKTSVDCTMYICGDSTECSNLLLQYGSFCTQLNRALTGIAVEQDKNTQEVFAQVKQIYKTPPIKDFGGFNFSQILPDPSKPSKRSFIEDLLFNKVTLADAGFIKQYGDCLGDIAARDLICAQKFNGLTVLPPLLTDEMIAQYTSALLAGTITSGWTFGAGAALQIPFAMQMAYRFNGIGVTQNVLYENQKLIANQFNSAIGKIQDSLSSTASALGKLQDVVNQNAQALNTLVKQLSSNFGAISSVLNDILSRLDKVEAEVQIDRLITGRLQSLQTYVTQQLIRAAEIRASANLAATKMSECVLGQSKRFDFCGKGYHLMSFPQSAPHGVVFLHVTYVPAQEKNFTCAPAICHDGKAHFPREGVFVSNGTHWFVTQRNFYEPQIITTDNTFVSGNCDVVIGIVNNTVYDPLQPELDSFKEELDKYFKNHTSPDVDLGDISGINASVVNIQKEIDRLNEVAKNLNESLIDLQELGKYEQYIKGGGSGGGQIYEGKLTAEGLRFGIVASRFNHALVDRLVEGAIDAIVRHGGREEDITLVRVPGSWEIPVAAGELARKEDIDAVIAIGVLIRGATPHFDYIASEVSKGLADLSLELRKPITFGVITADTLEQAIERAGTKHGNKGWEAALSAIEMANLFKSLR

SEQ ID NO: 3996 - protein, 1371 aa, Artificial Sequence
  SARS-CoV-2/China/WF0028/2020__EPI_ISL_413791 spike protein (1-1211)(I712C_T1077C) LumSynth construct
MFVFLVLLPLVSSQCVNLTTRTQLPPAYTNSFTRGVYYPDKVFRSSVLHSTQDLFLPFFSNVTWFHAIHVSGTNGTKRFDNPVLPFNDGVYFASTEKSNIIRGWIFGTTLDSKTQSLLIVNNATNVVIKVCEFQFCNDPFLGVYYHKNNKSWMESEFRVYSSANNCTFEYVSQPFLMDLEGKQGNFKNLREFVFKNIDGYFKIYSKHTPINLVRDLPQGFSALEPLVDLPIGINITRFQTLLALHRSYLTPGDSSSGWTAGAAAYYVGYLQPRTFLLKYNENGTITDAVDCALDPLSETKCTLKSFTVEKGIYQTSNFRVQPTESIVRFPNITNLCPFGEVFNATRFASVYAWNRKRISNCVADYSVLYNSASFSTFKCYGVSPTKLNDLCFTNVYADSFVIRGDEVRQIAPGQTGKIADYNYKLPDDFTGCVIAWNSNNLDSKVGGNYNYLYRLFRKSNLKPFERDISTEIYQAGSTPCNGVEGFNCYFPLQSYGFQPTNGVGYQPYRVVVLSFELLHAPATVCGPKKSTNLVKNKCVNFNFNGLTGTGVLTESNKKFLPFQQFGRDIADTTDAVRDPQTLEILDITPCSFGGVSVITPGTNTSNQVAVLYQDVNCTEVPVAIHADQLTPTWRVYSTGSNVFQTRAGCLIGAEHVNNSYECDIPIGAGICASYQTQTNSPRRARSVASQSIIAYTMSLGAENSVAYSNNSCAIPTNFTISVTTEILPVSMTKTSVDCTMYICGDSTECSNLLLQYGSFCTQLNRALTGIAVEQDKNTQEVFAQVKQIYKTPPIKDFGGFNFSQILPDPSKPSKRSFIEDLLFNKVTLADAGFIKQYGDCLGDIAARDLICAQKFNGLTVLPPLLTDEMIAQYTSALLAGTITSGWTFGAGAALQIPFAMQMAYRFNGIGVTQNVLYENQKLIANQFNSAIGKIQDSLSSTASALGKLQDVVNQNAQALNTLVKQLSSNFGAISSVLNDILSRLDKVEAEVQIDRLITGRLQSLQTYVTQQLIRAAEIRASANLAATKMSECVLGQSKRVDFCGKGYHLMSFPQSAPHGVVFLHVTYVPAQEKNFTCAPAICHDGKAHFPREGVFVSNGTHWFVTQRNFYEPQIITTDNTFVSGNCDVVIGIVNNTVYDPLQPELESFKEELDKYFKNHTSPDVDLGDISGINASVVNIQKEIDRLNEVAKNLNESLIDLQELGKYEQYIKGGGSGGGQIYEGKLTAEGLRFGIVASRFNHALVDRLVEGAIDAIVRHGGREEDITLVRVPGSWEIPVAAGELARKEDIDAVIAIGVLIRGATPHFDYIASEVSKGLADLSLELRKPITFGVITADTLEQAIERAGTKHGNKGWEAALSAIEMANLFKSLR

SEQ ID NO: 3997 - protein, 1371 aa, Artificial Sequence
  SARS-CoV-2/2019-nCoV/USA-CruiseA-18/2020__MT159716.1 spike protein (1-1211)(I712C_T1077C) LumSynth construct
MFVFLVLLPLVSSQCVNLTTRTQLPPAYTNSFTRGVYYPDKVFRSSVLHSTQDLFLPFFSNVTWFHAIHVSGTNGTKRFDNPVLPFNDGVYFASTEKSNIIRGWIFGTTLDSKTQSLLIVNNATNVVIKVCEFQFCNDPFLGVYYHKNNKSWMESELRVYSSANNCTFEYVSQPFLMDLEGKQGNFKNLREFVFKNIDGYFKIYSKHTPINLVRDLPQGFSALEPLVDLPIGINITRFQTLLALHRSYLTPGDSSSGWTAGAAAYYVGYLQPRTFLLKYNENGTITDAVDCALDPLSETKCTLKSFTVEKGIYQTSNFRVQPTESIVRFPNITNLCPFGEVFNATRFASVYAWNRKRISNCVADYSVLYNSASFSTFKCYGVSPTKLNDLCFTNVYADSFVIRGDEVRQIAPGQTGKIADYNYKLPDDFTGCVIAWNSNNLDSKVGGNYNYLYRLFRKSNLKPFERDISTEIYQAGSTPCNGVEGFNCYFPLQSYGFQPTNGVGYQPYRVVVLSFELLHAPATVCGPKKSTNLVKNKCVNFNFNGLTGTGVLTESNKKFLPFQQFGRDIADTTDAVRDPQTLEILDITPCSFGGVSVITPGTNTSNQVAVLYQDVNCTEVPVAIHADQLTPTWRVYSTGSNVFQTRAGCLIGAEHVNNSYECDIPIGAGICASYQTQTNSPRRARSVASQSIIAYTMSLGAENSVAYSNNSCAIPTNFTISVTTEILPVSMTKTSVDCTMYICGDSTECSNLLLQYGSFCTQLNRALTGIAVEQDKNTQEVFAQVKQIYKTPPIKDFGGFNFSQILPDPSKPSKRSFIEDLLFNKVTLADAGFIKQYGDCLGDIAARDLICAQKFNGLTVLPPLLTDEMIAQYTSALLAGTITSGWTFGAGAALQIPFAMQMAYRFNGIGVTQNVLYENQKLIANQFNSAIGKIQDSLSSTASALGKLQDVVNQNAQALNTLVKQLSSNFGAISSVLNDILSRLDKVEAEVQIDRLITGRLQSLQTYVTQQLIRAAEIRASANLAATKMSECVLGQSKRVDFCGKGYHLMSFPQSAPHGVVFLHVTYVPAQEKNFTCAPAICHDGKAHFPREGVFVSNGTHWFVTQRNFYEPQIITTDNTFVSGNCDVVIGIVNNTVYDPLQPELDSFKEELDKYFKNHTSPDVDLGDISGINASVVNIQKEIDRLNEVAKNLNESLIDLQELGKYEQYIKGGGSGGGQIYEGKLTAEGLRFGIVASRFNHALVDRLVEGAIDAIVRHGGREEDITLVRVPGSWEIPVAAGELARKEDIDAVIAIGVLIRGATPHFDYIASEVSKGLADLSLELRKPITFGVITADTLEQAIERAGTKHGNKGWEAALSAIEMANLFKSLR

SEQ ID NO: 3998 - protein, 1371 aa, Artificial Sequence
  SARS-CoV-2/SARS-CoV-2/Yunnan-01/human/2020/CHN__MT049951.1 spike protein (1-1211)(I712C_T1077C) LumSynth construct
MFVFLVLLPLVSSQCVNLTTRTQLPPANTNSFTRGVYYPDKVFRSSVLHSTQDLFLPFFSNVTWFHAIHVSGTNGTKRFDNPVLPFNDGVYFASTEKSNIIRGWIFGTTLDSKTQSLLIVNNATNVVIKVCEFQFCNDPFLGVYYHKNNKSWMESEFRVYSSANNCTFEYVSQPFLMDLEGKQGNFKNLREFVFKNIDGYFKIYSKHTPINLVRDLPQGFSALEPLVDLPIGINITRFQTLLALHRSYLTPGDSSSGWTAGAAAYYVGYLQPRTFLLKYNENGTITDAVDCALDPLSETKCTLKSFTVEKGIYQTSNFRVQPTESIVRFPNITNLCPFGEVFNATRFASVYAWNRKRISNCVADYSVLYNSASFSTFKCYGVSPTKLNDLCFTNVYADSFVIRGDEVRQIAPGQTGKIADYNYKLPDDFTGCVIAWNSNNLDSKVGGNYNYLYRLFRKSNLKPFERDISTEIYQAGSTPCNGVEGFNCYFPLQSYGFQPTNGVGYQPYRVVVLSFELLHAPATVCGPKKSTNLVKNKCVNFNFNGLTGTGVLTESNKKFLPFQQFGRDIADTTDAVRDPQTLEILDITPCSFGGVSVITPGTNTSNQVAVLYQDVNCTEVPVAIHADQLTPTWRVYSTGSNVFQTRAGCLIGAEHVNNSYECDIPIGAGICASYQTQTNSPRRARSVASQSIIAYTMSLGAENSVAYSNNSCAIPTNFTISVTTEILPVSMTKTSVDCTMYICGDSTECSNLLLQYGSFCTQLNRALTGIAVEQDKNTQEVFAQVKQIYKTPPIKDFGGFNFSQILPDPSKPSKRSFIEDLLFNKVTLADAGFIKQYGDCLGDIAARDLICAQKFNGLTVLPPLLTDEMIAQYTSALLAGTITSGWTFGAGAALQIPFAMQMAYRFNGIGVTQNVLYENQKLIANQFNSAIGKIQDSLSSTASALGKLQDVVNQNAQALNTLVKQLSSNFGAISSVLNDILSRLDKVEAEVQIDRLITGRLQSLQTYVTQQLIRAAEIRASANLAATKMSECVLGQSKRVDFCGKGYHLMSFPQSAPHGVVFLHVTYVPAQEKNFTCAPAICHDGKAHFPREGVFVSNGTHWFVTQRNFYEPQIITTDNTFVSGNCDVVIGIVNNTVYDPLQPELDSFKEELDKYFKNHTSPDVDLGDISGINASVVNIQKEIDRLNEVAKNLNESLIDLQELGKYEQYIKGGGSGGGQIYEGKLTAEGLRFGIVASRFNHALVDRLVEGAIDAIVRHGGREEDITLVRVPGSWEIPVAAGELARKEDIDAVIAIGVLIRGATPHFDYIASEVSKGLADLSLELRKPITFGVITADTLEQAIERAGTKHGNKGWEAALSAIEMANLFKSLR

SEQ ID NO: 3999 - protein, 1371 aa, Artificial Sequence
  SARS-CoV-2/USA/WA-UW292/2020__EPI_ISL_418077 spike protein (1-1211)(I712C_T1077C) LumSynth construct
MFVFLVLLPLVSSQCVNLTTRTQLPPAYTNSFTRGVYYPDKVFRSSVLHSTQDLFLPFFSNVTWFHAIHVSGTNGTKRFDNPVLPFNDGVYFASTEKSNIIRGWIFGTTLDSKTQSLLIVNNATNVVIKVCEFQFCNDPFLGVYYHKNNKSWMESEFRVYSSANNCTFEYVSQPFLMDLEGKQGNFKNLREFVFKNIDGYFKIYSKHTPINLVRDLPQGFSALEPLVDLPIGINITRFQTLLALHRSYLTPGDSSSGWTAGAAAYYVGYLQPRTFLLKYNENGTITDAVDCALDPLSETKCTLKSFTVEKGIYQTSNFRVQPTESIVRFPNITNLCPFGEVFNATRFASVYAWNRKRISNCVADYSVLYNSASFSTFKCYGVSPTKLNDLCFTNVYADSFVIRGDEVRQIAPGQTGKIADYNYKLPDDFTGCVIAWNSNNLDSKVGGNYNYLYRLFRKSNLKPFERDISTEIYQASSTPCNGVEGFNCYFPLQSYGFQPTNGVGYQPYRVVVLSFELLHAPATVCGPKKSTNLVKNKCVNFNFNGLTGTGVLTESNKKFLPFQQFGRDIADTTDAVRDPQTLEILDITPCSFGGVSVITPGTNTSNQVAVLYQDVNCTEVPVAIHADQLTPTWRVYSTGSNVFQTRAGCLIGAEHVNNSYECDIPIGAGICASYQTQTNSPRRARSVASQSIIAYTMSLGAENSVAYSNNSCAIPTNFTISVTTEILPVSMTKTSVDCTMYICGDSTECSNLLLQYGSFCTQLNRALTGIAVEQDKNTQEVFAQVKQIYKTPPIKDFGGFNFSQILPDPSKPSKRSFIEDLLFNKVTLADAGFIKQYGDCLGDIAARDLICAQKFNGLTVLPPLLTDEMIAQYTSALLAGTITSGWTFGAGAALQIPFAMQMAYRFNGIGVTQNVLYENQKLIANQFNSAIGKIQDSLSSTASALGKLQDVVNQNAQALNTLVKQLSSNFGAISSVLNDILSRLDKVEAEVQIDRLITGRLQSLQTYVTQQLIRAAEIRASANLAATKMSECVLGQSKRVDFCGKGYHLMSFPQSAPHGVVFLHVTYVPAQEKNFTCAPAICHDGKAHFPREGVFVSNGTHWFVTQRNFYEPQIITTDNTFVSGNCDVVIGIVNNTVYDPLQPELDSFKEELDKYFKNHTSPDVDLGDISGINASVVNIQKEIDRLNEVAKNLNESLIDLQELGKYEQYIKGGGSGGGQIYEGKLTAEGLRFGIVASRFNHALVDRLVEGAIDAIVRHGGREEDITLVRVPGSWEIPVAAGELARKEDIDAVIAIGVLIRGATPHFDYIASEVSKGLADLSLELRKPITFGVITADTLEQAIERAGTKHGNKGWEAALSAIEMANLFKSLR

SEQ ID NO: 4000 - protein, 1371 aa, Artificial Sequence
  SARS-CoV-2/Iceland/192/2020__EPI_ISL_417819 spike protein (1-1211)(I712C_T1077C) LumSynth construct
MFVFFVLLPLVSSQCVNLTTRTQLPPAYTNSFTRGVYYPDKVFRSSVLHSTQDLFLPFFSNVTWFHAIHVSGTNGTKRFDNPVLPFNDGVYFASTEKSNIIRGWIFGTTLDSKTQSLLIVNNATNVVIKVCEFQFCNDPFLGVYYHKNNKSWMESEFRVYSSANNCTFEYVSQPFLMDLEGKQGNFKNLREFVFKNIDGYFKIYSKHTPINLVRDLPQGFSALEPLVDLPIGINITRFQTLLALHRSYLTPGDSSSGWTAGAAAYYVGYLQPRTFLLKYNENGTITDAVDCALDPLSETKCTLKSFTVEKGIYQTSNFRVQPTESIVRFPNITNLCPFGEVFNATRFASVYAWNRKRISNCVADYSVLYNSASFSTFKCYGVSPTKLNDLCFTNVYADSFVIRGDEVRQIAPGQTGKIADYNYKLPDDFTGCVIAWNSNNLDSKVGGNYNYLYRLFRKSNLKPFERDISTEIYQAGSTPCNGVEGFNCYFPLQSYGFQPTNGVGYQPYRVVVLSFELLHAPATVCGPKKSTNLVKNKCVNFNFNGLTGTGVLTESNKKFLPFQQFGRDIADTTDAVRDPQTLEILDITPCSFGGVSVITPGTNTSNQVAVLYQGVNCTEVPVAIHADQLTPTWRVYSTGSNVFQTRAGCLIGAEHVNNSYECDIPIGAGICASYQTQTNSPRRARSVASQSIIAYTMSLGAENSVAYSNNSCAIPTNFTISVTTEILPVSMTKTSVDCTMYICGDSTECSNLLLQYGSFCTQLNRALTGIAVEQDKNTQEVFAQVKQIYKTPPIKDFGGFNFSQILPDPSKPSKRSFIEDLLFNKVTLADAGFIKQYGDCLGDIAARDLICAQKFNGLTVLPPLLTDEMIAQYTSALLAGTITSGWTFGAGAALQIPFAMQMAYRFNGIGVTQNVLYENQKLIANQFNSAIGKIQDSLSSTASALGKLQDVVNQNAQALNTLVKQLSSNFGAISSVLNDILSRLDKVEAEVQIDRLITGRLQSLQTYVTQQLIRAAEIRASANLAATKMSECVLGQSKRVDFCGKGYHLMSFPQSAPHGVVFLHVTYVPAQEKNFTCAPAICHDGKAHFPREGVFVSNGTHWFVTQRNFYEPQIITTDNTFVSGNCDVVIGIVNNTVYDPLQPELDSFKEELDKYFKNHTSPDVDLGDISGINASVVNIQKEIDRLNEVAKNLNESLIDLQELGKYEQYIKGGGSGGGQIYEGKLTAEGLRFGIVASRFNHALVDRLVEGAIDAIVRHGGREEDITLVRVPGSWEIPVAAGELARKEDIDAVIAIGVLIRGATPHFDYIASEVSKGLADLSLELRKPITFGVITADTLEQAIERAGTKHGNKGWEAALSAIEMANLFKSLR

SEQ ID NO: 4001 - protein, 1371 aa, Artificial Sequence
  SARS-CoV-2/Belgium/ULG-6939/2020__EPI_ISL_417020 spike protein (1-1211)(I712C_T1077C) LumSynth construct
MFVFLVLLPLVSSQCVNLTTRTQLPPAYTNSFTRGVYYPDKVFRSSVLHSTQDLFLPFFSNVTWFHAIHVSGTNGTKRFDNPVLPFNDGVYFASTEKSNIIRGWIFGTTLDSKTQSLLIVNNATNVVIKVCEFQFCNDPFLGVYYHKNNKSWMESEFRVYSSANNCTFEYVSQPFLMDLEGKQGNFKNLREFVFKNIDGYFKIYSKHTPINLVRDLPQGFSALEPLVDLPIGINITRFQTLLALHRSYLTPGDSSSGWTAGAAAYYVGYLQPRTFLLKYNENGTITDAVDCALDPLSETKCTLKSFTVEKGIYQTSNFRVQPTESIVRFPNITNLCPFGEVFNATRFASVYAWNRKRISNCVADYSVLYNSASFSTFKCYGVSPTKLNDLCFTNVYADSFVIRGDEVRQIAPGQTGKIADYNYKLPDDFTGCVIAWNSNNLDSKVGGNYNYLYRLFRKSNLKPFERDISTEIYQAGSTPCNGVEGFNCYFPLQSYGFQPTNGVGYQPYRVVVLSFELLHAPATVCGPKKSTNLVKNKCVNFNFNGLTGTGVLTESNKKFLPFQQFGRDIADTTDAVRDPQTLEILDITPCSFGGVSVITPGTNTSNQVAVLYQGVNCTEVPVAIHADQLTPTWRVYSTGSNVFQTRAGCLIGAEHVNNSYECDIPIGAGICASYQTQTNSPRRARSVASQSIIAYTMSLGAENSVVYSNNSCAIPTNFTISVTTEILPVSMTKTSVDCTMYICGDSTECSNLLLQYGSFCTQLNRALTGIAVEQDKNTQEVFAQVKQIYKTPPIKDFGGFNFSQILPDPSKPSKRSFIEDLLFNKVTLADAGFIKQYGDCLGDIAARDLICAQKFNGLTVLPPLLTDEMIAQYTSALLAGTITSGWTFGAGAALQIPFAMQMAYRFNGIGVTQNVLYENQKLIANQFNSAIGKIQDSLSSTASALGKLQDVVNQNAQALNTLVKQLSSNFGAISSVLNDILSRLDKVEAEVQIDRLITGRLQSLQTYVTQQLIRAAEIRASANLAATKMSECVLGQSKRVDFCGKGYHLMSFPQSAPHGVVFLHVTYVPAQEKNFTCAPAICHDGKAHFPREGVFVSNGTHWFVTQRNFYEPQIITTDNTFVSGNCDVVIGIVNNTVYDPLQPELDSFKEELDKYFKNHTSPDVDLGDISGINASVVNIQKEIDRLNEVAKNLNESLIDLQELGKYEQYIKGGGSGGGQIYEGKLTAEGLRFGIVASRFNHALVDRLVEGAIDAIVRHGGREEDITLVRVPGSWEIPVAAGELARKEDIDAVIAIGVLIRGATPHFDYIASEVSKGLADLSLELRKPITFGVITADTLEQAIERAGTKHGNKGWEAALSAIEMANLFKSLR

SEQ ID NO: 4002 - protein, 1371 aa, Artificial Sequence
  SARS-CoV-2/France/HF2496/2020__EPI_ISL_418231 spike protein (1-1211)(I712C_T1077C) LumSynth construct
MFVFLVLLPLVSSQCVNLTTRTQLPPAYTNSFTRGVYYPDKVFRSSVLHSTQDLFLPFFSNVTWFHAIHVSGTNGTKRFDNPVLPFNDGVYFASTEKSNIIRGWIFGTTLDSKTQSLLIVNNATNVVIKVCEFQFCNDPFLGVYYHKNNKSWMESEFRVYSSANNCTFEYVSQPFLMDLEGKQGNFKNLREFVFKNIDGYFKIYSKHTPINLVRDLPQGFSALEPLVDLPIGINITRFQTLLALHRSYLTPGDSSSGWTAGAAAYYVGYLQPRTFLLKYNENGTITDAVDCALDPLSETKCTLKSFTVEKGIYQTSNFRVQPTESIVRFPNITNLCPFGEVFNATRFASVYAWNRKRISNCVADYSVLYNSASFSTFKCYGVSPTKLNDLCFTNVYADSFVIRGDEVRQIAPGQTGKIADYNYKLPDDFTGCVIAWNSNNLDSKVGGNYNYLYRLFRKSNLKPFERDISTEIYQAGSTPCNGVEGFNCYFPLQSYGFQPTNGVGYQPYRVVVLSFELLHAPATVCGPKKSTNLVKNKCVNFNFNGLTGTGVLTESNKKFLPFQQFGRDIADTTDAVRDPQTLEILDITPCSFGGVSVITPGTNTSNQVAVLYQGVNCTEVPVAIHADQLTPTWRVYSTGSNVFQTRAGCLIGAEHVNNSYECDIPIGAGICASYQTQTNSPRRARSVASQSIIAYTMSLGAENSVAYSNNSCAIPTNFTISVTTEILPVSMTKTSVDCTMYICGDSTECSNLLLQYGSFCTQLNRALTGIAVEQDKNTQEVFAQVKQIYKTPPIKDFGGFNFSQILPDPSKPSKRSFIEDLLFNKVTLADAGFIKQYGDCLGDIVARDLICAQKFNGLTVLPPLLTDEMIAQYTSALLAGTITSGWTFGAGAALQIPFAMQMAYRFNGIGVTQNVLYENQKLIANQFNSAIGKIQDSLSSTASALGKLQDVVNQNAQALNTLVKQLSSNFGAISSVLNDILSRLDKVEAEVQIDRLITGRLQSLQTYVTQQLIRAAEIRASANLAATKMSECVLGQSKRVDFCGKGYHLMSFPQSAPHGVVFLHVTYVPAQEKNFTCAPAICHDGKAHFPREGVFVSNGTHWFVTQRNFYEPQIITTDNTFVSGNCDVVIGIVNNTVYDPLQPELDSFKEELDKYFKNHTSPDVDLGDISGINASVVNIQKEIDRLNEVAKNLNESLIDLQELGKYEQYIKGGGSGGGQIYEGKLTAEGLRFGIVASRFNHALVDRLVEGAIDAIVRHGGREEDITLVRVPGSWEIPVAAGELARKEDIDAVIAIGVLIRGATPHFDYIASEVSKGLADLSLELRKPITFGVITADTLEQAIERAGTKHGNKGWEAALSAIEMANLFKSLR

SEQ ID NO: 4003 - protein, 1371 aa, Artificial Sequence
  SARS-CoV-2/USA/WA-UW291/2020__EPI_ISL_418076 spike protein (1-1211)(I712C_T1077C) LumSynth construct
MFVFLVLLPLVSSQCVNLTTRTQLPPAYTNSFTRGVYYPDKVFRSSVLHSTQDLFLPFFSNVTWFHAIHVSGTNGTKRFDNPVLPFNDGVYFASTEKSNIIRGWIFGTTLDSKTQSLLIVNNATNVVIKVCEFQFCNDPFLGVYYHKNNKSWMESEFRVYSSANNCTFEYVSQPFLMDLEGKQGNFKNLREFVFKNIDGYFKIYSKHTPINLVRDLPQGFSALEPLVDLPIGINITRFQTLLALHRSYLTPGDSSSGWTAGAAAYYVGYLQPRTFLLKYNENGTITDAVDCALDPLSETKCTLKSFTVEKGIYQTSNFRVQPTESIVRFPNITNLCPFGEVFNATRFASVYAWNRKRISNCVADYSVLYNSASFSTFKCYGVSPTKLNDLCFTNVYADSFVIRGDEVRQIAPGQTGKIADYNYKLPDDFTGCVIAWNSNNLDSKVGGNYNYLYRLFRKSNLKPFERDISTEIYQAGSTPCNGVEGFNCYFPLQSYGFQPTNGVGYQPYRVVVLSFELLHAPATVCGPKKSTNLVKNKCVNFNFNGLTGTGVLTESNKKFLPFQQFGRDIADTTDAVRDPQTLEILDITPCSFGGVSVITPGTNTSNQVAVLYQGVNCTEVPVAIHADQLTPTWRVYSTGSNVFQTRAGCLIGAEHVNNSYECDIPIGAGICASYQTQTNSPRRARSVASQSIIAYTMSLGAENSVAYSNNSCAIPTNFTISVTTEILPVSMTKTSVDCTMYICGDSTECSNLLLQYGSFCTQLNRALTGIAVEQDKNTQEVFAQVKQIYKTPPIKDFGGFNFSQILPDPSKPSKRSFIEDLLFNKVTLADAGFIKQYGDCLGDIAARDLICAQKFNGLTVLPPLLTDEMIAQYTSALLAGTITSGWTFGAGAALQIPFAMQMAYRFNGIGVTQNVLYENQKLIANQFNSAIGKIQYSLSSTASALGKLQDVVNQNAQALNTLVKQLSSNFGAISSVLNDILSRLDKVEAEVQIDRLITGRLQSLQTYVTQQLIRAAEIRASANLAATKMSECVLGQSKRVDFCGKGYHLMSFPQSAPHGVVFLHVTYVPAQEKNFTCAPAICHDGKAHFPREGVFVSNGTHWFVTQRNFYEPQIITTDNTFVSGNCDVVIGIVNNTVYDPLQPELDSFKEELDKYFKNHTSPDVDLGDISGINASVVNIQKEIDRLNEVAKNLNESLIDLQELGKYEQYIKGGGSGGGQIYEGKLTAEGLRFGIVASRFNHALVDRLVEGAIDAIVRHGGREEDITLVRVPGSWEIPVAAGELARKEDIDAVIAIGVLIRGATPHFDYIASEVSKGLADLSLELRKPITFGVITADTLEQAIERAGTKHGNKGWEAALSAIEMANLFKSLR

SEQ ID NO: 4004 - protein, 1371 aa, Artificial Sequence; identical to SEQ ID NO: 3967
  SARS-CoV-2/Portugal/PT0034/2020__EPI_ISL_418019 spike protein (1-1211)(I712C_T1077C) LumSynth construct

SEQ ID NO: 4005 - protein, 1371 aa, Artificial Sequence
  SARS-CoV-2/Iceland/202/2020__EPI_ISL_417750 spike protein (1-1211)(I712C_T1077C) LumSynth construct
MFVFLVLLPLVSSQCVNLTTRTQLPPAYTNSFTRGVYYPDKVFRSSVLHSTQDLFLPFFSNVTWFHAIHVSGTNGTKRFDNPVLPFNDGVYFASTEKSNIIRGWIFGTTLDSKTQSLLIVNNATNVVIKVCEFQFCNDPFLGVYYHKNNKSWMESEFRVYSSANNCTFEYVSQPFLMDLEGKQGNFKNLREFVFKNIDGYFKIYSKHTPINLVRDLPQGFSALEPLVDLPIGINITRFQTLLALHRSYLTPGDSSSGWTAGAAAYYVGYLQPRTFLLKYNENGTITDAVDCALDPLSETKCTLKSFTVEKGIYQTSNFRVQPTESIVRFPNITNLCPFGEVFNATRFASVYAWNRKRISNCVADYSVLYNSASFSTFKCYGVSPTKLNDLCFTNVYADSFVIRGDEVRQIAPGQTGKIADYNYKLPDDFTGCVIAWNSNNLDSKVGGNYNYLYRLFRKSNLKPFERDISTEIYQAGSTPCNGVEGFNCYFPLQSYGFQPTNGVGYQPYRVVVLSFELLHAPATVCGPKKSTNLVKNKCVNFNFNGLTGTGVLTESNKKFLPFQQFGRDIADTTDAVRDPQTLEILDITPCSFGGVSVITPGTNTSNQVAVLYQDVNCTEVPVAIHADQLTPTWRVYSTGSNVFQTRAGCLIGAEHVNNSYECDIPIGAGICASYQTQTNSPRRARSVASQSIIAYTMSLGAENSVAYSNNSCAIPTNFTISVTTEILPVSMTKTSVDCTMYICGDSTECSNLLLQYGSFCTQLNRALTGIAVEQDKNTQEVFAQVKQIYKTPPIKDFGGFNFSQILPDPSKPSKRSFIEDLLFNKVTLADAGFIKQYGDCLGDIAARDLICAQKFNGLTVLPPLLTDEMIAQYTSALLAGTITSGWTFGAGAALQIPFAMQMAYRFNGIGVTQNVLYENQKLIANQFNSAIGKIQDSLSSTASALGKLQDVVNQNAQALNTLVKQLSSNFGAISSVLNDILSRLDKVEAEVQIDRLITGRLQSLQTYVTQQLIRAAEIRASANLAATKMSECVLGQSKRVDFCGKGYHLMSFPQSAPHGVVFLHVTYVPAQEKNFTCAPAICHDGKAHFPREGVFVSNGTHWFVTQRNFYEPQIITTDNTFVSGNCDVVIGIVNNTVYDPLQPELDSFKEELDKYFKNHTSPDVDLGDIPGINASVVNIQKEIDRLNEVAKNLNESLIDLQELGKYEQYIKGGGSGGGQIYEGKLTAEGLRFGIVASRFNHALVDRLVEGAIDAIVRHGGREEDITLVRVPGSWEIPVAAGELARKEDIDAVIAIGVLIRGATPHFDYIASEVSKGLADLSLELRKPITFGVITADTLEQAIERAGTKHGNKGWEAALSAIEMANLFKSLR

SEQ ID NO: 4006 - protein, 1371 aa, Artificial Sequence
  SARS-CoV-2/USA/WA-UW261/2020__EPI_ISL_418046 spike protein (1-1211)(I712C_T1077C) LumSynth construct
MFVFLVLLPLVSSQCVNLTTRTQLPPAYTNSFTRGVYYPDKVFRSSVLHSTQDLFLPFFSNVTWFHAIHVSGTNGTKRFDNPVLPFNDGVYFASTEKSNIIRGWIFGTTLDSKTQSLLIVNNATNVVIKVCEFQFCNDPFLGVYYHKNNKSWMESEFRVYSSANNCTFEYVSQPFLMDLEGKQGNFKNLREFVFKNIDGYFKIYSKHTPINLVRDLPQGFSALEPLVDLPIGINITRFQTLLALHRSYLTPGDSSSGWTAGAAAYYVGYLQPRTFLLKYNENGTITDAVDCALDPLSETKCTLKSFTVEKGIYQTSNFRVQPTESIVRFPNITNLCPFGEVFNATRFTSVYAWNRKRISNCVADYSVLYNSASFSTFKCYGVSPTKLNDLCFTNVYADSFVIRGDEVRQIAPGQTGKIADYNYKLPDDFTGCVIAWNSNNLDSKVGGNYNYLYRLFRKSNLKPFERDISTEIYQAGSTPCNGVEGFNCYFPLQSYGFQPTNGVGYQPYRVVVLSFELLHAPATVCGPKKSTNLVKNKCVNFNFNGLTGTGVLTESNKKFLPFQQFGRDIADTTDAVRDPQTLEILDITPCSFGGVSVITPGTNTSNQVAVLYQDVNCTEVPVAIHADQLTPTWRVYSTGSNVFQTRAGCLIGAEHVNNSYECDIPIGAGICASYQTQTNSPRRARSVASQSIIAYTMSLGAENSVAYSNNSCAIPTNFTISVTTEILPVSMTKTSVDCTMYICGDSTECSNLLLQYGSFCTQLNRALTGIAVEQDKNTQEVFAQVKQIYKTPPIKDFGGFNFSQILPDPSKPSKRSFIEDLLFNKVTLADAGFIKQYGDCLGDIAARDLICAQKFNGLTVLPPLLTDEMIAQYTSALLAGTITSGWTFGAGAALQIPFAMQMAYRFNGIGVTQNVLYENQKLIANQFNSAIGKIQDSLSSTASALGKLQDVVNQNAQALNTLVKQLSSNFGAISSVLNDILSRLDKVEAEVQIDRLITGRLQSLQTYVTQQLIRAAEIRASANLAATKMSECVLGQSKRVDFCGKGYHLMSFPQSAPHGVVFLHVTYVPAQEKNFTCAPAICHDGKAHFPREGVFVSNGTHWFVTQRNFYEPQIITTDNTFVSGNCDVVIGIVNNTVYDPLQPELDSFKEELDKYFKNHTSPDVDLGDISGINASVVNIQKEIDRLNEVAKNLNESLIDLQELGKYEQYIKGGGSGGGQIYEGKLTAEGLRFGIVASRFNHALVDRLVEGAIDAIVRHGGREEDITLVRVPGSWEIPVAAGELARKEDIDAVIAIGVLIRGATPHFDYIASEVSKGLADLSLELRKPITFGVITADTLEQAIERAGTKHGNKGWEAALSAIEMANLFKSLR

SEQ ID NO: 4007 - protein, 1371 aa, Artificial Sequence
  SARS-CoV-2/Portugal/PT0035/2020__EPI_ISL_418020 spike protein (1-1211)(I712C_T1077C) LumSynth construct
MFVFLVLLPLVSSQCVNLTTRTQLPPAYTNSFTRGVYYPDKVFRSSVLHSTQDLFLPFFSNVTWFHAIHVSGTNGTKRFDNPVLPFNDGVYFASTEKSNIIRGWIFGTTLDSKTQSLLIVNNATNVVIKVCEFQFCNDPFLGVYYHKNNKSWMESEFRVYSSANNCTFEYVSQPFLMDLEGKQGNFKNLREFVFKNIDGYFKIYSKHTPINLVRDLPQGFSALEPLVDLPIGINITRFQTLLALHRSYLTPGDSSSGWTAGAAAYYVGYLQPRTFLLKYNENGTITDAVDCALDPLSETKCTLKSFTVEKGIYQTSNFRVQPTESIVRFPNITNLCPFGEVFNATRFASVYAWNRKRISNCVADYSVLYNSASFSTFKCYGVSPTKLNDLCFTNVYADSFVIRGDEVRQIAPGQTGKIADYNYKLPDDFTGCVIAWNSNNLDSKVGGNYNYLYRLFRKSNLKPFERDISTEIYQAGSTPCNGVEGFNCYFPLQSYGFQPTNGVGYQPYRVVVLSFELLHAPATVCGPKKSTNLVKNKCVNFNFNGLTGTGVLTESNKKFLPFQQFGRDIADTTDAVRDPQTLEILDITPCSFGGVSVITPGTNTSNQVAVLYQDVNCTEVPVAIHADQLTPTWRVYSTGSNVFQTRAGCLIGAEHVNNSYECDIPIGAGICASYQTQTNSPRRARSVASQSIIAYTMSLGAENSVAYSNNSCAIPTNFTISVTTEILPVSMTKTSVDCTMYICGDSTECSNLLLQYGSFCTQLNRALTGIAVEQDKNTQEVFAQVKQIYKTPPIKDFGGFNFSQILPDPSKPSKRSFIEDLLFNKVTLADAGFIKQYGDCLGDISARDLICAQKFNGLTVLPPLLTDEMIAQYTSALLAGTITSGWTFGAGAALQIPFAMQMAYRFNGIGVTQNVLYENQKLIANQFNSAIGKIQDSLSSTASALGKLQDVVNQNAQALNTLVKQLSSNFGAISSVLNDILSRLDKVEAEVQIDRLITGRLQSLQTYVTQQLIRAAEIRASANLAATKMSECVLGQSKRVDFCGKGYHLMSFPQSAPHGVVFLHVTYVPAQEKNFTCAPAICHDGKAHFPREGVFVSNGTHWFVTQRNFYEPQIITTDNTFVSGNCDVVIGIVNNTVYDPLQPELDSFKEELDKYFKNHTSPDVDLGDISGINASVVNIQKEIDRLNEVAKNLNESLIDLQELGKYEQYIKGGGSGGGQIYEGKLTAEGLRFGIVASRFNHALVDRLVEGAIDAIVRHGGREEDITLVRVPGSWEIPVAAGELARKEDIDAVIAIGVLIRGATPHFDYIASEVSKGLADLSLELRKPITFGVITADTLEQAIERAGTKHGNKGWEAALSAIEMANLFKSLR

SEQ ID NO: 4008 - protein, 1371 aa, Artificial Sequence
  SARS-CoV-2/USA/NY-NYUMC7/2020__EPI_ISL_418192 spike protein (1-1211)(I712C_T1077C) LumSynth construct
MFVFLVLLPLVSSQCVNLTTRTQLPPAYTNSFTRGVYYPDKVFRSSVLHSTQDLFLPFFSNVTWFHAIHVSGTNGTKRFDNPVLPFNDGVYFASTEKSNIIRGWIFGTTLDSKTQSLLIVNNATNVVIKVCEFQFCNDPFLGVYHHKNNKSWMESEFRVYSSANNCTFEYVSQPFLMDLEGKQGNFKNLREFVFKNIDGYFKIYSKHTPINLVRDLPQGFSALEPLVDLPIGINITRFQTLLALHRSYLTPGDSSSGWTAGAAAYYVGYLQPRTFLLKYNENGTITDAVDCALDPLSETKCTLKSFTVEKGIYQTSNFRVQPTESIVRFPNITNLCPFGEVFNATRFASVYAWNRKRISNCVADYSVLYNSASFSTFKCYGVSPTKLNDLCFTNVYADSFVIRGDEVRQIAPGQTGKIADYNYKLPDDFTGCVIAWNSNNLDSKVGGNYNYLYRLFRKSNLKPFERDISTEIYQAGSTPCNGVEGFNCYFPLQSYGFQPTNGVGYQPYRVVVLSFELLHAPATVCGPKKSTNLVKNKCVNFNFNGLTGTGVLTESNKKFLPFQQFGRDIADTTDAVRDPQTLEILDITPCSFGGVSVITPGTNTSNQVAVLYQGVNCTEVPVAIHADQLTPTWRVYSTGSNVFQTRAGCLIGAEHVNNSYECDIPIGAGICASYQTQTNSPRRARSVASQSIIAYTMSLGAENSVAYSNNSCAIPTNFTISVTTEILPVSMTKTSVDCTMYICGDSTECSNLLLQYGSFCTQLNRALTGIAVEQDKNTQEVFAQVKQIYKTPPIKDFGGFNFSQILPDPSKPSKRSFIEDLLFNKVTLADAGFIKQYGDCLGDIAARDLICAQKFNGLTVLPPLLTDEMIAQYTSALLAGTITSGWTFGAGAALQIPFAMQMAYRFNGIGVTQNVLYENQKLIANQFNSAIGKIQDSLSSTASALGKLQDVVNQNAQALNTLVKQLSSNFGAISSVLNDILSRLDKVEAEVQIDRLITGRLQSLQTYVTQQLIRAAEIRASANLAATKMSECVLGQSKRVDFCGKGYHLMSFPQSAPHGVVFLHVTYVPAQEKNFTCAPAICHDGKAHFPREGVFVSNGTHWFVTQRNFYEPQIITTDNTFVSGNCDVVIGIVNNTVYDPLQPELDSFKEELDKYFKNHTSPDVDLGDISGINASVVNIQKEIDRLNEVAKNLNESLIDLQELGKYEQYIKGGGSGGGQIYEGKLTAEGLRFGIVASRFNHALVDRLVEGAIDAIVRHGGREEDITLVRVPGSWEIPVAAGELARKEDIDAVIAIGVLIRGATPHFDYIASEVSKGLADLSLELRKPITFGVITADTLEQAIERAGTKHGNKGWEAALSAIEMANLFKSLR

SEQ ID NO: 4009 - protein, 1371 aa, Artificial Sequence
  SARS-CoV-2/Iceland/189/2020__EPI_ISL_417709 spike protein (1-1211)(I712C_T1077C) LumSynth construct
MFVFLVLLPLVSSQCVNLTTRTQLPPAYTNSFTRGVYYPDKVFRSSVLHSTQDLFLPFFSNVTWFHAIHVSGTNGTKRFDNPVLPFNDGVYFASTEKSNIIRGWIFGTTLDSKTQSLLIVNNATNVVIKVCEFQFCNDPFLGVYYHKNNKSWMESEFRVYSSANNCTFEYVSQPFLMDLEGKQGNFKNLREFVFKNIDGYFKIYSKHTPINLVRDLPQGFSALEPLVDLPIGINITRFQTLLALHRSYLTPGDSSSGWTAGAAAYYVGYLQPRTFLLKYNENGTITDAVDCALDPLSETKCTLKSFTVEKGIYQTSNFRVQPTESIVRFPNITNLCPFGEVFNATRFASVYAWNRKRISNCVADYSVLYNSASFSTFKCYGVSPTKLNDLCFTNVYADSFVIRGDEVRQIAPGQTGKIADYNYKLPDDFTGCVIAWNSNNLDSKVGGNYNYLYRLFRKSNLKPFERDISTEIYQAGSTPCNGVEGFNCYFPLQSYGFQPTNGVGYQPYRVVVLSFELLHAPATVCGPKKSTNLVKNKCVNFNFNGLTGTGVLTESNKKFLPFQQFGRDIADTTDAVRDPQTLEILDITPCSFGGVSVITPGTNTSNQVAVLYQGVNCTEVPVAIHADQLTPTWRVYSTGSNVFQTRAGCLIGAEHVNNSYECDIPIGAGICASYQTQTNSPRRARSVASQSIIAYTMSLGAENSVAYSNNSCAIPTNFTISVTTEILPVSMTKTSVDCTMYICGDSTECSNLLLQYGSFCTQLNRALTGIAVEQDKNTQEVFAQVKQIYKTPPIKDFGGFNFSQILPDPSKPSKRSFIEDLLFNKVTLADAGFTKQYGDCLGDIAARDLICAQKFNGLTVLPPLLTDEMIAQYTSALLAGTITSGWTFGAGAALQIPFAMQMAYRFNGIGVTQNVLYENQKLIANQFNSAIGKIQDSLSSTASALGKLQDVVNQNAQALNTLVKQLSSNFGAISSVLNDILSRLDKVEAEVQIDRLITGRLQSLQTYVTQQLIRAAEIRASANLAATKMSECVLGQSKRVDFCGKGYHLMSFPQSAPHGVVFLHVTYVPAQEKNFTCAPAICHDGKAHFPREGVFVSNGTHWFVTQRNFYEPQIITTDNTFVSGNCDVVIGIVNNTVYDPLQPELDSFKEELDKYFKNHTSPDVDLGDISGINASVVNIQKEIDRLNEVAKNLNESLIDLQELGKYEQYIKGGGSGGGQIYEGKLTAEGLRFGIVASRFNHALVDRLVEGAIDAIVRHGGREEDITLVRVPGSWEIPVAAGELARKEDIDAVIAIGVLIRGATPHFDYIASEVSKGLADLSLELRKPITFGVITADTLEQAIERAGTKHGNKGWEAALSAIEMANLFKSLR

SEQ ID NO: 4010 - protein, 1371 aa, Artificial Sequence
  SARS-CoV-2/Australia/NSW56/2020__EPI_ISL_417408 spike protein (1-1211)(I712C_T1077C) LumSynth construct
MFVFLVLLPLVSSQCVNLTTRTQLPPAYTNSFTRGVYYPDKVFRSSVLHSTQDLFLPFFSNVTWFHAIHVSGTNGTKRFDNPVLPFNDGVYFASTEKSNIIRGWIFGTTLDSKTQSLLIVNNATNVVIKVCEFQFCNDPFLGVYYHKNNKSWMESEFRVYSSANNCTFEYVSQPFLMDLEGKQGNFKNLREFVFKNIDGYFKIYSKHTPINLVRDLPQGFSALEPLVDLPIGINITRFQTLLALHRSYLTPGDSSSGWTAGAAAYYVGYLQPRTFLLKYNENGTITDAVDCALDPLSETKCTLKSFTVEKGIYQTSNFRVQPTESIVRFPNITNLCPFGEVFNATRFASVYAWNRKRISNCVADYSVLYNSASFSTFKCYGVSPTKLNDLCFTNVYADSFVIRGDEVRQIAPGQTGKIADYNYKLPDDFTGCVIAWNSNNLDSKVGGNYNYLYRLFRKSNLKPFERDISTEIYQAGSTPCNGVEGFNCYFPLQSYGFQPTNGVGYQPYRVVVLSFELLHAPATVCGPKKSTNLVKNKCVNFNFNGLTGTGVLTESNKKFLPFQQFGRDIADTTDAVRDPQTLEILDITPCSFGGVSVITPGTNTSNQVAVLYQDVNCTEVPVAIHADQLTPTWRVYSTGSNVFQTRAGCLIGAEHVNNSYECDIPIGAGICASYQTQTNSPRRARSVASQSIIAYTMSLGAENSVAYSNNSCAIPTNFTISVTTEILPVSMTKTSVDCTMYICGDSTECSNLLLQYGSFCTQLNRALTGIAVEQDKNTQEVFAQVKQIYKTPPIKDFGGFNFSQILPDSSKPSKRSFIEDLLFNKVTLADAGFIKQYGDCLGDIAARDLICAQKFNGLTVLPPLLTDEMIAQYTSALLAGTITSGWTFGAGAALQIPFAMQMAYRFNGIGVTQNVLYENQKLIANQFNSAIGKIQDSLSSTASALGKLQDVVNQNAQALNTLVKQLSSNFGAISSVLNDILSRLDKVEAEVQIDRLITGRLQSLQTYVTQQLIRAAEIRASANLAATKMSECVLGQSKRVDFCGKGYHLMSFPQSAPHGVVFLHVTYVPAQEKNFTCAPAICHDGKAHFPREGVFVSNGTHWFVTQRNFYEPQIITTDNTFVSGNCDVVIGIVNNTVYDPLQPELDSFKEELDKYFKNHTSPDVDLGDISGINASVVNIQKEIDRLNEVAKNLNESLIDLQELGKYEQYIKGGGSGGGQIYEGKLTAEGLRFGIVASRFNHALVDRLVEGAIDAIVRHGGREEDITLVRVPGSWEIPVAAGELARKEDIDAVIAIGVLIRGATPHFDYIASEVSKGLADLSLELRKPITFGVITADTLEQAIERAGTKHGNKGWEAALSAIEMANLFKSLR

SEQ ID NO: 4011 - protein, 1371 aa, Artificial Sequence
  SARS-CoV-2/Iceland/280/2020__EPI_ISL_417608 spike protein (1-1211)(I712C_T1077C) LumSynth construct
MFVFLVLLPLVSSQCVNLTTRTQLPPAYTNSFTRGVYYPDKVFRSSVLHSTQDLFLPFFSNVTWFHAIHVSGTNGTKRFDNPVLPFNDGVYFASTEKSNIIRGWIFGTTLDSKTQSLLIVNNATNVVIKVCEFQFCNDPFLGVYYHKNNKSWMESEFRVYSSANNCTFEYVSQPFLMDLEGKQGNFKNLREFVFKNIDGYFKIYSKHTPINLVRDLPQGFSALEPLVDLPIGINITRFQTLLALHRSYLTPGDSSSGWTAGAAAYYVGYLQPRTFLLKYNENGTITDAVDCALDPLSETKCTLKSFTVEKGIYQTSNFRVQPTESIVRFPNITNLCPFGEVFNATRFASVYAWNRKRISNCVADYSVLYNSASFSTFKCYGVSPTKLNDLCFTNVYADSFVIRGDEVRQIAPGQTGKIADYNYKLPDDFTGCVIAWNSNNLDSKVGGNYNYLYRLFRKSNLKPFERDISTEIYQAGSTPCNGVEGFNCYFPLQSYGFQPTNGVGYQPYRVVVLSFELLHAPATVCGPKKSTNLVKNKCVNFNFNGLTGTGVLTESNKKFLPFQQFGRDIADTTDAVRDPQTLEILDITPCSFGGVSVITPGTNTSNQVAVLYQGVNCTEVPVAIHADQLTPTWRVYSTGSNVFQTRAGCLIGAEHVNNSYECDIPIGAGICASYHTQTNSPRRARSVASQSIIAYTMSLGAENSVAYSNNSCAIPTNFTISVTTEILPVSMTKTSVDCTMYICGDSTECSNLLLQYGSFCTQLNRALTGIAVEQDKNTQEVFAQVKQIYKTPPIKDFGGFNFSQILPDPSKPSKRSFIEDLLFNKVTLADAGFIKQYGDCLGDIAARDLICAQKFNGLTVLPPLLTDEMIAQYTSALLAGTITSGWTFGAGAALQIPFAMQMAYRFNGIGVTQNVLYENQKLIANQFNSAIGKIQDSLSSTASALGKLQDVVNQNAQALNTLVKQLSSNFGAISSVLNDILSRLDKVEAEVQIDRLITGRLQSLQTYVTQQLIRAAEIRASANLAATKMSECVLGQSKRVDFCGKGYHLMSFPQSAPHGVVFLHVTYVPAQEKNFTCAPAICHDGKAHFPREGVFVSNGTHWFVTQRNFYEPQIITTDNTFVSGNCDVVIGIVNNTVYDPLQPELDSFKEELDKYFKNHTSPDVDLGDISGINASVVNIQKEIDRLNEVAKNLNESLIDLQELGKYEQYIKGGGSGGGQIYEGKLTAEGLRFGIVASRFNHALVDRLVEGAIDAIVRHGGREEDITLVRVPGSWEIPVAAGELARKEDIDAVIAIGVLIRGATPHFDYIASEVSKGLADLSLELRKPITFGVITADTLEQAIERAGTKHGNKGWEAALSAIEMANLFKSLR

SEQ ID NO: 4012 - protein, 1371 aa, Artificial Sequence; identical to SEQ ID NO: 3967
  SARS-CoV-2/Iceland/247/2020__EPI_ISL_417575 spike protein (1-1211)(I712C_T1077C) LumSynth construct

SEQ ID NO: 4013 - protein, 1371 aa, Artificial Sequence
  SARS-CoV-2/Iceland/238/2020__EPI_ISL_417566 spike protein (1-1211)(I712C_T1077C) LumSynth construct
MFVFLVLLPLVSSQCVNLTTRTQLPPAYTNSFTRGVYYPDKVFRSSVLHSTQDLFLPFFSNVTWFHAIHVSGTNGTKRFDNPVLPFNDGVYFASTEKSNIIRGWIFGTTLDSKTQSLLIVNNATNVVIKVCEFQFCNDPFLGVYYHKNNKSWMESEFRVYSSANNCTFEYVSQPFLMDLEGKQGNFKNLREFVFKNIDGYFKIYSKHTPINLVRDLPQGFSALEPLVDLPIGINITRFQTLLALHRSYLTPGDSSSGWTAGAAAYYVGYLQPRTFLLKYNENGTITDAVDCALDPLSETKCTLKSFTVEKGIYQTSNFRVQPTESIVRFPNITNLCPFGEVFNATRFASVYAWNRKRISNCVADYSVLYNSASFSTFKCYGVSPTKLNDLCFTNVYADSFVIRGDEVRQIAPGQTGKIADYNYKLPDDFTGCVIAWNSNNLDSKVGGNYNYLYRLFRKSNLKPFERDISTEIYQAGSTPCNGVEGFNCYFPLQSYGFQPTNGVGYQPYRVVVLSFELLHAPATVCGPKKSTNLVKNKCVNFNFNGLTGTGVLTESNKKFLPFQQFGRDIADTTDAVRDPQTLEILDITPCSFGGVSVITPGTNTSNQVAVLYQGVNCTEVPVAIHADQLTPTWRVYSTGSNVFQTRAGCLIGAEHVNNSYECDIPIGAGICASYQTQTNSPRRARSVASQSIIAYTMSLGAENSVAYSNNSCAIPTNFTISVTTEILPVSMTKTSVDCTMYICGDSTECSNLLLQYGSFCTQLNRALTGIAVEQDKNTQEVFAQVKQIYKTPPIKDFGGFNFSQILPDPSKPSKRSFIEDLLFNKVTLADVGFIKQYGDCLGDIAARDLICAQKFNGLTVLPPLLTDEMIAQYTSALLAGTITSGWTFGAGAALQIPFAMQMAYRFNGIGVTQNVLYENQKLIANQFNSAIGKIQDSLSSTASALGKLQDVVNQNAQALNTLVKQLSSNFGAISSVLNDILSRLDKVEAEVQIDRLITGRLQSLQTYVTQQLIRAAEIRASANLAATKMSECVLGQSKRVDFCGKGYHLMSFPQSAPHGVVFLHVTYVPAQEKNFTCAPAICHDGKAHFPREGVFVSNGTHWFVTQRNFYEPQIITTDNTFVSGNCDVVIGIVNNTVYDPLQPELDSFKEELDKYFKNHTSPDVDLGDISGINASVVNIQKEIDRLNEVAKNLNESLIDLQELGKYEQYIKGGGSGGGQIYEGKLTAEGLRFGIVASRFNHALVDRLVEGAIDAIVRHGGREEDITLVRVPGSWEIPVAAGELARKEDIDAVIAIGVLIRGATPHFDYIASEVSKGLADLSLELRKPITFGVITADTLEQAIERAGTKHGNKGWEAALSAIEMANLFKSLR

SEQ ID NO: 4014 - protein, 1371 aa, Artificial Sequence
  SARS-CoV-2/Greece/16/2020__EPI_ISL_418265 spike protein (1-1211)(I712C_T1077C) LumSynth construct
MFVFLVLLPLVSSQCVNLTTRTQLPPAYTNSFTRGVYYPDKVFRSSVLHSTQDLFLPFFSNVTWFHAIHVSGTNGTKRFDNPVLPFNDGVYFASTEKSNIIRGWIFGTTLDSKTQSLLIVNNATNVVIKVCEFQFCNDPFLGVYYHKNNKSWMESEFRVYSSANNCTFEYVSQPFLMDLEGKQGNFKNLREFVFKNVDGYFKIYSKHTPINLVRDLPQGFSALEPLVDLPIGINITRFQTLLALHRSYLTPGDSSSGWTAGAAAYYVGYLQPRTFLLKYNENGTITDAVDCALDPLSETKCTLKSFTVEKGIYQTSNFRVQPTESIVRFPNITNLCPFGEVFNATRFASVYAWNRKRISNCVADYSVLYNSASFSTFKCYGVSPTKLNDLCFTNVYADSFVIRGDEVRQIAPGQTGKIADYNYKLPDDFTGCVIAWNSNNLDSKVGGNYNYLYRLFRKSNLKPFERDISTEIYQAGSTPCNGVEGFNCYFPLQSYGFQPTNGVGYQPYRVVVLSFELLHAPATVCGPKKSTNLVKNKCVNFNFNGLTGTGVLTESNKKFLPFQQFGRDIADTTDAVRDPQTLEILDITPCSFGGVSVITPGTNTSNQVAVLYQDVNCTEVPVAIHADQLTPTWRVYSTGSNVFQTRAGCLIGAEHVNNSYECDIPIGAGICASYQTQTNSPRRARSVASQSIIAYTMSLGAENSVAYSNNSCAIPTNFTISVTTEILPVSMTKTSVDCTMYICGDSTECSNLLLQYGSFCTQLNRALTGIAVEQDKNTQEVFAQVKQIYKTPPIKDFGGFNFSQILPDPSKPSKRSFIEDLLFNKVTLADAGFIKQYGDCLGDIAARDLICAQKFNGLTVLPPLLTDEMIAQYTSALLAGTITSGWTFGAGAALQIPFAMQMAYRFNGIGVTQNVLYENQKLIANQFNSAIGKIQDSLSSTASALGKLQDVVNQNAQALNTLVKQLSSNFGAISSVLNDILSRLDKVEAEVQIDRLITGRLQSLQTYVTQQLIRAAEIRASANLAATKMSECVLGQSKRVDFCGKGYHLMSFPQSAPHGVVFLHVTYVPAQEKNFTCAPAICHDGKAHFPREGVFVSNGTHWFVTQRNFYEPQIITTDNTFVSGNCDVVIGIVNNTVYDPLQPELDSFKEELDKYFKNHTSPDVDLGDISGINASVVNIQKEIDRLNEVAKNLNESLIDLQELGKYEQYIKGGGSGGGQIYEGKLTAEGLRFGIVASRFNHALVDRLVEGAIDAIVRHGGREEDITLVRVPGSWEIPVAAGELARKEDIDAVIAIGVLIRGATPHFDYIASEVSKGLADLSLELRKPITFGVITADTLEQAIERAGTKHGNKGWEAALSAIEMANLFKSLR

SEQ ID NO: 4015 - protein, 1371 aa, Artificial Sequence
  SARS-CoV-2/Iceland/319/2020__EPI_ISL_417648 spike protein (1-1211)(I712C_T1077C) LumSynth construct
MFVFLVLLPLVSSQCVNLTTRTQLPPAYTNSFTRGVYYPDKVFRSSVLHSTQDLFLPFFSNVTWFHAIHVSGTNGTKRFDNPVLPFNDGVYFASTEKSNIIRGWIFGTTLDSKTQSLLIVNNATNVVIKVCEFQFCNDPFLGVYYHKNNKSWMESEFRVYSSANNCTFEYVSQPFLIDLEGKQGNFKNLREFVFKNIDGYFKIYSKHTPINLVRDLPQGFSALEPLVDLPIGINITRFQTLLALHRSYLTPGDSSSGWTAGAAAYYVGYLQPRTFLLKYNENGTITDAVDCALDPLSETKCTLKSFTVEKGIYQTSNFRVQPTESIVRFPNITNLCPFGEVFNATRFASVYAWNRKRISNCVADYSVLYNSASFSTFKCYGVSPTKLNDLCFTNVYADSFVIRGDEVRQIAPGQTGKIADYNYKLPDDFTGCVIAWNSNNLDSKVGGNYNYLYRLFRKSNLKPFERDISTEIYQAGSTPCNGVEGFNCYFPLQSYGFQPTNGVGYQPYRVVVLSFELLHAPATVCGPKKSTNLVKNKCVNFNFNGLTGTGVLTESNKKFLPFQQFGRDIADTTDAVRDPQTLEILDITPCSFGGVSVITPGTNTSNQVAVLYQGVNCTEVPVAIHADQLTPTWRVYSTGSNVFQTRAGCLIGAEHVNNSYECDIPIGAGICASYQTQTNSPRRARSVASQSIIAYTMSLGAENSVAYSNNSCAIPTNFTISVTTEILPVSMTKTSVDCTMYICGDSTECSNLLLQYGSFCTQLNRALTGIAVEQDKNTQEVFAQVKQIYKTPPIKDFGGFNFSQILPDPSKPSKRSFIEDLLFNKVTLADAGFIKQYGDCLGDIAARDLICAQKFNGLTVLPPLLTDEMIAQYTSALLAGTITSGWTFGAGAALQIPFAMQMAYRFNGIGVTQNVLYENQKLIANQFNSAIGKIQDSLSSTASALGKLQDVVNQNAQALNTLVKQLSSNFGAISSVLNDILSRLDKVEAEVQIDRLITGRLQSLQTYVTQQLIRAAEIRASANLAATKMSECVLGQSKRVDFCGKGYHLMSFPQSAPHGVVFLHVTYVPAQEKNFTCAPAICHDGKAHFPREGVFVSNGTHWFVTQRNFYEPQIITTDNTFVSGNCDVVIGIVNNTVYDPLQPELDSFKEELDKYFKNHTSPDVDLGDISGINASVVNIQKEIDRLNEVAKNLNESLIDLQELGKYEQYIKGGGSGGGQIYEGKLTAEGLRFGIVASRFNHALVDRLVEGAIDAIVRHGGREEDITLVRVPGSWEIPVAAGELARKEDIDAVIAIGVLIRGATPHFDYIASEVSKGLADLSLELRKPITFGVITADTLEQAIERAGTKHGNKGWEAALSAIEMANLFKSLR

SEQ ID NO: 4016 - protein, 1371 aa, Artificial Sequence
  SARS-CoV-2/Congo/94/2020__EPI_ISL_417947 spike protein (1-1211)(I712C_T1077C) LumSynth construct
MFVFLVLLPLVSSQCVNLTTRTQLPPAYTNSFTRGVYYPDKVFRSSVLHSTQDLFLPFFSNVTWFHAIHVSGTNGTKRFDNPVLPFNDGVYFASTEKSNIIRGWIFGTTLDSKTQSLLIVNNATNVVIKVCEFQFCNDPFLGVYYHKNNKSWMESEFRVYSSANNCTFEYVSQPFLMDLEGKQGNFKNLREFVFKNIDGYFKIYSKHTPINLVRDLPQGFSALEPLVDLPIGINITRFQTLLALHRSYLTPGDSSSGWTAGAAAYYVGYLQPRTFLLKYNENGTITDAVDCALDPLSETKCTLKSFTVEKGIYQTSNFRVQPTESIVRFPNITNLCPFGEVFNATRFASVYAWNRKRISNCVADYSVLYNSASFSTFKCYGVSPTKLNDLCFTNVYADSFVIRGDEVRQIAPGQTGKIADYNYKLPDDFTGCVIAWNSNNLDSKVGGNYNYLYRLFRKSNLKPFERDISTEIYQAGSTPCNGVEGFNCYFPLQSYGFQPTNGVGYQPYRVVVLSFELLHAPATVCGPKKSTNLVKNKCVNFNFNGLTGTGVLTESNKKFLPFQQFGRDIADTTDAVRDPQTLEILDITPCSFGGVSVITPGTNTSNQVAVLYQGVNCTEVPVAIHADQLTPTWRVYSTGSNVFQTRAGCLIGAEHVNNSYECDIPIGAGICASYQTQTNSPRRARSVASQSIIAYTMSLGAENSVAYSNNSCAIPTNFTISVTTEILPVSMTKTSVDCTMYICGDSTECSNLLLQYGSFCTQLNRALTGIAVEQDKNTQEVFAQVKQIYKTPPIKDFGGFNFSQILPDPSKPSKRSFIEDILFNKVTLADAGFIKQYGDCLGDIAARDLICAQKFNGLTVLPPLLTDEMIAQYTSALLAGTITSGWTFGAGAALQIPFAMQMAYRFNGIGVTQNVLYENQKLIANQFNSAIGKIQDSLSSTASALGKLQDVVNQNAQALNTLVKQLSSNFGAISSVLNDILSRLDKVEAEVQIDRLITGRLQSLQTYVTQQLIRAAEIRASANLAATKMSECVLGQSKRVDFCGKGYHLMSFPQSAPHGVVFLHVTYVPAQEKNFTCAPAICHDGKAHFPREGVFVSNGTHWFVTQRNFYEPQIITTDNTFVSGNCDVVIGIVNNTVYDPLQPELDSFKEELDKYFKNHTSPDVDLGDISGINASVVNIQKEIDRLNEVAKNLNESLIDLQELGKYEQYIKGGGSGGGQIYEGKLTAEGLRFGIVASRFNHALVDRLVEGAIDAIVRHGGREEDITLVRVPGSWEIPVAAGELARKEDIDAVIAIGVLIRGATPHFDYIASEVSKGLADLSLELRKPITFGVITADTLEQAIERAGTKHGNKGWEAALSAIEMANLFKSLR

SEQ ID NO: 4017 - protein, 1371 aa, Artificial Sequence
  SARS-CoV-2/Congo/158/2020__EPI_ISL_417950 spike protein (1-1211)(I712C_T1077C) LumSynth construct
MFVFLVLLPLVSSQCVNLTTRTQLPPAYTNSFTRGVYYPDKVFRSSVLHSTQDLFLPFFSNVTWFHAIHVSGTNGTKRFDNPVLPFNDGVYFASTEKSNIIRGWIFGTTLDSKTQSLLIVNNATNVVIKVCEFQFCNDPFLGVYYHKNNKSWMESEFRVYSSANNCTFEYVSQPFLMDLEGKQGNFKNLREFVFKNIDGYFKIYSKHTPINLVRDLPQGFSALEPLVDLPIGINITRFQTLLALHRSYLTPGDSSSGWTAGAAAYYVGYLQPRTFLLKYNENGTITDAVDCALDPLSETKCTLKSFTVEKGIYQTSNFRVQPTESIVRFPNITNLCPFGEVFNATRFASVYAWNRKRISNCVADYSVLYNSASFSTFKCYGVSPTKLNDLCFTNVYADSFVIRGDEVRQIAPGQTGKIADYNYKLPDDFTGCVIAWNSNNLDSKVGGNYNYLYRLFRKSNLKPFERDISTEIYQAGSTPCNGVEGFNCYFPLQSYGFQPTNGVGYQPYRVVVLSFELLHAPATVCGPKKSTNLVKNKCVNFNFNGLTGTGVLTESNKKFLPFQQFGRDIADTTDAVRDPQTLEILDITPCSFGGVSVITPGTNTSNQVAVLYQDVNCTEVPVAIHADQLTPTWRVYSTGSNVFQTRAGCLIGAEHVNNSYECDIPIGAGICASYQTQTNSPRRARSVASQSIIAYTMSLGAENSVAYSNNSCAIPTNFTISVTTEILPVSMTKTSVDCTMYICGDSTECSNLLLQYGSFCTQLNRALTGIAVEQDKNTQEVFAQVKQIYKTPPIKDFGGFNFSQILPDPSKPSKRSFIEDLLFNKVTLADAGFIKQYGDCLGDIAARDLICAQKFNGLTVLPPLLTDEMIAQYTSALLAGTITSGWTFGAGAALQIPFAMQMAYRFNGIGVTQNVLYENQKLIANQFNSAIGKIQDSLSSTASALGKLQDVVNQNAQALNTLVKQLSSNFGAISSVLNDILSRLDKVEAEVQIDRLITGRLQSLQTYVTQQLIRAAEIRASANLAATKMSECVLGQSKRVDFCGKGYHLMSFPQSAPHGVVFLHVTYVPAQEKNFTCAPAICHDGKAHFPREGVFVSNGTHWFVTQRNFYEPQIITTDNTFLSGNCDVVIGIVNNTVYDPLQPELDSFKEELDKYFKNHTSPDVDLGDISGINASVVNIQKEIDRLNEVAKNLNESLIDLQELGKYEQYIKGGGSGGGQIYEGKLTAEGLRFGIVASRFNHALVDRLVEGAIDAIVRHGGREEDITLVRVPGSWEIPVAAGELARKEDIDAVIAIGVLIRGATPHFDYIASEVSKGLADLSLELRKPITFGVITADTLEQAIERAGTKHGNKGWEAALSAIEMANLFKSLR

SEQ ID NO: 4018 - protein, 1371 aa, Artificial Sequence
  SARS-CoV-2/USA/UT-00034/2020__EPI_ISL_417977 spike protein (1-1211)(I712C_T1077C) LumSynth construct
MFVFLVLLPLVSSQCVNLTTRTQLPPAYTNSFTRGVYYPDKVFRSSVLHSTQDLFLPFFSNVTWFHAIHVSGTNGTKRFDNPVLPFNDGVYFASTEKSNIIRGWIFGTTLDSKTQSLLIVNNATNVVIKVCEFQFCNDPFLGVYYYKNNKSWMESEFRVYSSANNCTFEYVSQPFLMDLEGKQGNFKNLREFVFKNIDGYFKIYSKHTPINLVRDLPQGFSALEPLVDLPIGINITRFQTLLALHRSYLTPGDSSSGWTAGAAAYYVGYLQPRTFLLKYNENGTITDAVDCALDPLSETKCTLKSFTVEKGIYQTSNFRVQPTESIVRFPNITNLCPFGEVFNATRFASVYAWNRKRISNCVADYSVLYNSASFSTFKCYGVSPTKLNDLCFTNVYADSFVIRGDEVRQIAPGQTGKIADYNYKLPDDFTGCVIAWNSNNLDSKVGGNYNYLYRLFRKSNLKPFERDISTEIYQAGSTPCNGVEGFNCYFPLQSYGFQPTNGVGYQPYRVVVLSFELLHAPATVCGPKKSTNLVKNKCVNFNFNGLTGTGVLTESNKKFLPFQQFGRDIADTTDAVRDPQTLEILDITPCSFGGVSVITPGTNTSNQVAVLYQGVNCTEVPVAIHADQLTPTWRVYSTGSNVFQTRAGCLIGAEHVNNSYECDIPIGAGICASYQTQTNSPRRARSVASQSIIAYTMSLGAENSVAYSNNSCAIPTNFTISVTTEILPVSMTKTSVDCTMYICGDSTECSNLLLQYGSFCTQLNRALTGIAVEQDKNTQEVFAQVKQIYKTPPIKDFGGFNFSQILPDPSKPSKRSFIEDLLFNKVTLADAGFIKQYGDCLGDIAARDLICAQKFNGLTVLPPLLTDEMIAQYTSALLAGTITSGWTFGAGAALQIPFAMQMAYRFNGIGVTQNVLYENQKLIANQFNSAIGKIQDSLSSTASALGKLQDVVNQNAQALNTLVKQLSSNFGAISSVLNDILSRLDKVEAEVQIDRLITGRLQSLQTYVTQQLIRAAEIRASANLAATKMSECVLGQSKRVDFCGKGYHLMSFPQSAPHGVVFLHVTYVPAQEKNFTCAPAICHDGKAHFPREGVFVSNGTHWFVTQRNFYEPQIITTDNTFVSGNCDVVIGIVNNTVYDPLQPELDSFKEELDKYFKNHTSPDVDLGDISGINASVVNIQKEIDRLNEVAKNLNESLIDLQELGKYEQYIKGGGSGGGQIYEGKLTAEGLRFGIVASRFNHALVDRLVEGAIDAIVRHGGREEDITLVRVPGSWEIPVAAGELARKEDIDAVIAIGVLIRGATPHFDYIASEVSKGLADLSLELRKPITFGVITADTLEQAIERAGTKHGNKGWEAALSAIEMANLFKSLR

SEQ ID NO: 4019 - protein, 1371 aa, Artificial Sequence
  SARS-CoV-2/USA/UT-00033/2020__EPI_ISL_417976 spike protein (1-1211)(I712C_T1077C) LumSynth construct
MFVFLVLLPLVSSQCVNLTTRTQLPPAYTNSFTRGVYYPDKVFRSSVLHSTQDLFLPFFSNVTWFHAIHVSGTNGTKRFDNPVLPFNDGVYFASTEKSNIIRGWIFGTTLDSKTQSLLIVNNATNVVIKVCEFQFCNDPFLGVYYHKNNKSWMESEFRVYSSANNCTFEYVSQPFLMDLEGKQGNFKNLREFVFKNIDGYFKIYSKHTPINLVRDLPQGFSALEPLVDLPIGINITRFQTLLALHRSYLTPGDSSSGLTAGAAAYYVGYLQPRTFLLKYNENGTITDAVDCALDPLSETKCTLKSFTVEKGIYQTSNFRVQPTESIVRFPNITNLCPFGEVFNATRFASVYAWNRKRISNCVADYSVLYNSASFSTFKCYGVSPTKLNDLCFTNVYADSFVIRGDEVRQIAPGQTGKIADYNYKLPDDFTGCVIAWNSNNLDSKVGGNYNYLYRLFRKSNLKPFERDISTEIYQAGSTPCNGVEGFNCYFPLQSYGFQPTNGVGYQPYRVVVLSFELLHAPATVCGPKKSTNLVKNKCVNFNFNGLTGTGVLTESNKKFLPFQQFGRDIADTTDAVRDPQTLEILDITPCSFGGVSVITPGTNTSNQVAVLYQGVNCTEVPVAIHADQLTPTWRVYSTGSNVFQTRAGCLIGAEHVNNSYECDIPIGAGICASYQTQTNSPRRARSVASQSIIAYTMSLGAENSVAYSNNSCAIPTNFTISVTTEILPVSMTKTSVDCTMYICGDSTECSNLLLQYGSFCTQLNRALTGIAVEQDKNTQEVFAQVKQIYKTPPIKDFGGFNFSQILPDPSKPSKRSFIEDLLFNKVTLADAGFIKQYGDCLGDIAARDLICAQKFNGLTVLPPLLTDEMIAQYTSALLAGTITSGWTFGAGAALQIPFAMQMAYRFNGIGVTQNVLYENQKLIANQFNSAIGKIQDSLSSTASALGKLQDVVNQNAQALNTLVKQLSSNFGAISSVLNDILSRLDKVEAEVQIDRLITGRLQSLQTYVTQQLIRAAEIRASANLAATKMSECVLGQSKRVDFCGKGYHLMSFPQSAPHGVVFLHVTYVPAQEKNFTCAPAICHDGKAHFPREGVFVSNGTHWFVTQRNFYEPQIITTDNTFVSGNCDVVIGIVNNTVYDPLQPELDSFKEELDKYFKNHTSPDVDLGDISGINASVVNIQKEIDRLNEVAKNLNESLIDLQELGKYEQYIKGGGSGGGQIYEGKLTAEGLRFGIVASRFNHALVDRLVEGAIDAIVRHGGREEDITLVRVPGSWEIPVAAGELARKEDIDAVIAIGVLIRGATPHFDYIASEVSKGLADLSLELRKPITFGVITADTLEQAIERAGTKHGNKGWEAALSAIEMANLFKSLR

SEQ ID NO: 4020 - protein, 1371 aa, Artificial Sequence
  SARS-CoV-2/USA/WI-13/2020__EPI_ISL_417516 spike protein (1-1211)(I712C_T1077C) LumSynth construct
MFVFLVLLPLVSSQCVNLTTRTQLPPAYTNSFTRGVYYPDKVFRSSVLHSTQDLFLPFFSNVTWFHAIHVSGTNGTKRFDNPVLPFNDGVYFASTEKSNIIRGWIFGTTLDSKTQSLLIVNNATNVVIKVCEFQFCNDPFLGVYYHKNNKSWMESEFRVYSSANNCTFEYVSQPFLMDLEGKQGNFKNLREFVFKNIDGYFKIYSKHTPINLVRDLPQGFSALEPLVDLPIGINITRFQTLLALHRSYLTPGDSSSGWTAGAAAYYVGYLQPRTFLLKYNENGTITDAVDCALDPLSETKCTLKSFTVEKGIYQTSNFRVLPTESIVRFPNITNLCPFGEVFNATRFASVYAWNRKRISNCVADYSVLYNSASFSTFKCYGVSPTKLNDLCFTNVYADSFVIRGDEVRQIAPGQTGKIADYNYKLPDDFTGCVIAWNSNNLDSKVGGNYNYLYRLFRKSNLKPFERDISTEIYQAGSTPCNGVEGFNCYFPLQSYGFQPTNGVGYQPYRVVVLSFELLHAPATVCGPKKSTNLVKNKCVNFNFNGLTGTGVLTESNKKFLPFQQFGRDIADTTDAVRDPQTLEILDITPCSFGGVSVITPGTNTSNQVAVLYQGVNCTEVPVAIHADQLTPTWRVYSTGSNVFQTRAGCLIGAEHVNNSYECDIPIGAGICASYQTQTNSPRRARSVASQSIIAYTMSLGAENSVAYSNNSCAIPTNFTISVTTEILPVSMTKTSVDCTMYICGDSTECSNLLLQYGSFCTQLNRALTGIAVEQDKNTQEVFAQVKQIYKTPPIKDFGGFNFSQILPDPSKPSKRSFIEDLLFNKVTLADAGFIKQYGDCLGDIAARDLICAQKFNGLTVLPPLLTDEMIAQYTSALLAGTITSGWTFGAGAALQIPFAMQMAYRFNGIGVTQNVLYENQKLIANQFNSAIGKIQDSLSSTASALGKLQDVVNQNAQALNTLVKQLSSNFGAISSVLNDILSRLDKVEAEVQIDRLITGRLQSLQTYVTQQLIRAAEIRASANLAATKMSECVLGQSKRVDFCGKGYHLMSFPQSAPHGVVFLHVTYVPAQEKNFTCAPAICHDGKAHFPREGVFVSNGTHWFVTQRNFYEPQIITTDNTFVSGNCDVVIGIVNNTVYDPLQPELDSFKEELDKYFKNHTSPDVDLGDISGINASVVNIQKEIDRLNEVAKNLNESLIDLQELGKYEQYIKGGGSGGGQIYEGKLTAEGLRFGIVASRFNHALVDRLVEGAIDAIVRHGGREEDITLVRVPGSWEIPVAAGELARKEDIDAVIAIGVLIRGATPHFDYIASEVSKGLADLSLELRKPITFGVITADTLEQAIERAGTKHGNKGWEAALSAIEMANLFKSLR

SEQ ID NO: 4021 - protein, 1370 aa, Artificial Sequence
  SARS-CoV-2/India/1-27/2020__EPI_ISL_413522 spike protein (1-1210)(I711C_T1076C) LumSynth construct
MFVFLVLLPLVSSQCVNLTTRTQLPPAYTNSFTRGVYYPDKVFRSSVLHSTQDLFLPFFSNVTWFHAIHVSGTNGTKRFDNPVLPFNDGVYFASTEKSNIIRGWIFGTTLDSKTQSLLIVNNATNVVIKVCEFQFCNDPFLGVYHKNNKSWMESEFRVYSSANNCTFEYVSQPFLMDLEGKQGNFKNLREFVFKNIDGYFKIYSKHTPINLVRDLPQGFSALEPLVDLPIGINITRFQTLLALHRSYLTPGDSSSGWTAGAAAYYVGYLQPRTFLLKYNENGTITDAVDCALDPLSETKCTLKSFTVEKGIYQTSNFRVQPTESIVRFPNITNLCPFGEVFNATRFASVYAWNRKRISNCVADYSVLYNSASFSTFKCYGVSPTKLNDLCFTNVYADSFVIRGDEVIQIAPGQTGKIADYNYKLPDDFTGCVIAWNSNNLDSKVGGNYNYLYRLFRKSNLKPFERDISTEIYQAGSTPCNGVEGFNCYFPLQSYGFQPTNGVGYQPYRVVVLSFELLHAPATVCGPKKSTNLVKNKCVNFNFNGLTGTGVLTESNKKFLPFQQFGRDIADTTDAVRDPQTLEILDITPCSFGGVSVITPGTNTSNQVAVLYQDVNCTEVPVAIHADQLTPTWRVYSTGSNVFQTRAGCLIGAEHVNNSYECDIPIGAGICASYQTQTNSPRRARSVASQSIIAYTMSLGAENSVAYSNNSCAIPTNFTISVTTEILPVSMTKTSVDCTMYICGDSTECSNLLLQYGSFCTQLNRALTGIAVEQDKNTQEVFAQVKQIYKTPPIKDFGGFNFSQILPDPSKPSKRSFIEDLLFNKVTLADAGFIKQYGDCLGDIAARDLICAQKFNGLTVLPPLLTDEMIAQYTSALLAGTITSGWTFGAGAALQIPFAMQMAYRFNGIGVTQNVLYENQKLIANQFNSAIGKIQDSLSSTASALGKLQDVVNQNAQALNTLVKQLSSNFGAISSVLNDILSRLDKVEAEVQIDRLITGRLQSLQTYVTQQLIRAAEIRASANLAATKMSECVLGQSKRVDFCGKGYHLMSFPQSAPHGVVFLHVTYVPAQEKNFTCAPAICHDGKAHFPREGVFVSNGTHWFVTQRNFYEPQIITTDNTFVSGNCDVVIGIVNNTVYDPLQPELDSFKEELDKYFKNHTSPDVDLGDISGINASVVNIQKEIDRLNEVAKNLNESLIDLQELGKYEQYIKGGGSGGGQIYEGKLTAEGLRFGIVASRFNHALVDRLVEGAIDAIVRHGGREEDITLVRVPGSWEIPVAAGELARKEDIDAVIAIGVLIRGATPHFDYIASEVSKGLADLSLELRKPITFGVITADTLEQAIERAGTKHGNKGWEAALSAIEMANLFKSLR

SEQ ID NO: 4022 - protein, 1365 aa, Artificial Sequence
  SARS-CoV-2/pangolin/Guangxi/P4L/2017__EPI_ISL_410538 spike protein (1-1205)(I706C_T1071C) LumSynth construct
MFVFLFVLPLVSSQCVNLTTRTGIPPGYTNSSTRGVYYPDKVFRSSILHLTQDLFLPFFSNVTWFNTINYQGGFKKFDNPVLPFNDGVYFASTEKSNIIRGWIFGTTLDARTQSLLIVNNATNVVIKVCEFQFCTDPFLGVYYHNNNKTWVENEFRVYSSANNCTFEYISQPFLMDLEGKQGNFKNLREFVFKNVDGYFKIYSKHTPIDLVRDLPRGFAALEPLVDLPIGINITRFQTLLALHRSYLTPGNLESGWTTGAAAYYVGYLQQRTFLLSYNQNGTITDAVDCSLDPLSETKCTLKSLTVEKGIYQTSNFRVQPTISIVRFPNITNLCPFGEVFNASKFASVYAWNRKRISNCVADYSVLYNSTSFSTFKCYGVSPTKLNDLCFTNVYADSFVVKGDEVRQIAPGQTGVIADYNYKLPDDFTGCVIAWNSVKQDALTGGNYGYLYRLFRKSKLKPFERDISTEIYQAGSTPCNGQVGLNCYYPLERYGFHPTTGVNYQPFRVVVLSFELLNGPATVCGPKLSTTLVKDKCVNFNFNGLTGTGVLTTSKKQFLPFQQFGRDISDTTDAVRDPQTLEILDITPCSFGGVSVITPGTNTSNQVAVLYQDVNCTEVPMAIHAEQLTPAWRVYSAGANVFQTRAGCLVGAEHVNNSYECDIPVGAGICASYHSMSSLRSVNQRSIIAYTMSLGAENSVAYSNNSCAIPTNFTISVTTEILPVSMTKTSVDCTMYICGDSIECSNLLLQYGSFCTQLNRALTGIAVEQDKNTQEVFAQVKQIYKTPPIKDFGGFNFSQILPDPSKPSKRSFIEDLLFNKVTLADAGFIKQYGDCLGDIAARDLICAQKFNGLTVLPPLLTDEMIAQYTSALLAGTITSGWTFGAGAALQIPFAMQMAYRFNGIGVTQNVLYENQKLIANQFNSAIGKIQDSLSSTASALGKLQDVVNQNAQALNTLVKQLSSNFGAISSVLNDILSRLDKVEAEVQIDRLITGRLQSLQTYVTQQLIRAAEIRASANLAATKMSECVLGQSKRVDFCGKGYHLMSFPQSAPHGVVFLHVTYVPAQEKNFTCAPAICHEGKAHFPREGVFVSNGTHWFITQRNFYEPQIITTDNTFVSGSCDVVIGIVNNTVYDPLQPELDSFKEELDKYFKNHTSPDVDLGDISGINASVVNIQKEIDRLNEVAKNLNESPIDLQELGKYEQYIKGGGSGGGQIYEGKLTAEGLRFGIVASRFNHALVDRLVEGAIDAIVRHGGREEDITLVRVPGSWEIPVAAGELARKEDIDAVIAIGVLIRGATPHFDYIASEVSKGLADLSLELRKPITFGVITADTLEQAIERAGTKHGNKGWEAALSAIEMANLFKSLR

SEQ ID NO: 4023 - protein, 1365 aa, Artificial Sequence
  SARS-CoV-2/pangolin/Guangxi/P5L/2017__EPI_ISL_410540 spike protein (1-1205)(I706C_T1071C) LumSynth construct
MFVFLFVLPLVSSQCVNLTTRTGIPPGYTNSSTRGVYYPDKVFRSSILHLTQDLFLPFFSNVTWFNTINYQGGFKKFDNPVLPFNDGVYFASTEKSNIIRGWIFGTTLDARTQSLLIVNNATNVVIKVCEFQFCTDPFLGVYYHNNNKTWVENEFRVYSSANNCTFEYISQPFLMDLEGKQGNFKNLREFVFKNVDGYFKIYSKHTPIDLVRDLPRGFAALEPLVDLPIGINITRFQTLLALHRSYLTPGKLESGWTTGAAAYYVGYLQQRTFLLSYNQNGTITDAVDCSLDPLSETKCTLKSLTVEKGIYQTSNFRVQPTISIVRFPNITNLCPFGEVFNASKFASVYAWNRKRISNCVADYSVLYNSTSFSTFKCYGVSPTKLNDLCFTNVYADSFVVKGDEVRQIAPGQTGVIADYNYKLPDDFTGCVIAWNSVKQDALTGGNYGYLYRLFRKSKLKPFERDISTEIYQAGSTPCNGQVGLNCYYPLERYGFHPTTGVNYQPFRVVVLSFELLNGPATVCGPKLSTTLVKDKCVNFNFNGLTGTGVLTTSKKQFLPFQQFGRDISDTTDAVRDPQTLEILDITPCSFGGVSVITPGTNTSNQVAVLYQDVNCTEVPMAIHAEQLTPAWRVYSAGANVFQTRAGCLVGAEHVNNSYECDIPVGAGICASYHSMSSFRSVNQRSIIAYTMSLGAENSVAYSNNSCAIPTNFTISVTTEILPVSMTKTSVDCTMYICGDSIECSNLLLQYGSFCTQLNRALTGIAVEQDKNTQEVFAQVKQIYKTPPIKDFGGFNFSQILPDPSKPSKRSFIEDLLFNKVTLADAGFIKQYGDCLGDIAARDLICAQKFNGLTVLPPLLTDEMIAQYTSALLAGTITSGWTFGAGAALQIPFAMQMAYRFNGIGVTQNVLYENQKLIANQFNSAIGKIQDSLSSTASALGKLQDVVNQNAQALNTLVKQLSSNFGAISSVLNDILSRLDKVEAEVQIDRLITGRLQSLQTYVTQQLIRAAEIRASANLAATKMSECVLGQSKRVDFCGKGYHLMSFPQSAPHGVVFLHVTYVPAQEKNFTCAPAICHEGKAHFPREGVFVSNGTHWFITQRNFYEPQIITTDNTFVSGSCDVVIGIVNNTVYDPLQPELDSFKEELDKYFKNHTSPDVDLGDISGINASVVNIQKEIDRLNEVAKNLNESLIDLQELGKYEQYIKGGGSGGGQIYEGKLTAEGLRFGIVASRFNHALVDRLVEGAIDAIVRHGGREEDITLVRVPGSWEIPVAAGELARKEDIDAVIAIGVLIRGATPHFDYIASEVSKGLADLSLELRKPITFGVITADTLEQAIERAGTKHGNKGWEAALSAIEMANLFKSLR

SEQ ID NO: 4024 - protein, 1365 aa, Artificial Sequence
  SARS-CoV-2/pangolin/Guangxi/P5E/2017__EPI_ISL_410541 spike protein (1-1205)(I706C_T1071C) LumSynth construct
MFVFLFVLPLVSSQCVNLTTRTGIPPGYTNSSTRGVYYPDKVFRSSILHLTQDLFLPFFSNVTWFNTITYQGGSKKFDNPVLPFNDGVYFASTEKSNIIRGWIFGTTLDARTQSLLIVNNATNVVIKVCEFQFCTDPFLGVYYHNNNKTWVENEFRVYSSANNCTFEYISQPFLMDLEGKQGNFKNLREFVFKNVDGYFKIYSKHTPIDLVRDLPRGFAALEPLVDLPIGINITRFQTLLALHRSYLTPGKLESGWTTGAAAYYVGYLQQRTFLLSYNQNGTITDAVDCSLDPLSETKCTLKSLTVEKGIYQTSNFRVQPTISIVRFPNITNLCPFGEVFNASKFASVYAWNRKRISNCVADYSVLYNSTSFSTFKCYGVSPTKLNDLCFTNVYADSFVVKGDEVRQIAPGQTGVIADYNYKLPDDFTGCVIAWNSVKQDALTGDNYGYLYRLFRKSKLKPFERDISTEIYQAGSTPCNGQVGLNCYYPLERYGFHPTTGVNYQPFRVVVLSFELLNGPATVCGPKLSTTLVKDKCVNFNFNGLTGTGVLTTSKKQFLPFQQFGRDISDTTDAVRDPQTLEILDITPCSFGGVSVITPGTNTSNQVAVLYQDVNCTEVPMAIHAEQLTPAWRVYSAGANVFQTRAGCLVGAEHVNNSYECDIPVGAGICASYHSMSSFRSVNQRSIIAYTMSLGAENSVAYSNNSCAIPTNFTISVTTEILPVSMTKTSVDCTMYICGDSIECSNLLLQYGSFCTQLNRALTGIAVEQDKNTQEVFAQVKQIYKTPPIKDFGGFNFSQILPDPSKPSKRSFIEDLLFNKVTLADAGFIKQYGDCLGDIAARDLICAQKFNGLTVLPPLLTDEMIAQYTSALLAGTITSGWTFGAGAALQIPFAMQMAYRFNGIGVTQNVLYENQKLIANQFNSAIGKIQDSLSSTASALGKLQDVVNQNAQALNTLVKQLSSNFGAISSVLNDILSRLDKVEAEVQIDRLITGRLQSLQTYVTQQLIRAAEIRASANLAATKMSECVLGQSKRVDFCGKGYHLMSFPQSAPHGVVFLHVTYVPAQEKNFTCAPAICHEGKAHFPREGVFVSNGTHWFITQRNFYEPQIITTDNTFVSGSCDVVIGIVNNTVYDPLQPELDSFKEELDKYFKNHTSPDVDLGDISGINASVVNIQKEIDRLNEVAKNLNESLIDLQELGKYEQYIKGGGSGGGQIYEGKLTAEGLRFGIVASRFNHALVDRLVEGAIDAIVRHGGREEDITLVRVPGSWEIPVAAGELARKEDIDAVIAIGVLIRGATPHFDYIASEVSKGLADLSLELRKPITFGVITADTLEQAIERAGTKHGNKGWEAALSAIEMANLFKSLR

SEQ ID NO: 4025 - protein, 1363 aa, Artificial Sequence
  SARS-CoV-2/pangolin/Guangxi/P1E/2017__EPI_ISL_410539 spike protein (1-1203)(I704C_T1069C) LumSynth construct
MFVFLFVLPLVSSQCVNLTTRTGIQPGYTNSSTRGVYYPDKVFRSSILHLTQDLFLPFFSNVTWFNTINYQGGFKKFDNPVLPFNDGVYFASTEKSNIIRGWIFGTTLDARTQSLLIVNNATNVVIKVCEFQFCTDPFLGVYYHNNNKTWVENEFRVYSSANNCTFEYISQPFLMDLEGKQGNFKNLREFVFKNVDGYFKIYSKHTPIDLVRDLPRGFAALEPLVDLPIGINITRFQTLLALHRSYLTPGKLESGWTTGAAAYYVGYLQQRTFLLSYNQNGTITDAVDCSLDPLSETKCTLKSLTVEKGIYQTSNFRVQPTISIVRFPNITNLCPFGEVFNASKFASVYAWNRKRISNCVADYSVLYNSTSFSTFKCYGVSPTKLNDLCFTNVYADSFVVKGDEVRQIAPGQTGVIADYNYKLPDDFTGCVIAWNSVKQDALTGGNYLYRLFRKSKLKPFERDISTEIYQAGSTPCNGQVGLNCYYPLERYGFHPTTGVNYQPFRVVVLSFELLNGPATVCGPKLSTTLVKDKCVNFNFNGLTGTGVLTTSKKQFLPFQQFGRDISDTTDAVRDPQTLEILDITPCSFGGVSVITPGTNTSNQVAVLYQDVNCTEVPMAIHAEQLTPAWRVYSAGANVFQTRAGCLVGAEHVNNSYECDIPVGAGICASYHSMSSLRSVNQRSIIAYTMSLGAENSVAYSNNSCAIPTNFTISVTTEILPVSMTKTSVDCTMYICGDSIECSNLLLQYGSFCTQLNRALTGIAVEQDKNTQEVFAQVKQIYKTPPIKDFGGFNFSQILPDPSKPSKRSFIEDLLFNKVTLADAGFIKQYGDCLGDIAARDLICAQKFNGLTVLPPLLTDEMIAQYTSALLAGTITSGWTFGAGAALQIPFAMQMAYRFNGIGVTQNVLYENQKLIANQFNSAIGKIQDSLSSTASALGKLQDVVNQNAQALNTLVKQLSSNFGAISSVLNDILSRLDKVEAEVQIDRLITGRLQSLQTYVTQQLIRAAEIRASANLAATKMSECVLGQSKRVDFCGKGYHLMSFPQSAPHGVVFLHVTYVPAQEKNFTCAPAICHEGKAHFPREGVFVSNGTHWFITQRNFYEPQIITTDNTFVSGSCDVVIGIVNNTVYDPLQPELDSFKEELDKYFKNHTSPDVDLGDISGINASVVNIQKEIDRLNEVAKNLNESLIDLQELGKYEQYIKGGGSGGGQIYEGKLTAEGLRFGIVASRFNHALVDRLVEGAIDAIVRHGGREEDITLVRVPGSWEIPVAAGELARKEDIDAVIAIGVLIRGATPHFDYIASEVSKGLADLSLELRKPITFGVITADTLEQAIERAGTKHGNKGWEAALSAIEMANLFKSLR

SEQ ID NO: 4026 - protein, 1371 aa, Artificial Sequence
  SARS-CoV-2/Wuhan/WIV05/2019__EPI_ISL_402128 spike protein (1-1211)(I714C_Y1110C) LumSynth construct
MFVFLVLLPLVSSQCVNLTTRTQLPPAYTNSFTRGVYYPDKVFRSSVLHSTQDLFLPFFSNVTWFHAIHVSGTNGTKRFDNPVLPFNDGVYFASTEKSNIIRGWIFGTTLDSKTQSLLIVNNATNVVIKVCEFQFCNDPFLGVYYHKNNKSWMESEFRVYSSANNCTFEYVSQPFLMDLEGKQGNFKNLREFVFKNIDGYFKIYSKHTPINLVRDLPQGFSALEPLVDLPIGINITRFQTLLALHRSYLTPGDSSSGWTAGAAAYYVGYLQPRTFLLKYNENGTITDAVDCALDPLSETKCTLKSFTVEKGIYQTSNFRVQPTESIVRFPNITNLCPFGEVFNATRFASVYAWNRKRISNCVADYSVLYNSASFSTFKCYGVSPTKLNDLCFTNVYADSFVIRGDEVRQIAPGQTGKIADYNYKLPDDFTGCVIAWNSNNLDSKVGGNYNYLYRLFRKSNLKPFERDISTEIYQAGSTPCNGVEGFNCYFPLQSYGFQPTNGVGYQPYRVVVLSFELLHAPATVCGPKKSTNLVKNKCVNFNFNGLTGTGVLTESNKKFLPFQQFGRDIADTTDAVRDPQTLEILDITPCSFGGVSVITPGTNTSNQVAVLYQDVNCTEVPVAIHADQLTPTWRVYSTGSNVFQTRAGCLIGAEHVNNSYECDIPIGAGICASYQTQTNSPRRARSVASQSIIAYTMSLGAENSVAYSNNSIACPTNFTISVTTEILPVSMTKTSVDCTMYICGDSTECSNLLLQYGSFCTQLNRALTGIAVEQDKNTQEVFAQVKQIYKTPPIKDFGGFNFSQILPDPSKPSKRSFIEDLLFNKVTLADAGFIKQYGDCLGDIAARDLICAQKFNGLTVLPPLLTDEMIAQYTSALLAGTITSGWTFGAGAALQIPFAMQMAYRFNGIGVTQNVLYENQKLIANQFNSAIGKIQDSLSSTASALGKLQDVVNQNAQALNTLVKQLSSNFGAISSVLNDILSRLDKVEAEVQIDRLITGRLQSLQTYVTQQLIRAAEIRASANLAATKMSECVLGQSKRVDFCGKGYHLMSFPQSAPHGVVFLHVTYVPAQEKNFTTAPAICHDGKAHFPREGVFVSNGTHWFVTQRNFCEPQIITTDNTFVSGNCDVVIGIVNNTVYDPLQPELDSFKEELDKYFKNHTSPDVDLGDISGINASVVNIQKEIDRLNEVAKNLNESLIDLQELGKYEQYIKGGGSGGGQIYEGKLTAEGLRFGIVASRFNHALVDRLVEGAIDAIVRHGGREEDITLVRVPGSWEIPVAAGELARKEDIDAVIAIGVLIRGATPHFDYIASEVSKGLADLSLELRKPITFGVITADTLEQAIERAGTKHGNKGWEAALSAIEMANLFKSLR

SEQ ID NO: 4027 - protein, 1367 aa, Artificial Sequence
  SARS-CoV-2/bat/Yunnan/RaTG13/2013__EPI_ISL_402131 spike protein (1-1207)(I710C_Y1106C) LumSynth construct
MFVFLVLLPLVSSQCVNLTTRTQLPPAYTNSSTRGVYYPDKVFRSSVLHLTQDLFLPFFSNVTWFHAIHVSGTNGIKRFDNPVLPFNDGVYFASTEKSNIIRGWIFGTTLDSKTQSLLIVNNATNVVIKVCEFQFCNDPFLGVYYHKNNKSWMESEFRVYSSANNCTFEYVSQPFLMDLEGKQGNFKNLREFVFKNIDGYFKIYSKHTPINLVRDLPPGFSALEPLVDLPIGINITRFQTLLALHRSYLTPGDSSSGWTAGAAAYYVGYLQPRTFLLKYNENGTITDAVDCALDPLSETKCTLKSFTVEKGIYQTSNFRVQPTDSIVRFPNITNLCPFGEVFNATTFASVYAWNRKRISNCVADYSVLYNSTSFSTFKCYGVSPTKLNDLCFTNVYADSFVITGDEVRQIAPGQTGKIADYNYKLPDDFTGCVIAWNSKHIDAKEGGNFNYLYRLFRKANLKPFERDISTEIYQAGSKPCNGQTGLNCYYPLYRYGFYPTDGVGHQPYRVVVLSFELLNAPATVCGPKKSTNLVKNKCVNFNFNGLTGTGVLTESNKKFLPFQQFGRDIADTTDAVRDPQTLEILDITPCSFGGVSVITPGTNASNQVAVLYQDVNCTEVPVAIHADQLTPTWRVYSTGSNVFQTRAGCLIGAEHVNNSYECDIPIGAGICASYQTQTNSRSVASQSIIAYTMSLGAENSVAYSNNSIACPTNFTISVTTEILPVSMTKTSVDCTMYICGDSTECSNLLLQYGSFCTQLNRALTGIAVEQDKNTQEVFAQVKQIYKTPPIKDFGGFNFSQILPDPSKPSKRSFIEDLLFNKVTLADAGFIKQYGDCLGDIAARDLICAQKFNGLTVLPPLLTDEMIAQYTSALLAGTITSGWTFGAGAALQIPFAMQMAYRFNGIGVTQNVLYENQKLIANQFNSAIGKIQDSLSSTASALGKLQDVVNQNAQALNTLVKQLSSNFGAISSVLNDILSRLDKVEAEVQIDRLITGRLQSLQTYVTQQLIRAAEIRASANLAATKMSECVLGQSKRVDFCGKGYHLMSFPQSAPHGVVFLHVTYVPAQEKNFTTAPAICHDGKAHFPREGVFVSNGTHWFVTQRNFCEPQIITTDNTFVSGSCDVVIGIVNNTVYDPLQPELDSFKEELDKYFKNHTSPDVDLGDISGINASVVNIQKEIDRLNEVAKNLNESLIDLQELGKYEQYIKGGGSGGGQIYEGKLTAEGLRFGIVASRFNHALVDRLVEGAIDAIVRHGGREEDITLVRVPGSWEIPVAAGELARKEDIDAVIAIGVLIRGATPHFDYIASEVSKGLADLSLELRKPITFGVITADTLEQAIERAGTKHGNKGWEAALSAIEMANLFKSLR

SEQ ID NO: 4028 - protein, 1371 aa, Artificial Sequence
  SARS-CoV-2/Wuhan/HBCDC-HB-01/2019__EPI_ISL_402132 spike protein (1-1211)(I714C_Y1110C) LumSynth construct
MFVFLVLLPLVSSQCVNLTTRTQLPPAYTNSITRGVYYPDKVFRSSVLHSTQDLFLPFFSNVTWFHAIHVSGTNGTKRFDNPVLPFNDGVYFASTEKSNIIRGWIFGTTLDSKTQSLLIVNNATNVVIKVCEFQFCNDPFLGVYYHKNNKSWMESEFRVYSSANNCTFEYVSQPFLMDLEGKQGNFKNLREFVFKNIDGYFKIYSKHTPINLVRDLPQGFSALEPLVDLPIGINITRFQTLLALHRSYLTPGDSSSGWTAGAAAYYVGYLQPRTFLLKYNENGTITDAVDCALDPLSETKCTLKSFTVEKGIYQTSNFRVQPTESIVRFPNITNLCPFGEVFNATRFASVYAWNRKRISNCVADYSVLYNSASFSTFKCYGVSPTKLNDLCFTNVYADSFVIRGDEVRQIAPGQTGKIADYNYKLPDDFTGCVIAWNSNNLDSKVGGNYNYLYRLFRKSNLKPFERDISTEIYQAGSTPCNGVEGFNCYFPLQSYGFQPTNGVGYQPYRVVVLSFELLHAPATVCGPKKSTNLVKNKCVNFNFNGLTGTGVLTESNKKFLPFQQFGRDIADTTDAVRDPQTLEILDITPCSFGGVSVITPGTNTSNQVAVLYQDVNCTEVPVAIHADQLTPTWRVYSTGSNVFQTRAGCLIGAEHVNNSYECDIPIGAGICASYQTQTNSPRRARSVASQSIIAYTMSLGAENSVAYSNNSIACPTNFTISVTTEILPVSMTKTSVDCTMYICGDSTECSNLLLQYGSFCTQLNRALTGIAVEQDKNTQEVFAQVKQIYKTPPIKDFGGFNFSQILPDPSKPSKRSFIEDLLFNKVTLADAGFIKQYGDCLGDIAARDLICAQKFNGLTVLPPLLTDEMIAQYTSALLAGTITSGWTFGAGAALQIPFAMQMAYRFNGIGVTQNVLYENQKLIANQFNSAIGKIQDSLSSTASALGKLQDVVNQNAQALNTLVKQLSSNFGAISSVLNDILSRLDKVEAEVQIDRLITGRLQSLQTYVTQQLIRAAEIRASANLAATKMSECVLGQSKRVDFCGKGYHLMSFPQSAPHGVVFLHVTYVPAQEKNFTTAPAICHDGKAHFPREGVFVSNGTHWFVTQRNFCEPQIITTDNTFVSGNCDVVIGIVNNTVYDPLQPELDSFKEELDKYFKNHTSPDVDLGDISGINASVVNIQKEIDRLNEVAKNLNESLIDLQELGKYEQYIKGGGSGGGQIYEGKLTAEGLRFGIVASRFNHALVDRLVEGAIDAIVRHGGREEDITLVRVPGSWEIPVAAGELARKEDIDAVIAIGVLIRGATPHFDYIASEVSKGLADLSLELRKPITFGVITADTLEQAIERAGTKHGNKGWEAALSAIEMANLFKSLR

SEQ ID NO: 4029 - protein, 1371 aa, Artificial Sequence
  SARS-CoV-2/Guangdong/20SF028/2020__EPI_ISL_403936 spike protein (1-1211)(I714C_Y1110C) LumSynth construct
MFVFLVLLPLVSSQCVNLTTRTQLPPAYTNSFTRGVYYPDKVFRSSVLYSTQDLFLPFFSNVTWFHAIHVSGTNGTKRFDNPVLPFNDGVYFASTEKSNIIRGWIFGTTLDSKTQSLLIVNNATNVVIKVCEFQFCNDPFLGVYYHKNNKSWMESEFRVYSSANNCTFEYVSQPFLMDLEGKQGNFKNLREFVFKNIDGYFKIYSKHTPINLVRDLPQGFSALEPLVDLPIGINITRFQTLLALHRSYLTPGDSSSGWTAGAAAYYVGYLQPRTFLLKYNENGTITDAVDCALDPLSETKCTLKSFTVEKGIYQTSNFRVQPTESIVRFPNITNLCPFGEVFNATRFASVYAWNRKRISNCVADYSVLYNSASFSTFKCYGVSPTKLNDLCFTNVYADSFVIRGDEVRQIAPGQTGKIADYNYKLPDDFTGCVIAWNSNNLDSKVGGNYNYLYRLFRKSNLKPFERDISTEIYQAGSTPCNGVEGFNCYFPLQSYGFQPTNGVGYQPYRVVVLSFELLHAPATVCGPKKSTNLVKNKCVNFNFNGLTGTGVLTESNKKFLPFQQFGRDIADTTDAVRDPQTLEILDITPCSFGGVSVITPGTNTSNQVAVLYQDVNCTEVPVAIHADQLTPTWRVYSTGSNVFQTRAGCLIGAEHVNNSYECDIPIGAGICASYQTQTNSPRRARSVASQSIIAYTMSLGAENSVAYSNNSIACPTNFTISVTTEILPVSMTKTSVDCTMYICGDSTECSNLLLQYGSFCTQLNRALTGIAVEQDKNTQEVFAQVKQIYKTPPIKDFGGFNFSQILPDPSKPSKRSFIEDLLFNKVTLADAGFIKQYGDCLGDIAARDLICAQKFNGLTVLPPLLTDEMIAQYTSALLAGTITSGWTFGAGAALQIPFAMQMAYRFNGIGVTQNVLYENQKLIANQFNSAIGKIQDSLSSTASALGKLQDVVNQNAQALNTLVKQLSSNFGAISSVLNDILSRLDKVEAEVQIDRLITGRLQSLQTYVTQQLIRAAEIRASANLAATKMSECVLGQSKRVDFCGKGYHLMSFPQSAPHGVVFLHVTYVPAQEKNFTTAPAICHDGKAHFPREGVFVSNGTHWFVTQRNFCEPQIITTDNTFVSGNCDVVIGIVNNTVYDPLQPELDSFKEELDKYFKNHTSPDVDLGDISGINASVVNIQKEIDRLNEVAKNLNESLIDLQELGKYEQYIKGGGSGGGQIYEGKLTAEGLRFGIVASRFNHALVDRLVEGAIDAIVRHGGREEDITLVRVPGSWEIPVAAGELARKEDIDAVIAIGVLIRGATPHFDYIASEVSKGLADLSLELRKPITFGVITADTLEQAIERAGTKHGNKGWEAALSAIEMANLFKSLR

SEQ ID NO: 4030 - protein, 1371 aa, Artificial Sequence
  SARS-CoV-2/Shenzhen/SZTH-001/2020__EPI_ISL_406592 spike protein (1-1211)(I714C_Y1110C) LumSynth construct
MFVFLVLLPLVSSQCVNLTTRTQLPPAYTNSFTRGVYYPDKVFRSSVLHSTQDLFLPFFSNVTWFHAIHVSGTNGTKRFDNPVLPFNDGVYFASTEKSNIIRGWIFGTTLDSKTQSLLIVNNATNVVIKVCEFQFCNDPFLGVYYHKNNKSWMESEFRVYSSANNCTFEYVSQPFLMDLEGKQGNFKNLREFVFKNIDGYFKIYSKHTPINLVRDLPQGFSALEPLVDLPIGINITRFQTLLALHRSYLTPGDSSSGWTAGAAAYYVGYLQPRTFLLKYNENGTITDAVDCALDPLSETKCTLKSFTVEKGIYQTSNFRVQPTESIVRFPNITNLCPFGEVFNATRFASVYAWNRKRISNCVADYSVLYNSASFSTFKCYGVSPTKLNDLCFTNVYADSFVIRGDEVRQIAPGQTGKIADYNYKLPDDFTGCVIAWNSNNLDSKVGGNYNYLYRLFRKSNLKPFERDISTEIYQAGSTPCNGVEGFNCYFPLQSYGFQPTNGVGYQPYRVVVLSFELLHAPATVCGPKKSTNLVKNKCVNFNFNGLTGTGVLTESNKKFLPFQQFGRDIADTTDAVRDPQTLEILDITPCSFGGVSVITPGTNTSNQVAVLYQDVNCTEVPVAIHADQLTPTWRVYSTGSNVFQTRAGCLIGAEHVNNSYECDIPIGAGICASYQTQTNSPRRARSVASQSIIAYTMSLGAENSVAYSNNSIACPTNFTISVTTEILPVSMTKTSVDCTMYICGDSTECSNLLLQYGSFCTQLNRALTGIAVEQDKNTQEVFAQVKQIYKTPPIKDFGGFNFSQILPDPSKPSKRSFIEDLLFNKVTLADAGFIKQYGDCLGDIAARDLICAQKFNGLTVLPPLLTDEMIAQYTSALLAGTITSGWTFGAGAALQIPFAMQMAYRFNGIGVTQNVLYENQKLIANQFNSAIGKIQDSLSSTASALGKLQDVVNQNAQALNTLVKQLSSNFGAISSVLNDILSRLDKVEAEVQIDRLITGRLQSLQTYVTQQLIRAAEIRASANLAATKMSECVLGQSKRVDFCGKGYHLMSFPQSAPHGVVFLHVTYVPAQEKNFTTAPAICHDGKAHFPREGVFVSNGTHWFVTQRNFCEPQIITTDNTFVSGNCDVLIGIVNNTVYDPLQPELDSFKEELDKYFKNHTSPDVDLGDISGINASVVNIQKEIDRLNEVAKNLNESLIDLQELGKYEQYIKGGGSGGGQIYEGKLTAEGLRFGIVASRFNHALVDRLVEGAIDAIVRHGGREEDITLVRVPGSWEIPVAAGELARKEDIDAVIAIGVLIRGATPHFDYIASEVSKGLADLSLELRKPITFGVITADTLEQAIERAGTKHGNKGWEAALSAIEMANLFKSLR

SEQ ID NO: 4031 - protein, 1371 aa, Artificial Sequence
  SARS-CoV-2/Shenzhen/SZTH-004/2020__EPI_ISL_406595 spike protein (1-1211)(I714C_Y1110C) LumSynth construct
MFVFLVLLPLVSSQCVNLTTRTQLPPAYTNSFTRGVYYPDKVFRSSVLHSTQDLFLPFFSNVTWFHAIHVSGTNGTKRFDNPVLPFNDGVYFASTEKSNIIRGWIFGTTLDSKTQSLLIVNNATNVVIKVCEFQFCNDPFLGVYYHKNNKSWMESEFRVYSSANNCTFEYVSQPFLMDLEGKQGNFKNLREFVFKNIDGYFKIYSKHTPINLVRDLPQGFSALEPLVDLPIGINITRFQTLLALHRSYLTPGDSSSGWTAGAAAYYVGYLQPRTFLLKYNENGTITDAVDCALDPLSETKCTLKSFTVEKGIYQTSNFRVQPTESIVRFPNITNLCPFGEVFNATRFASVYAWDRKRISNCVAYYSVLYNSASFSTFKCYGVSPTKLNDLCFTNVYADSFVIRGDEVRQIAPGQTGKIADYNYKLPDDFTGCVIAWNSNNLDSKVGGNYNYLYRLFRKSNLKPFERDISTEIYQAGSTPCNGVEGFNCYFPLQSYGFQPTNGVGYQPYRVVVLSFELLHAPATVCGPKKSTNLVKNKCVNFNFNGLTGTGVLTESNKKFLPFQQFGRDIADTTDAVRDPQTLEILDITPCSFGGVSVITPGTNTSNQVAVLYQDVNCTEVPVAIHADQLTPTWRVYSTGSNVFQTRAGCLIGAEHVNNSYECDIPIGAGICASYQTQTNSPRRARSVASQSIIAYTMSLGAENSVAYSNNSIACPTNFTISVTTEILPVSMTKTSVDCTMYICGDSTECSNLLLQYGSFCTQLNRALTGIAVEQDKNTQEVFAQVKQIYKTPPIKDFGGFNFSQILPDPSKPSKRSFIEDLLFNKVTLADAGFIKQYGDCLGDIAARDLICAQKFNGLTVLPPLLTDEMIAQYTSALLAGTITSGWTFGAGAALQIPFAMQMAYRFNGIGVTQNVLYENQKLIANQFNSAIGKIQDSLSSTASALGKLQDVVNQNAQALNTLVKQLSSNFGAISSVLNDILSRLDKVEAEVQIDRLITGRLQSLQTYVTQQLIRAAEIRASANLAATKMSECVLGQSKRVDFCGKGYHLMSFPQSAPHGVVFLHVTYVPAQEKNFTTAPAICHDGKAHFPREGVFVSNGTHWFVTQRNFCEPQIITTDNTFVSGNCDVVIGIVNNTVYDPLQPELDSFKEELDKYFKNHTSPDVDLGDISGINASVVNIQKEIDRLNEVAKNLNESLIDLQELGKYEQYIKGGGSGGGQIYEGKLTAEGLRFGIVASRFNHALVDRLVEGAIDAIVRHGGREEDITLVRVPGSWEIPVAAGELARKEDIDAVIAIGVLIRGATPHFDYIASEVSKGLADLSLELRKPITFGVITADTLEQAIERAGTKHGNKGWEAALSAIEMANLFKSLR

SEQ ID NO: 4032 - protein, 1371 aa, Artificial Sequence
  SARS-CoV-2/France/IDF0372/2020__EPI_ISL_406596 spike protein (1-1211)(I714C_Y1110C) LumSynth construct
MFVFLVLLPLVSSQCVNLTTRTQLPPAYTNSFTRGVYYPDKVFRSSVLHSTQDLFLPFFSNVTWFHAIHVSGTNGTKRFDNPVLPFNDGVYFASTEKSNIIRGWIFGTTLDSKTQSLLIVNNATNVVIKVCEFQFCNDPFLGVYYHKNNKSWMESEFRVYSSANNCTFEYVSQPFLMDLEGKQGNFKNLREFVFKNIDGYFKIYSKHTPINLVRDLPQGFSALEPLVDLPIGINITRFQTLLALHRSYLTPGDSSSGWTAGAAAYYVGYLQPRTFLLKYNENGTITDAVDCALDPLSETKCTLKSFTVEKGIYQTSNFRVQPTESIVRFPNITNLCPFGEVFNATRFASVYAWNRKRISNCVADYSFLYNSASFSTFKCYGVSPTKLNDLCFTNVYADSFVIRGDEVRQIAPGQTGKIADYNYKLPDDFTGCVIAWNSNNLDSKVGGNYNYLYRLFRKSNLKPFERDISTEIYQAGSTPCNGVEGFNCYFPLQSYGFQPTNGVGYQPYRVVVLSFELLHAPATVCGPKKSTNLVKNKCVNFNFNGLTGTGVLTESNKKFLPFQQFGRDIADTTDAVRDPQTLEILDITPCSFGGVSVITPGTNTSNQVAVLYQDVNCTEVPVAIHADQLTPTWRVYSTGSNVFQTRAGCLIGAEHVNNSYECDIPIGAGICASYQTQTNSPRRARSVASQSIIAYTMSLGAENSVAYSNNSIACPTNFTISVTTEILPVSMTKTSVDCTMYICGDSTECSNLLLQYGSFCTQLNRALTGIAVEQDKNTQEVFAQVKQIYKTPPIKDFGGFNFSQILPDPSKPSKRSFIEDLLFNKVTLADAGFIKQYGDCLGDIAARDLICAQKFNGLTVLPPLLTDEMIAQYTSALLAGTITSGWTFGAGAALQIPFAMQMAYRFNGIGVTQNVLYENQKLIANQFNSAIGKIQDSLSSTASALGKLQDVVNQNAQALNTLVKQLSSNFGAISSVLNDILSRLDKVEAEVQIDRLITGRLQSLQTYVTQQLIRAAEIRASANLAATKMSECVLGQSKRVDFCGKGYHLMSFPQSAPHGVVFLHVTYVPAQEKNFTTAPAICHDGKAHFPREGVFVSNGTHWFVTQRNFCEPQIITTDNTFVSGNCDVVIGIVNNTVYDPLQPELDSFKEELDKYFKNHTSPDVDLGDISGINASVVNIQKEIDRLNEVAKNLNESLIDLQELGKYEQYIKGGGSGGGQIYEGKLTAEGLRFGIVASRFNHALVDRLVEGAIDAIVRHGGREEDITLVRVPGSWEIPVAAGELARKEDIDAVIAIGVLIRGATPHFDYIASEVSKGLADLSLELRKPITFGVITADTLEQAIERAGTKHGNKGWEAALSAIEMANLFKSLR

SEQ ID NO: 4033 - protein, 1371 aa, Artificial Sequence
  SARS-CoV-2/Australia/VIC01/2020__EPI_ISL_406844 spike protein (1-1211)(I714C_Y1110C) LumSynth construct
MFVFLVLLPLVSSQCVNLTTRTQLPPAYTNSFTRGVYYPDKVFRSSVLHSTQDLFLPFFSNVTWFHAIHVSGTNGTKRFDNPVLPFNDGVYFASTEKSNIIRGWIFGTTLDSKTQSLLIVNNATNVVIKVCEFQFCNDPFLGVYYHKNNKSWMESEFRVYSSANNCTFEYVSQPFLMDLEGKQGNFKNLREFVFKNIDGYFKIYSKHTPINLVRDLPQGFSALEPLVDLPIGINITRFQTLLALHRRYLTPGDSSSGWTAGAAAYYVGYLQPRTFLLKYNENGTITDAVDCALDPLSETKCTLKSFTVEKGIYQTSNFRVQPTESIVRFPNITNLCPFGEVFNATRFASVYAWNRKRISNCVADYSVLYNSASFSTFKCYGVSPTKLNDLCFTNVYADSFVIRGDEVRQIAPGQTGKIADYNYKLPDDFTGCVIAWNSNNLDSKVGGNYNYLYRLFRKSNLKPFERDISTEIYQAGSTPCNGVEGFNCYFPLQSYGFQPTNGVGYQPYRVVVLSFELLHAPATVCGPKKSTNLVKNKCVNFNFNGLTGTGVLTESNKKFLPFQQFGRDIADTTDAVRDPQTLEILDITPCSFGGVSVITPGTNTSNQVAVLYQDVNCTEVPVAIHADQLTPTWRVYSTGSNVFQTRAGCLIGAEHVNNSYECDIPIGAGICASYQTQTNSPRRARSVASQSIIAYTMSLGAENSVAYSNNSIACPTNFTISVTTEILPVSMTKTSVDCTMYICGDSTECSNLLLQYGSFCTQLNRALTGIAVEQDKNTQEVFAQVKQIYKTPPIKDFGGFNFSQILPDPSKPSKRSFIEDLLFNKVTLADAGFIKQYGDCLGDIAARDLICAQKFNGLTVLPPLLTDEMIAQYTSALLAGTITSGWTFGAGAALQIPFAMQMAYRFNGIGVTQNVLYENQKLIANQFNSAIGKIQDSLSSTASALGKLQDVVNQNAQALNTLVKQLSSNFGAISSVLNDILSRLDKVEAEVQIDRLITGRLQSLQTYVTQQLIRAAEIRASANLAATKMSECVLGQSKRVDFCGKGYHLMSFPQSAPHGVVFLHVTYVPAQEKNFTTAPAICHDGKAHFPREGVFVSNGTHWFVTQRNFCEPQIITTDNTFVSGNCDVVIGIVNNTVYDPLQPELDSFKEELDKYFKNHTSPDVDLGDISGINASVVNIQKEIDRLNEVAKNLNESLIDLQELGKYEQYIKGGGSGGGQIYEGKLTAEGLRFGIVASRFNHALVDRLVEGAIDAIVRHGGREEDITLVRVPGSWEIPVAAGELARKEDIDAVIAIGVLIRGATPHFDYIASEVSKGLADLSLELRKPITFGVITADTLEQAIERAGTKHGNKGWEAALSAIEMANLFKSLR

SEQ ID NO: 4034 - protein, 1371 aa, Artificial Sequence
  SARS-CoV-2/Germany/BavPat1/2020__EPI_ISL_406862 spike protein (1-1211)(I714C_Y1110C) LumSynth construct
MFVFLVLLPLVSSQCVNLTTRTQLPPAYTNSFTRGVYYPDKVFRSSVLHSTQDLFLPFFSNVTWFHAIHVSGTNGTKRFDNPVLPFNDGVYFASTEKSNIIRGWIFGTTLDSKTQSLLIVNNATNVVIKVCEFQFCNDPFLGVYYHKNNKSWMESEFRVYSSANNCTFEYVSQPFLMDLEGKQGNFKNLREFVFKNIDGYFKIYSKHTPINLVRDLPQGFSALEPLVDLPIGINITRFQTLLALHRSYLTPGDSSSGWTAGAAAYYVGYLQPRTFLLKYNENGTITDAVDCALDPLSETKCTLKSFTVEKGIYQTSNFRVQPTESIVRFPNITNLCPFGEVFNATRFASVYAWNRKRISNCVADYSVLYNSASFSTFKCYGVSPTKLNDLCFTNVYADSFVIRGDEVRQIAPGQTGKIADYNYKLPDDFTGCVIAWNSNNLDSKVGGNYNYLYRLFRKSNLKPFERDISTEIYQAGSTPCNGVEGFNCYFPLQSYGFQPTNGVGYQPYRVVVLSFELLHAPATVCGPKKSTNLVKNKCVNFNFNGLTGTGVLTESNKKFLPFQQFGRDIADTTDAVRDPQTLEILDITPCSFGGVSVITPGTNTSNQVAVLYQGVNCTEVPVAIHADQLTPTWRVYSTGSNVFQTRAGCLIGAEHVNNSYECDIPIGAGICASYQTQTNSPRRARSVASQSIIAYTMSLGAENSVAYSNNSIACPTNFTISVTTEILPVSMTKTSVDCTMYICGDSTECSNLLLQYGSFCTQLNRALTGIAVEQDKNTQEVFAQVKQIYKTPPIKDFGGFNFSQILPDPSKPSKRSFIEDLLFNKVTLADAGFIKQYGDCLGDIAARDLICAQKFNGLTVLPPLLTDEMIAQYTSALLAGTITSGWTFGAGAALQIPFAMQMAYRFNGIGVTQNVLYENQKLIANQFNSAIGKIQDSLSSTASALGKLQDVVNQNAQALNTLVKQLSSNFGAISSVLNDILSRLDKVEAEVQIDRLITGRLQSLQTYVTQQLIRAAEIRASANLAATKMSECVLGQSKRVDFCGKGYHLMSFPQSAPHGVVFLHVTYVPAQEKNFTTAPAICHDGKAHFPREGVFVSNGTHWFVTQRNFCEPQIITTDNTFVSGNCDVVIGIVNNTVYDPLQPELDSFKEELDKYFKNHTSPDVDLGDISGINASVVNIQKEIDRLNEVAKNLNESLIDLQELGKYEQYIKGGGSGGGQIYEGKLTAEGLRFGIVASRFNHALVDRLVEGAIDAIVRHGGREEDITLVRVPGSWEIPVAAGELARKEDIDAVIAIGVLIRGATPHFDYIASEVSKGLADLSLELRKPITFGVITADTLEQAIERAGTKHGNKGWEAALSAIEMANLFKSLR

SEQ ID NO: 4035 - protein, 1371 aa, Artificial Sequence
  SARS-CoV-2/Wuhan/HBCDC-HB-02/2020__EPI_ISL_412978 spike protein (1-1211)(I714C_Y1110C) LumSynth construct
MFVFLVLLPLVSSQCVNLTTRTQLPPAYTNSFTRGVYYPDKVFRSSVLHSTQDLFLPFFSNVTWFHAIHVSGTNGTKRFDNPVLPFNDGVYFASTEKSNIIRGWIFGTTLDSKTQSLLIVNNATNVVIKVCEFQFCNDPFLGVYYHKNNKSWMESEFRVYSSANNCTFEYVSQPFLMDLEGKQGNFKNLREFVFKNIDGYFKIYSKHTPINLVRDLPQGFSALEPLVDLPIGINITRFQTLLALHRSYLTPGDSSSGWTAGAAAYYVGYLQPRTFLLKYNENGTITDAVDCALDPLSETKCTLKSFTVEKGIYQTSNFRVQPTESIVRFPNITNLCPFGEVFNATRFASVYAWNRKRISNCVADYSVLYNSASFSTFKCYGVSPTKLNDLCFTNVYADSFVIRGDEVRQIAPGQTGKIADYNYKLPDDFTGCVIAWNSNNLDSKVGGNYNYLYRLFRKSNLKPFERDISTEIYQAGSTPCNGVEGFNCYFPLQSYGFQPTNGVGYQPYRVVVLSFELLHAPATVCGPKKSTNLVKNKCVNFNFNGLTGTGVLTESNKKFLPFQQFGRDIADTTDAVRDPQTLEILDITPCSFGGVSVITPGTNTSNQVAVLYQDVNCTEVPVAIHADQLTPTWRVYSTGSNVFQTRAGCLIGAEHVNNSYECDIPIGAGICASYQTQTNSPRRARSVASQSIIAYTMSLGAENSVAYSNNSIACPTNFTISVTTEILPVSMTKTSVDCTMYICGDSTECSNFLLQYGSFCTQLNRALTGIAVEQDKNTQEVFAQVKQIYKTPPIKDFGGFNFSQILPDPSKPSKRSFIEDLLFNKVTLADAGFIKQYGDCLGDIAARDLICAQKFNGLTVLPPLLTDEMIAQYTSALLAGTITSGWTFGAGAALQIPFAMQMAYRFNGIGVTQNVLYENQKLIANQFNSAIGKIQDSLSSTASALGKLQDVVNQNAQALNTLVKQLSSNFGAISSVLNDILSRLDKVEAEVQIDRLITGRLQSLQTYVTQQLIRAAEIRASANLAATKMSECVLGQSKRVDFCGKGYHLMSFPQSAPHGVVFLHVTYVPAQEKNFTTAPAICHDGKAHFPREGVFVSNGTHWFVTQRNFCEPQIITTDNTFVSGNCDVVIGIVNNTVYDPLQPELDSFKEELDKYFKNHTSPDVDLGDISGINASVVNIQKEIDRLNEVAKNLNESLIDLQELGKYEQYIKGGGSGGGQIYEGKLTAEGLRFGIVASRFNHALVDRLVEGAIDAIVRHGGREEDITLVRVPGSWEIPVAAGELARKEDIDAVIAIGVLIRGATPHFDYIASEVSKGLADLSLELRKPITFGVITADTLEQAIERAGTKHGNKGWEAALSAIEMANLFKSLR

SEQ ID NO: 4036 - protein, 1371 aa, Artificial Sequence
  SARS-CoV-2/Australia/QLD02/2020__EPI_ISL_407896 spike protein (1-1211)(I714C_Y1110C) LumSynth construct
MFVFLVLLPLVSSQCVNLTTRTQLPPAYTNSFTRGVYYPDKVFRSSVLHSTQDLFLPFFSNVTWFHAIHVSGTNGTKRFDNPVLPFNDGVYFASTEKSNIIRGWIFGTTLDSKTQSLLIVNNATNVVIKVCEFQFCNDPFLGVYYHKNNKSWMESEFRVYSSANNCTFEYVSQPFLMDLEGKQGNFKNLREFVFKNIDGYFKIYSKHTPINLVRDLPQGFSALEPLVDLPIGINITRFQTLLALHRSYLTPGDSSSGWTAGAAAYYVGYLQPRTFLLKYNENGTITDAVDCALDPLSETKCTLKSFTVEKGIYQTSNFRVQPTESIVRFPNITNLCPFGEVFNATRFASVYAWNRKRISNCVADYSVLYNSASFSTFKCYGVSPTKLNDLCFTNVYADSFVIRGDEVRQIAPGQTGKIADYNYKLPDDFTGCVIAWNSNNLDSKVGGNYNYLYRLFRKSNLKPFERDISTEIYQAGSTPCNGVEGFNCYFPLQSYGFQPTNGVGYQPYRVVVLSFELLHAPATVCGPKKSTNLVKNKCVNFNFNGLTGTGVLTESNKKFLPFQQFGRDIADTTDAVRDPQTLEILDITPCSFGGVSVITPGTNTSNQVAVLYQDVNCTEVPVAIHADQLTPTWRVYSTGSNVFQTRAGCLIGAEHVNNSYECDIPIGAGICASYQTQTNSPRRARSVASQSIIAYTMSLGAENSVAYSNNSIACPTNFTISVTTEILPVSMTKTSVDCTMYICGDSTECSNLLLQYGSFCTQLNRALTGIAVEQDKNTQEVFAQVKQIYKTPPIKDFGGFNFSQILPDPSKPSKRSFIEDLLFNKVTLADAGFIKQYGDCLGDIAARDLICAQKFNGLTVLPPLLTDEMIAQYTSALLAGTITSGWTFGAGAALQIPFAMQMAYRFNGIGVTQNVLYENQKLIANQFNSAIGKIQDSLSSTASALGKLQDVVNQNAQALNTLVKQLSSNFGAISSVLNDILSRLDKVEAEVQIDRLITGRLQSLQTYVTQQLIRAAEIRASANLAATKMSECVLGQSKRVDFCGKGYHLMSFPQSAPHGVVFLHVTYVPAQEKNFTTAPAICHDGKAHFPREGVFVSNGTHWFVTQRNFCEPQIITTDNTFVSGNCDVVIGIVNNTVYDPLQLELDSFKEELDKYFKNHTSPDVDLGDISGINASVVNIQKEIDRLNEVAKNLNESLIDLQELGKYEQYIKGGGSGGGQIYEGKLTAEGLRFGIVASRFNHALVDRLVEGAIDAIVRHGGREEDITLVRVPGSWEIPVAAGELARKEDIDAVIAIGVLIRGATPHFDYIASEVSKGLADLSLELRKPITFGVITADTLEQAIERAGTKHGNKGWEAALSAIEMANLFKSLR

SEQ ID NO: 4037 - protein, 1371 aa, Artificial Sequence
  SARS-CoV-2/India/1-31/2020__EPI_ISL_413523 spike protein (1-1211)(I714C_Y1110C) LumSynth construct
MFVFLVLLPLVSSQCVNLTTRTQLPPAYTNSFTRGVYYPDKVFRSSVLHSTQDLFLPFFSNVTWFHAIHVSGTNGTKRFDNPVLPFNDGVYFASTEKSNIIRGWIFGTTLDSKTQSLLIVNNATNVVIKVCEFQFCNDPFLGVYYHKNNKSWMESEFRVYSSANNCTFEYVSQPFLMDLEGKQGNFKNLREFVFKNIDGYFKIYSKHTPINLVRDLPQGFSALEPLVDLPIGINITRFQTLLALHRSYLTPGDSSSGWTAGAAAYYVGYLQPRTFLLKYNENGTITDAVDCALDPLSETKCTLKSFTVEKGIYQTSNFRVQPTESIVRFPNITNLCPFGEVFNATRFASVYAWNRKRISNCVADYSVLYNSASFSTFKCYGVSPTKLNDLCFTNVYADSFVIRGDEVRQIAPGQTGKIADYNYKLPDDFTGCVIAWNSNNLDSKVGGNYNYLYRLFRKSNLKPFERDISTEIYQAGSTPCNGVEGFNCYFPLQSYGFQPTNGVGYQPYRVVVLSFELLHAPATVCGPKKSTNLVKNKCVNFNFNGLTGTGVLTESNKKFLPFQQFGRDIADTTDAVRDPQTLEILDITPCSFGGVSVITPGTNTSNQVAVLYQDVNCTEVPVAIHADQLTPTWRVYSTGSNVFQTRAGCLIGAEHVNNSYECDIPIGAGICASYQTQTNSPRRARSVASQSIIAYTMSLGAENSVAYSNNSIACPTNFTISVTTEILPVSMTKTSVDCTMYICGDSTECSNLLLQYGSFCTQLNRALTGIAVEQDKNTQEVFAQVKQIYKTPPIKDFGGFNFSQILPDPSKPSKRSFIEDLLFNKVTLADAGFIKQYGDCLGDIAARDLICAQKFNGLTVLPPLLTDEMIAQYTSALLAGTITSGWTFGAGAALQIPFAMQMAYRFNGIGVTQNVLYENQKLIANQFNSVIGKIQDSLSSTASALGKLQDVVNQNAQALNTLVKQLSSNFGAISSVLNDILSRLDKVEAEVQIDRLITGRLQSLQTYVTQQLIRAAEIRASANLAATKMSECVLGQSKRVDFCGKGYHLMSFPQSAPHGVVFLHVTYVPAQEKNFTTAPAICHDGKAHFPREGVFVSNGTHWFVTQRNFCEPQIITTDNTFVSGNCDVVIGIVNNTVYDPLQPELDSFKEELDKYFKNHTSPDVDLGDISGINASVVNIQKEIDRLNEVAKNLNESLIDLQELGKYEQYIKGGGSGGGQIYEGKLTAEGLRFGIVASRFNHALVDRLVEGAIDAIVRHGGREEDITLVRVPGSWEIPVAAGELARKEDIDAVIAIGVLIRGATPHFDYIASEVSKGLADLSLELRKPITFGVITADTLEQAIERAGTKHGNKGWEAALSAIEMANLFKSLR

SEQ ID NO: 4038 - protein, 1371 aa, Artificial Sequence
  SARS-CoV-2/Guangdong/GD2020087-P0008/2020__EPI_ISL_413863 spike protein (1-1211)(I714C_Y1110C) LumSynth construct
MFVFLVLLPLVSSQCVNLTTRTQLPPAYTNSFTRGVYYPDKVFRSSVLHSTQDLFLPFFSNVTWFHAIHVSGTNGTKRFDNPVLPFNDGVYFASTEKSNIIRGWIFGTTLDSKTQSLLIVNNATNVVIKVCEFQFCNDPFLGVYYHKNNKSWMESEFRVYSSANNCTFEYVSQPFLMDLEGKQGNFKNLREFVFKNIDGYFKIYSKHTPINLVRDLPQGFSALEPLVDLPIGINITRFQTLLALHRSYLTPGDSSSGWTAGAAAYYVGYLQPRTFLLKYNENGTITDAVDCALDPLSETKCTLKSFTVEKGIYQTSNFRVQPTESIVRFPNITNLCPFGEVFNATRFASVYAWNRKRISNCVADYSVLYNSASFSTFKCYGVSPTKLNDLCFTNVYADSFVIRGDEVREIAPGQTGKIADYNYKLPDDFTGCVIAWNSNNLDSKVGGNYNYLYRLFRKSNLKPFERDISTEIYQAGSTPCNGVEGFNCYFPLQSYGFQPTNGVGYQPYRVVVLSFELLHAPATVCGPKKSTNLVKNKCVNFNFNGLTGTGVLTESNKKFLPFQQFGRDIADTTDAVRDPQTLEILDITPCSFGGVSVITPGTNTSNQVAVLYQDVNCTEVPVAIHADQLTPTWRVYSTGSNVFQTRAGCLIGAEHVNNSYECDIPIGAGICASYQTQTNSPRRARSVASQSIIAYTMSLGAENSVAYSNNSIACPTNFTISVTTEILPVSMTKTSVDCTMYICGDSTECSNLLLQYGSFCTQLNRALTGIAVEQDKNTQEVFAQVKQIYKTPPIKDFGGFNFSQILPDPSKPSKRSFIEDLLFNKVTLADAGFIKQYGDCLGDIAARDLICAQKFNGLTVLPPLLTDEMIAQYTSALLAGTITSGWTFGAGAALQIPFAMQMAYRFNGIGVTQNVLYENQKLIANQFNSAIGKIQDSLSSTASALGKLQDVVNQNAQALNTLVKQLSSNFGAISSVLNDILSRLDKVEAEVQIDRLITGRLQSLQTYVTQQLIRAAEIRASANLAATKMSECVLGQSKRVDFCGKGYHLMSFPQSAPHGVVFLHVTYVPAQEKNFTTAPAICHDGKAHFPREGVFVSNGTHWFVTQRNFCEPQIITTDNTFVSGNCDVVIGIVNNTVYDPLQPELDSFKEELDKYFKNHTSPDVDLGDISGINASVVNIQKEIDRLNEVAKNLNESLIDLQELGKYEQYIKGGGSGGGQIYEGKLTAEGLRFGIVASRFNHALVDRLVEGAIDAIVRHGGREEDITLVRVPGSWEIPVAAGELARKEDIDAVIAIGVLIRGATPHFDYIASEVSKGLADLSLELRKPITFGVITADTLEQAIERAGTKHGNKGWEAALSAIEMANLFKSLR

SEQ ID NO: 4039 - protein, 1371 aa, Artificial Sequence
  SARS-CoV-2/Sweden/01/2020__EPI_ISL_411951 spike protein (1-1211)(I714C_Y1110C) LumSynth construct
MFVFLVLLPLVSSQCVNLTTRTQLPPAYTNSFTRGVYYPDKVFRSSVLHSTQDLFLPFFSNVTWFHAIHVSGTNGTKRFDNPVLPFNDGVYFASTEKSNIIRGWIFGTTLDSKTQSLLIVNNATNVVIKVCEFQFCNDPFLGVYYHKNNKSWMESEFRVYSSANNCTFEYVSQPFLMDLEGKQGNFKNLREFVFKNIDGYFKIYSKHTPINLVRDLPQGFSALEPLVDLPIGINITRFQTLLALHRSYLTPGDSSSGWTAGAAAYYVGYLQPRTFLLKYNENGTITDAVDCALDPLSETKCTLKSFTVEKGIYQTSNFRVQPTESIVRFPNITNLCPFGEVFNATRFASVYAWNRKRISNCVADYSVLYNSASFSTFKCYGVSPTKLNDLCFTNVYADSFVIRGDEVRQIAPGQTGKIADYNYKLPDDFTGCVIAWNSNNLDSKVGGNYNYLYRLFRKSNLKPFERDISTEIYQAGSTPCNGVEGFNCYFPLQSYGFQPTNGVGYQPYRVVVLSFELLHAPATVCGPKKSTNLVKNKCVNFNFNGLTGTGVLTESNKKFLPFQQFGRDIADTTDAVRDPQTLEILDITPCSFGGVSVITPGTNTSNQVAVLYQDVNCTEVPVAIHADQLTPTWRVYSTGSNVFQTRAGCLIGAEHVNNSYECDIPIGAGICASYQTQTNSPRRARSVASQSIIAYTMSLGAENSVAYSNNSIACPTNFTISVTTEILPVSMTKTSVDCTMYICGDSTECSNLLLQYGSFCTQLNRALTGIAVEQDKNTQEVFAQVKQIYKTPPIKDCGGFNFSQILPDPSKPSKRSFIEDLLFNKVTLADAGFIKQYGDCLGDIAARDLICAQKFNGLTVLPPLLTDEMIAQYTSALLAGTITSGWTFGAGAALQIPFAMQMAYRFNGIGVTQNVLYENQKLIANQFNSAIGKIQDSLSSTASALGKLQDVVNQNAQALNTLVKQLSSNFGAISSVLNDILSRLDKVEAEVQIDRLITGRLQSLQTYVTQQLIRAAEIRASANLAATKMSECVLGQSKRVDFCGKGYHLMSFPQSAPHGVVFLHVTYVPAQEKNFTTAPAICHDGKAHFPREGVFVSNGTHWFVTQRNFCEPQIITTDNTFVSGNCDVVIGIVNNTVYDPLQPELDSFKEELDKYFKNHTSPDVDLGDISGINASVVNIQKEIDRLNEVAKNLNESLIDLQELGKYEQYIKGGGSGGGQIYEGKLTAEGLRFGIVASRFNHALVDRLVEGAIDAIVRHGGREEDITLVRVPGSWEIPVAAGELARKEDIDAVIAIGVLIRGATPHFDYIASEVSKGLADLSLELRKPITFGVITADTLEQAIERAGTKHGNKGWEAALSAIEMANLFKSLR

SEQ ID NO: 4040 - protein, 1371 aa, Artificial Sequence
  SARS-CoV-2/Tianmen/HBCDC-HB-07/2020__EPI_ISL_412983 spike protein (1-1211)(I714C_Y1110C) LumSynth construct
MFVFLVLLPLVSSQCVNLTTRTQLPPAYTNSFTRGVYYPDKVFRSSVLHSTQDLFLPFFSNVTWFHAIHVSGTNGTKRFDNPVLPFNDGVYFASTEKSNIIRGWIFGTTLDSKTQSLLIVNNATNVVIKVCEFQFCNDPFLGVYYHKNNKSWMESEFRVYSSANNCTFEYVSQPFLMDLEGKQGNFKNLREFVFKNIDGYFKIYSKHTPINLVRDLPQGFSALEPLVDLPIGINITRFQTLLALHRSYLTPGDSSSGWTAGAAAYYVGYLQPRTFLLKYNENGTITDAVDCALDPLSETKCTLKSFTVEKGIYQTSNFRVQPTESIVRFPNITNLCPFGEVFNATRFASVYAWNRKRISNCVADYSVLYNSASFSTFKCYGVSPTKLNDLCFTNVYADSFVIRGDEVRQIAPGQTGKIADYNYKLPDDFTGCVIAWNSNNLDSKVGGNYNYLYRLFRKSNLKPFERDISTEIYQAGSTPCNGVEGFNCYFPLQSYGFQPTNGVGYQPYRVVVLSFELLHAPATVCGPKKSTNLVKNKCVNFNFNGLTGTGVLTESNKKFLPFQQFGRDIADTTDAVRDPQTLEILDITPCSFGGVSVITPGTNTSNQVAVLYQDLNCTEVPVAIHADQLTPTWRVYSTGSNVFQTRAGCLIGAEHVNNSYECDIPIGAGICASYQTQTNSPRRARSVASQSIIAYTMSLGAENSVAYSNNSIACPTNFTISVTTEILPVSMTKTSVDCTMYICGDSTECSNLLLQYGSFCTQLNRALTGIAVEQDKNTQEVFAQVKQIYKTPPIKDFGGFNFSQILPDPSKPSKRSFIEDLLFNKVTLADAGFIKQYGDCLGDIAARDLICAQKFNGLTVLPPLLTDEMIAQYTSALLAGTITSGWTFGAGAALQIPFAMQMAYRFNGIGVTQNVLYENQKLIANQFNSAIGKIQDSLSSTASALGKLQDVVNQNAQALNTLVKQLSSNFGAISSVLNDILSRLDKVEAEVQIDRLITGRLQSLQTYVTQQLIRAAEIRASANLAATKMSECVLGQSKRVDFCGKGYHLMSFPQSAPHGVVFLHVTYVPAQEKNFTTAPAICHDGKAHFPREGVFVSNGTHWFVTQRNFCEPQIITTDNTFVSGNCDVVIGIVNNTVYDPLQPELDSFKEELDKYFKNHTSPDVDLGDISGINASVVNIQKEIDRLNEVAKNLNESLIDLQELGKYEQYIKGGGSGGGQIYEGKLTAEGLRFGIVASRFNHALVDRLVEGAIDAIVRHGGREEDITLVRVPGSWEIPVAAGELARKEDIDAVIAIGVLIRGATPHFDYIASEVSKGLADLSLELRKPITFGVITADTLEQAIERAGTKHGNKGWEAALSAIEMANLFKSLR

SEQ ID NO: 4041 - protein, 1371 aa, Artificial Sequence
  SARS-CoV-2/Hong Kong/case42_VM20002493/2020__EPI_ISL_414527 spike protein (1-1211)(I714C_Y1110C) LumSynth construct
MFVFLVLLPLVSSQCVNLTTRTQLPPAYTNSFTRGVYYPDKVFRSSVLHSTQDLFLPFFSNVTWFHAIHVSGTNGTKRFDNPVLPFNDGVYFASTEKSNIIRGWIFGTTLDSKTQSLLIVNNATNVVIKVCEFQFCNDPFLGVYYHKNNKSWMESEFRVYSSANNCTFEYVSQPFLMDLEGKQGNFKNLREFVFKNIDGYFKIYSKHTPINLVRDLPQGFSALEPLVDLPIGINITRFQTLLALHRSYLTPGDSSSGWTAGAAAYYVGYLQPRTFLLKYNENGTITDAVDCALDPLSETKCTLKSFTVEKGIYQTSNFRVQPTESIVRFPNITNLCPFGEVFNATRFASVYAWNRKRISNCVADYSVLYNSASFSTFKCYGVSPTKLNDLCFTNVYADSFVIRGDEVRQIAPGQTGKIADYNYKLPDDFTGCVIAWNSNNLDSKVGGNYNYLYRLFRKSNLKPFERDISTEIYQAGSTPCNGVEGFNCYFPLQSYGFQPTNGVGYQPYRVVVLSFELLHAPATVCGPKKSTNLVKNKCVNFNFNGLTGTGVLTESNKKFLPFQQFGRDIADTTDAVRDPQTLEILDITPCSFGGVSVITPGTNTSNQVAVLYQDVNCTEVPVAIHADQLTPTWRVYSTGSNVFQTRAGCLIGAEHVNNSYECDIPIGAGICASYQTQTNSPRRARSVASQSIIAYTMSLGAENSVAYSNNSIACPTNFAISVTTEILPVSMTKTSVDCTMYICGDSTECSNLLLQYGSFCTQLNRALTGIAVEQDKNTQEVFAQVKQIYKTPPIKDFGGFNFSQILPDPSKPSKRSFIEDLLFNKVTLADAGFIKQYGDCLGDIAARDLICAQKFNGLTVLPPLLTDEMIAQYTSALLAGTITSGWTFGAGAALQIPFAMQMAYRFNGIGVTQNVLYENQKLIANQFNSAIGKIQDSLSSTASALGKLQDVVNQNAQALNTLVKQLSSNFGAISSVLNDILSRLDKVEAEVQIDRLITGRLQSLQTYVTQQLIRAAEIRASANLAATKMSECVLGQSKRVDFCGKGYHLMSFPQSAPHGVVFLHVTYVPAQEKNFTTAPAICHDGKAHFPREGVFVSNGTHWFVTQRNFCEPQIITTDNTFVSGNCDVVIGIVNNTVYDPLQPELDSFKEELDKYFKNHTSPDVDLGDISGINASVVNIQKEIDRLNEVAKNLNESLIDLQELGKYEQYIKGGGSGGGQIYEGKLTAEGLRFGIVASRFNHALVDRLVEGAIDAIVRHGGREEDITLVRVPGSWEIPVAAGELARKEDIDAVIAIGVLIRGATPHFDYIASEVSKGLADLSLELRKPITFGVITADTLEQAIERAGTKHGNKGWEAALSAIEMANLFKSLR

SEQ ID NO: 4042 - protein, 1371 aa, Artificial Sequence
  SARS-CoV-2/USA/CruiseA-23/2020__EPI_ISL_414482 spike protein (1-1211)(I714C_Y1110C) LumSynth construct
MFVFLVLLPLVSSQCVNLTTRTQLPPAYTNSFTRGVYYPDKVFRSSVLHSTQDLFLPFFSNVTWFHAIHVSGTNGTKRFDNPVLPFNDGVYFASTEKSNIIRGWIFGTTLDSKTQSLLIVNNATNVVIKVCEFQFCNDPFLGVYYHKNNKSWMESEFRVYSSANNCTFEYVSQPFLMDLEVKQGNFKNLREFVFKNIDGYFKIYSKHTPINLVRDLPQGFSALEPLVDLPIGINITRFQTLLALHRSYLTPGDSSSGWTAGAAAYYVGYLQPRTFLLKYNENGTITDAVDCALDPLSETKCTLKSFTVEKGIYQTSNFRVQPTESIVRFPNITNLCPFGEVFNATRFASVYAWNRKRISNCVADYSVLYNSASFSTFKCYGVSPTKLNDLCFTNVYADSFVIRGDEVRQIAPGQTGKIADYNYKLPDDFTGCVIAWNSNNLDSKVGGNYNYLYRLFRKSNLKPFERDISTEIYQAGSTPCNGVEGFNCYFPLQSYGFQPTNGVGYQPYRVVVLSFELLHAPATVCGPKKSTNLVKNKCVNFNFNGLTGTGVLTESNKKFLPFQQFGRDIADTTDAVRDPQTLEILDITPCSFGGVSVITPGTNTSNQVAVLYQDVNCTEVPVAIHADQLTPTWRVYSTGSNVFQTRAGCLIGAEHVNNSYECDIPIGAGICASYQTQTNSPRRARSVASQSIIAYTMSLGAENSVAYSNNSIACPTNFTISVTTEILPVSMTKTSVDCTMYICGDSTECSNLLLQYGSFCTQLNRALTGIAVEQDKNTQEVFAQVKQIYKTPPIKDFGGFNFSQILPDPSKPSKRSFIEDLLFNKVTLADAGFIKQYGDCLGDIAARDLICAQKFNGLTVLPPLLTDEMIAQYTSALLAGTITSGWTFGAGAALQIPFAMQMAYRFNGIGVTQNVLYENQKLIANQFNSAIGKIQDSLSSTASALGKLQDVVNQNAQALNTLVKQLSSNFGAISSVLNDILSRLDKVEAEVQIDRLITGRLQSLQTYVTQQLIRAAEIRASANLAATKMSECVLGQSKRVDFCGKGYHLMSFPQSAPHGVVFLHVTYVPAQEKNFTTAPAICHDGKAHFPREGVFVSNGTHWFVTQRNFCEPQIITTDNTFVSGNCDVVIGIVNNTVYDPLQPELDSFKEELDKYFKNHTSPDVDLGDISGINASVVNIQKEIDRLNEVAKNLNESLIDLQELGKYEQYIKGGGSGGGQIYEGKLTAEGLRFGIVASRFNHALVDRLVEGAIDAIVRHGGREEDITLVRVPGSWEIPVAAGELARKEDIDAVIAIGVLIRGATPHFDYIASEVSKGLADLSLELRKPITFGVITADTLEQAIERAGTKHGNKGWEAALSAIEMANLFKSLR

SEQ ID NO: 4043 - protein, 1371 aa, Artificial Sequence
  SARS-CoV-2/Hong Kong/case85_VM20002868/2020__EPI_ISL_414519 spike protein (1-1211)(I714C_Y1110C) LumSynth construct
MFVFLVLVPLVSSQCVNLTTRTQLPPAYTNSFTRGVYYPDKVFRSSVLHSTQDLFLPFFSNVTWFHAIHVSGTNGTKRFDNPVLPFNDGVYFASTEKSNIIRGWIFGTTLDSKTQSLLIVNNATNVVIKVCEFQFCNDPFLGVYYHKNNKSWMESEFRVYSSANNCTFEYVSQPFLMDLEGKQGNFKNLREFVFKNIDGYFKIYSKHTPINLVRDLPQGFSALEPLVDLPIGINITRFQTLLALHRSYLTPGDSSSGWTAGAAAYYVGYLQPRTFLLKYNENGTITDAVDCALDPLSETKCTLKSFTVEKGIYQTSNFRVQPTESIVRFPNITNLCPFGEVFNATRFASVYAWNRKRISNCVADYSVLYNSASFSTFKCYGVSPTKLNDLCFTNVYADSFVIRGDEVRQIAPGQTGKIADYNYKLPDDFTGCVIAWNSNNLDSKVGGNYNYLYRLFRKSNLKPFERDISTEIYQAGSTPCNGVEGFNCYFPLQSYGFQPTNGVGYQPYRVVVLSFELLHAPATVCGPKKSTNLVKNKCVNFNFNGLTGTGVLTESNKKFLPFQQFGRDIADTTDAVRDPQTLEILDITPCSFGGVSVITPGTNTSNQVAVLYQDVNCTEVPVAIHADQLTPTWRVYSTGSNVFQTRAGCLIGAEHVNNSYECDIPIGAGICASYQTQTNSPRRARSVASQSIIAYTMSLGAENSVAYSNNSIACPTNFTISVTTEILPVSMTKTSVDCTMYICGDSTECSNLLLQYGSFCTQLNRALTGIAVEQDKNTQEVFAQVKQIYKTPPIKDFGGFNFSQILPDPSKPSKRSFIEDLLFNKVTLADAGFIKQYGDCLGDIAARDLICAQKFNGLTVLPPLLTDEMIAQYTSALLAGTITSGWTFGAGAALQIPFAMQMAYRFNGIGVTQNVLYENQKLIANQFNSAIGKIQDSLSSTASALGKLQDVVNQNAQALNTLVKQLSSNFGAISSVLNDILSRLDKVEAEVQIDRLITGRLQSLQTYVTQQLIRAAEIRASANLAATKMSECVLGQSKRVDFCGKGYHLMSFPQSAPHGVVFLHVTYVPAQEKNFTTAPAICHDGKAHFPREGVFVSNGTHWFVTQRNFCEPQIITTDNTFVSGNCDVVIGIVNNTVYDPLQPELDSFKEELDKYFKNHTSPDVDLGDISGINASVVNIQKEIDRLNEVAKNLNESLIDLQELGKYEQYIKGGGSGGGQIYEGKLTAEGLRFGIVASRFNHALVDRLVEGAIDAIVRHGGREEDITLVRVPGSWEIPVAAGELARKEDIDAVIAIGVLIRGATPHFDYIASEVSKGLADLSLELRKPITFGVITADTLEQAIERAGTKHGNKGWEAALSAIEMANLFKSLR

SEQ ID NO: 4044 - protein, 1371 aa, Artificial Sequence; identical to SEQ ID NO: 4034
  SARS-CoV-2/England/200990660/2020__EPI_ISL_414523 spike protein (1-1211)(I714C_Y1110C) LumSynth construct

SEQ ID NO: 4045 - protein, 1371 aa, Artificial Sequence
  SARS-CoV-2/Australia/NSW09/2020__EPI_ISL_413595 spike protein (1-1211)(I714C_Y1110C) LumSynth construct
MFVFLVLLPLVSSQCVNLTTRTQLPPAYTNSFTRGVYYPDKVFRSSVLHSTQDLFLPFFSNVTWFHAIHVSGTNGTKRFDNPVLPFNDGVYFASTEKSNIIRGWIFGTTLDSKTQSLLIVNNATNVVIKVCEFQFCNDPFLGVYYHKNNKSWMESEFRVYSSANNCTFEYVSQPFLMDLEGKQGNFKNLREFVFKNIDGYFKIYSKHTPINLVRDLPQGFSALEPLVDLPIGINITRFQTLLALHRSYLTPGDSSSGWTAGAAAYYVGYLQPRTFLLKYNENGTITDAVDCALDPLSETKCTLKSFTVEKGIYQTSNFRVQPTESIVRFPNITNLCPFGEVFNATRFASVYAWNRKRISNCVADYSVLYNSASFSTFKCYGVSPTKLNDLCFTNVYADSFVIRGDEVRQIAPGQTGKIADYNYKLPDDFTGCVIAWNSNNLDSKVGGNYNYLYRLFRKSNLKPFERDISTEIYQAGSTPCNGVEGFNCYFPLQSYGFQPTNGVGYQPYRVVVLSFELLHAPATVCGPKKSTNLVKNKCVNFNFNGLTGTGVLTESNKKFLPFQQFGRDIADTTDAVRDPQTLEILDITPCSFGGVSVITPGTNTSNQVAVLYQDVNCTEVPVAIHADQLTPTWRVYSTGSNVFQTRAGCLIGAEHVNNSYECDIPIGAGICASYQTQTNSPRRARSVASQSIIAYTMSLGAENSVAYSNNSIACPTNFTISVTTEILPVSMTKTSVDCTMYICGDSTECSNLLLQYGSFCTQLNRALTGIAVEQDKNTQEVFAQVKQIYKTPPIKDFGGFNFSQILPDPSKPSKRSFIEDLLFNKVTLADAGFIKQYGDCLGDIAARDLICAQKFNGLTVLPPLLTDEMIAQYTSALLAGTITSGWTFGAGAALQIPFAMQMAYRFNGIGVTQNVLYENQKLIANQFNSAIGKIQDSLSFTASALGKLQDVVNQNAQALNTLVKQLSSNFGAISSVLNDILSRLDKVEAEVQIDRLITGRLQSLQTYVTQQLIRAAEIRASANLAATKMSECVLGQSKRVDFCGKGYHLMSFPQSAPHGVVFLHVTYVPAQEKNFTTAPAICHDGKAHFPREGVFVSNGTHWFVTQRNFCEPQIITTDNTFVSGNCDVVIGIVNNTVYDPLQPELDSFKEELDKYFKNHTSPDVDLGDISGINASVVNIQKEIDRLNEVAKNLNESLIDLQELGKYEQYIKGGGSGGGQIYEGKLTAEGLRFGIVASRFNHALVDRLVEGAIDAIVRHGGREEDITLVRVPGSWEIPVAAGELARKEDIDAVIAIGVLIRGATPHFDYIASEVSKGLADLSLELRKPITFGVITADTLEQAIERAGTKHGNKGWEAALSAIEMANLFKSLR

SEQ ID NO: 4046 - protein, 1371 aa, Artificial Sequence; identical to SEQ ID NO: 4026
  SARS-CoV-2/Australia/NSW10/2020__EPI_ISL_413596 spike protein (1-1211)(I714C_Y1110C) LumSynth construct

SEQ ID NO: 4047 - protein, 1371 aa, Artificial Sequence
  SARS-CoV-2/Switzerland/1000477797/2020__EPI_ISL_413023 spike protein (1-1211)(I714C_Y1110C) LumSynth construct
MFVFLVLLPLVSSQCVNLTTRTQLPPAYTNSFTRGVYYPDKVFRSSVLHSTQDLFLPFFSNVTWFHAIHVSGTNGTKRFDNPVLPFNDGVYFASTEKSNIIRGWIFGTTLDSKTQSLLIVNNATNVVIKVCEFQFCNDPFLGVYYHKNNKSWMESEFRVYSSANNCTFEYVSQPFLMDLEGKQGNFKNLREFVFKNIDGYFNIYSKHTPINLVRDLPQGFSALEPLVDLPIGINITRFQTLLALHRSYLTPGDSSSGWTAGAAAYYVGYLQPRTFLLKYNENGTITDAVDCALDPLSETKCTLKSFTVEKGIYQTSNFRVQPTESIVRFPNITNLCPFGEVFNATRFASVYAWNRKRISNCVADYSVLYNSASFSTFKCYGVSPTKLNDLCFTNVYADSFVIRGDEVRQIAPGQTGKIADYNYKLPDDFTGCVIAWNSNNLDSKVGGNYNYLYRLFRKSNLKPFERDISTEIYQAGSTPCNGVEGFNCYFPLQSYGFQPTNGVGYQPYRVVVLSFELLHAPATVCGPKKSTNLVKNKCVNFNFNGLTGTGVLTESNKKFLPFQQFGRDIADTTDAVRDPQTLEILDITPCSFGGVSVITPGTNTSNQVAVLYQGVNCTEVPVAIHADQLTPTWRVYSTGSNVFQTRAGCLIGAEHVNNSYECDIPIGAGICASYQTQTNSPRRARSVASQSIIAYTMSLGAENSVAYSNNSIACPTNFTISVTTEILPVSMTKTSVDCTMYICGDSTECSNLLLQYGSFCTQLNRALTGIAVEQDKNTQEVFAQVKQIYKTPPIKDFGGFNFSQILPDPSKPSKRSFIEDLLFNKVTLADAGFIKQYGDCLGDIAARDLICAQKFNGLTVLPPLLTDEMIAQYTSALLAGTITSGWTFGAGAALQIPFAMQMAYRFNGIGVTQNVLYENQKLIANQFNSAIGKIQDSLSSTASALGKLQDVVNQNAQALNTLVKQLSSNFGAISSVLNDILSRLDKVEAEVQIDRLITGRLQSLQTYVTQQLIRAAEIRASANLAATKMSECVLGQSKRVDFCGKGYHLMSFPQSAPHGVVFLHVTYVPAQEKNFTTAPAICHDGKAHFPREGVFVSNGTHWFVTQRNFCEPQIITTDNTFVSGNCDVVIGIVNNTVYDPLQPELDSFKEELDKYFKNHTSPDVDLGDISGINASVVNIQKEIDRLNEVAKNLNESLIDLQELGKYEQYIKGGGSGGGQIYEGKLTAEGLRFGIVASRFNHALVDRLVEGAIDAIVRHGGREEDITLVRVPGSWEIPVAAGELARKEDIDAVIAIGVLIRGATPHFDYIASEVSKGLADLSLELRKPITFGVITADTLEQAIERAGTKHGNKGWEAALSAIEMANLFKSLR

SEQ ID NO: 4048 - protein, 1371 aa, Artificial Sequence
  SARS-CoV-2/Belgium/BA-02291/2020__EPI_ISL_415159 spike protein (1-1211)(I714C_Y1110C) LumSynth construct
MFVFLVLLPLVSSQCVNLTTRTQLPPAYTNSFTRGVYYPDKVFRSSVLHSTQDLFLPFFSNVTWFHAIHVSGTNGTKRFDNPVLPFNDGVYFASTEKSNIIRGWIFGTTLDSKTQSLLIVNNATNVVIKVCEFQFCNDPFLGVYYHKNNKSWMESEFRVYSSANNCTFEYVSQPFLMDLEGKQGNFKNLREFVFKNIDGYFKIYSKHTPINLVRDLPQGFSALEPLVDLPIGINITRFQTLLALHRSYLTPGDSSSGWTAGAAAYYVGYLQPRTFLLKYNENGTITDAVDCALDPLSETKCTLKSFTVEKGIYQTSNFRVQPTESIVRFPNITNLCPFGEVFNATRFASVYAWNRKRISNCVADYSVLYNSASFSTFKCYGVSPTKLNDLCFTNVYADSFVIRGDEVRQIAPGQTGKIADYNYKLPDDFTGCVIAWNSNNLDSKVGGNYNYLYRLFRRSNLKPFERDISTEIYQAGSTPCNGVEGFNCYFPLQSYGFQPTNGVGYQPYRVVVLSFELLPAPATVCGPKKSTNLVKNKCVNFNFNGLTGTGVLTESNKKFLPFQQFGRDIADTTDAVRDPQTLEILDITPCSFGGVSVITPGTNTSNQVAVLYQGVNCTEVPVAIHADQLTPTWRVYSTGSNVFQTRAGCLIGAEHVNNSYECDIPIGAGICASYQTQTNSPRRARSVASQSIIAYTMSLGAENSVAYSNNSIACPTNFTISVTTEILPVSMTKTSVDCTMYICGDSTECSNLLLQYGSFCTQLNRALTGIAVEQDKNTQEVFAQVKQIYKTPPIKDFGGFNFSQILPDPSKPSKRSFIEDLLFNKVTLADAGFIKQYGDCLGDIAARDLICAQKFNGLTVLPPLLTDEMIAQYTSALLAGTITSGWTFGAGAALQIPFAMQMAYRFNGIGVTQNVLYENQKLIANQFNSAIGKIQDSLSSAAPALGKLQDVVNQNAQALNTLVKQLSSNFGAISSVLNDILSRLDKVEAEVQIDRLITGRLQSLQTYVTQQLIRAAEIRASANLAATKMSECVLGQSKRVDFCGKGYHLMSFPQSAPHGVVFLHVTYVPAQEKNFTTAPAICHDGKAHFPREGVFVSNGTHWFVTQRNFCEPQIITTDNTFVSGNCDVVIGIVNNTVYDPLQPELDSFKEELDKYFKNHTSPDVDLGDISGINASVVNIQKEIDRLNEVAKNLNESLIDLQELGKYEQYIKGGGSGGGQIYEGKLTAEGLRFGIVASRFNHALVDRLVEGAIDAIVRHGGREEDITLVRVPGSWEIPVAAGELARKEDIDAVIAIGVLIRGATPHFDYIASEVSKGLADLSLELRKPITFGVITADTLEQAIERAGTKHGNKGWEAALSAIEMANLFKSLR

SEQ ID NO: 4049 - protein, 1371 aa, Artificial Sequence
  SARS-CoV-2/USA/WA8-UW5/2020__EPI_ISL_413486 spike protein (1-1211)(I714C_Y1110C) LumSynth construct
MFVFLVLLPLVSSQCVNLTTRTQLPPAYTNSFTRGVYYPDKVFRSSVLHSTQDLFLPFFSNVTWFHAIHVSGTNGTKRFDNPVLPFNDGVYFASTEKSNIIRGWIFGTTLDSKTQSLLIVNNATNVVIKVCEFQFCNDPFLGVYYHKNNKSWMESEFRVYSSANNCTFEYVSQPFLMDLEGKQGNFKNLREFVFKNIDGYFKIYSKHTPINLVRDLPQGFSALEPLVDLPIGINITRFQTLLALHRSYLTPGDSSSGWTAGAAAYYVGYLQPRTFLLKYNENGTITDAVDCALDPLSETKCTLKSFTVEKGIYQTSNFRVQPTESIVRFPNITNLCPFGEVFNATRFASVYAWNRKRISNCVADYSVLYNSASFSTFKCYGVSPTKLNDLCFTNVYADSFVIRGDEVRQIAPGQTGKIADYNYKLPDDFTGCVIAWNSNNLDSKVGGNYNYLYRLFRKSNLKPFERDISTEIYQAGSTPCNGVEGFNCYFPLQSYGFQPTNGVGYQPYRVVVLSFELLHAPATVCGPKKSTNLVKNKCVNFNFNGLTGTGVLTESNKKFLPFQQFGRDIADTTDAVRDPQTLEILDITPCSFGGVSVITPGTNTSNQVAVLYQDVNCTEVPVAIHADQLTPTWRVYSTGSNVFQTRAGCLIGAEYVNNSYECDIPIGAGICASYQTQTNSPRRARSVASQSIIAYTMSLGAENSVAYSNNSIACPTNFTISVTTEILPVSMTKTSVDCTMYICGDSTECSNLLLQYGSFCTQLNRALTGIAVEQDKNTQEVFAQVKQIYKTPPIKDFGGFNFSQILPDPSKPSKRSFIEDLLFNKVTLADAGFIKQYGDCLGDIAARDLICAQKFNGLTVLPPLLTDEMIAQYTSALLAGTITSGWTFGAGAALQIPFAMQMAYRFNGIGVTQNVLYENQKLIANQFNSAIGKIQDSLSSTASALGKLQDVVNQNAQALNTLVKQLSSNFGAISSVLNDILSRLDKVEAEVQIDRLITGRLQSLQTYVTQQLIRAAEIRASANLAATKMSECVLGQSKRVDFCGKGYHLMSFPQSAPHGVVFLHVTYVPAQEKNFTTAPAICHDGKAHFPREGVFVSNGTHWFVTQRNFCEPQIITTDNTFVSGNCDVVIGIVNNTVYDPLQPELDSFKEELDKYFKNHTSPDVDLGDISGINASVVNIQKEIDRLNEVAKNLNESLIDLQELGKYEQYIKGGGSGGGQIYEGKLTAEGLRFGIVASRFNHALVDRLVEGAIDAIVRHGGREEDITLVRVPGSWEIPVAAGELARKEDIDAVIAIGVLIRGATPHFDYIASEVSKGLADLSLELRKPITFGVITADTLEQAIERAGTKHGNKGWEAALSAIEMANLFKSLR

SEQ ID NO: 4050 - protein, 1371 aa, Artificial Sequence
  SARS-CoV-2/England/20102000506/2020__EPI_ISL_415147 spike protein (1-1211)(I714C_Y1110C) LumSynth construct
MFVFLVLLPLVSSQCVNLTTRTQLPPAYTNSFTRGVYYPDKVFRSSVLHSTQDLFLPFFSNVTWFHAIHVSGTNGTKRFDNPVLPFNDGVYFASTEKSNIIRGWIFGTTLDSKTQSLLIVNNATNVVIKVCEFQFCNDPFLGVYYHKNNKSWMESEFRVYSSANNCTFEYVSQPFLMDLEGKQGNFKNLREFVFKNIDGYFKIYSKHTPINLVRDLPQGFSALEPLVDLPIGINITRFQTLLALHRSYLTPGDSSSGWTAGAAAYYVGYLQPRTFLLKYNENGTITDAVDCALDPLSETKCTLKSFTVEKGIYQTSNFRVQPTESIVRFPNITNLCPFGEVFNATRFASVYAWNRKRISNCVADYSVLYNSASFSTFKCYGVSPTKLNDLCFTNVYADSFVIRGDEVRQIAPGQTGKIADYNYKLPDDFTGCVIAWNSNNLDSKVGGNYNYLYRLFRKSNLKPFERDISTEIYQAGSTPCNGVEGFNCYFPLQSYGFQPTNGVGYQPYRVVVLSFELLHAPATVCGPKKSTNLVKNKCVNFNFNGLTGTGVLTESNKKFLPFQQFGRDIADTTDAVRDPQTLEILDITPCSFGGVSVITPGTNTSNQVAVLYQGVNCTEVPVAIHADQLTPTWRVYSTGSNVFQTRAGCLIGAEHVNNSYECDIPIGAGICASYQTQTNSPRRARSVASQSIIAYTMSLGAENSVAYSNNSIACPTNFTISVTTEILPVSMTKTSVDCTMYICGDSTECSNLLLQYGSFCTQLNRALTGIAVEQDKNTQEVFAQVKQIYKTPPIKDFGGFNFSQILPDPSKPSKRSFIEDLLFNKVTLADAGFIKQYGYCLGDIAARDLICAQKFNGLTVLPPLLTDEMIAQYTSALLAGTITSGWTFGAGAALQIPFAMQMAYRFNGIGVTQNVLYENQKLIANQFNSAIGKIQDSLSSTASALGKLQDVVNQNAQALNTLVKQLSSNFGAISSVLNDILSRLDKVEAEVQIDRLITGRLQSLQTYVTQQLIRAAEIRASANLAATKMSECVLGQSKRVDFCGKGYHLMSFPQSAPHGVVFLHVTYVPAQEKNFTTAPAICHDGKAHFPREGVFVSNGTHWFVTQRNFCEPQIITTDNTFVSGNCDVVIGIVNNTVYDPLQPELDSFKEELDKYFKNHTSPDVDLGDISGINASVVNIQKEIDRLNEVAKNLNESLIDLQELGKYEQYIKGGGSGGGQIYEGKLTAEGLRFGIVASRFNHALVDRLVEGAIDAIVRHGGREEDITLVRVPGSWEIPVAAGELARKEDIDAVIAIGVLIRGATPHFDYIASEVSKGLADLSLELRKPITFGVITADTLEQAIERAGTKHGNKGWEAALSAIEMANLFKSLR

SEQ ID NO: 4051 - protein, 1371 aa, Artificial Sequence
  SARS-CoV-2/Belgium/VAG-03013/2020__EPI_ISL_415155 spike protein (1-1211)(I714C_Y1110C) LumSynth construct
MFVFLVLLPLVSSQCVNLTTRTQLPPAYTNSFTRGVYYPDKVFRSSVLHSTQDLFLPFFSNVTWFHAIHVSGTNGTKRFDNPVLPFNDGVYFASTEKSNIIRGWIFGTTLDSKTQSLLIVNNATNVVIKVCEFQFCNDPFLGVYYHKNNKSWMESEFRVYSSANNCTFEYVSQPFLMDLEGKQGNFKNLREFVFKNIDGYFKIYSKHTPINLVRDLPQGFSALEPLVDLPIGINITRFQTLLALHRSYLTPGDSSSGWTAGAAAYYVGYLQPRTFLLKYNENGTITDAVDCALDPLSETKCTLKSFTVEKGIYQTSNFRVQPTESIVRFPNITNLCPFGEVFNATRFASVYAWNRKRISNCVADYSVLYNSASFSTFKCYGVSPTKLNDLCFTNVYADSFVIRGDEVRQIAPGQTGKIADYNYKLPDDFTGCVIAWNSNNLDSKVGGNYNYLYRLFRKSNLKPFERDISTEIYQAGSTPCNGVEGFNCYFPLQSYGFQPTNGVGYQPYRVVVLSFELLHAPATVCGPKKSTNLVKNKCVNFNFNGLTGTGVLTESNKKFLPFQQFGRDIADTTDAVRDPQTLEILDITPCSFGGVSVITPGTNTSNQVAVLYQGVNCTEVPVAIHADQLTPTWRVYSTGSNVFQTRAGCLIGAEHVNNSYECDIPIGAGICASYQTQTNSPRRARSVASQSIIAYTMSLGAENSVAYSNNSIACPTNFTISVTTEILPVSMTKTSVDCTMYICGDSTECSNLLLQYGSFCTQLNRALTGIAVEQDKNTQEVFAQVKQIYKTPPIKDFGGFNFSQILPDPSKPSKRSFIEDLLFNKVTLADAGFIKQYGDCLGDIAARDLICAQKFNGLTVLPPLLTDEMIAQYTSALLAGTITSGWTFGAGAALQIPFAMQMAYRFNGIGVTQNVLYENQKLIANQFNSAIGKIQDSLSSTATALGKLQDVVNQNAQALNTLVKQLSSNFGAISSVLNDILSRLDKVEAEVQIDRLITGRLQSLQTYVTQQLIRAAEIRASANLAATKMSECVLGQSKRVDFCGKGYHLMSFPQSAPHGVVFLHVTYVPAQEKNFTTAPAICHDGKAHFPREGVFVSNGTHWFVTQRNFCEPQIITTDNTFVSGNCDVVIGIVNNTVYDPLQPELDSFKEELDKYFKNHTSPDVDLGDISGINASVVNIQKEIDRLNEVAKNLNESLIDLQELGKYEQYIKGGGSGGGQIYEGKLTAEGLRFGIVASRFNHALVDRLVEGAIDAIVRHGGREEDITLVRVPGSWEIPVAAGELARKEDIDAVIAIGVLIRGATPHFDYIASEVSKGLADLSLELRKPITFGVITADTLEQAIERAGTKHGNKGWEAALSAIEMANLFKSLR

SEQ ID NO: 4052 - protein, 1371 aa, Artificial Sequence
  SARS-CoV-2/Belgium/BC-03016/2020__EPI_ISL_415157 spike protein (1-1211)(I714C_Y1110C) LumSynth construct
MFVFLVLLPLVSSQCVNLTTRTQLPPAYTNSFTRGVYYPDKVFRSSVLHSTQDLFLPFFSNVTWFHAIHVSGTNGTKRFDNPVLPFNDGVYFASTEKSNIIRGWIFGTTLDSKTQSLLIVNNATNVVIKVCEFQFCNDPFLGVYYHKNNKSWMESEFRVYSSANNCTFEYVSQPFLMDLEGKQGNFKNLREFVFKNIDGYFKIYSKHTPINLVRDLPQGFSALEPLVDLPIGINITRFQTLLALHRSYLTPGDSSSGWTAGAAAYYVGYLQPRTFLLKYNENGTITDAVDCALDPLSETKCTLKSFTVEKGIYQTSNFRVQPTESIVRFPNITNLCPFGEVFNATRFASVYAWNRKRISNCVADYSVLYNSASFSTFKCYGVSPTKLNDLCFTNVYADSFVIRGDEVRQIAPGQTGKIADYNYKLPDDFTGCVIAWNSNNLDSKVGGNYNYLYRLFRKSNLKPFERDISTEIYQAGSTPCNGVEGFNCYFPLQSYGFQPTNGVGYQPYRVVVLSFELLHAPATVCGPKKSTNLVKNKCVNFNFNGLTGTGVLTESNKKFLPFQQFGRDIADTTDAVRDPQTLEILDITPCSFGGVSVITPGTNTSNQVAVLYQGVNCTEVPVAIHADQLTPTWRVYSTGSNVFQTRAGCLIGAEHVNNSYECDIPIGAGICASYQTQTNSPRRARSVASQSIIAYTMSLGAENSVAYSNNSIACPTNFTISVTTEILPVSMTKTSVDCTMYICGDSTECSNLLLQYGSFCTQLNRALTGIAVEQDKNTQEVFAQVKQIYKTPPIKDFGGFNFSQILPDPSKPSKRSFIEDLLFNKVTLADAGFIKQYGDCLGDIAARDLICAQKFNGLTVLPPLLTDEMIAQYTSALLAGTITSGWTFGAGAALQIPFAMQMAYRFNGIGVTQNVLYENQKLIANQFNSAIGKIQDSLSSTAPALGKLQDVVNQNAQALNTLVKQLSSNFGAISSVLNDILSRLDKVEAEVQIDRLITGRLQSLQTYVTQQLIRAAEIRASANLAATKMSECVLGQSKRVDFCGKGYHLMSFPQSAPHGVVFLHVTYVPAQEKNFTTAPAICHDGKAHFPREGVFVSNGTHWFVTQRNFCEPQIITTDNTFVSGNCDVVIGIVNNTVYDPLQPELDSFKEELDKYFKNHTSPDVDLGDISGINASVVNIQKEIDRLNEVAKNLNESLIDLQELGKYEQYIKGGGSGGGQIYEGKLTAEGLRFGIVASRFNHALVDRLVEGAIDAIVRHGGREEDITLVRVPGSWEIPVAAGELARKEDIDAVIAIGVLIRGATPHFDYIASEVSKGLADLSLELRKPITFGVITADTLEQAIERAGTKHGNKGWEAALSAIEMANLFKSLR

SEQ ID NO: 4053 - protein, 1371 aa, Artificial Sequence
  SARS-CoV-2/Germany/BavPat3/2020__EPI_ISL_414521 spike protein (1-1211)(I714C_Y1110C) LumSynth construct
MFVFLVLLPLVSSQCVNLTTRTQLPPAYTNSFTRGVYYPDKVFRSSVLHSTQDLFLPFFSNVTWFHAIHVSGTNGTKRFDNPVLPFNDGVYFASTEKSNIIRGWIFGTTLDSKTQSLLIVNNATNVVIKVCEFQFCNDPFLGVYYHKNNKSWMESEFRVYSSANNCTFEYVSQPFLMDLEGKQGNFKNLREFVFKNIDGYFKIYSKHTPINLVRDLPQGFSALEPLVDLPIGINITRFQTLLALHRSYLTPGDSSSGWTAGAAAYYVGYLQPRTFLLKYNENGTITDAVDCALDPLSETKCTLKSFTVEKGIYQTSNFRVQPTESIVRFPNITNLCPFGEVFNATRFASVYAWNRKRISNCVADYSVLYNSASFSTFKCYGVSPTKLNDLCFTNVYADSFVIRGDEVRQIAPGQTGKIADYNYKLPDDFTGCVIAWNSNNLDSKVGGNYNYLYRLFRKSNLKPFERDISTEIYQAGSTPCNGVEGFNCYFPLQSYGFQPTNGVGYQPYRVVVLSFELLHAPATVCGPKKSTNLVKNKCVNFNFNGLTGTGVLTESNKKFLPFQQFGRDIADTTDAVRDPQTLEILDITPCSFGGVSVITPGTNTSNQVAVLYQDVNCTEVPVAIHADQLTPTWRVYSTGSNVFQTRAGCLIGAEHVNNSYECDIPIGAGICASYQTQTNSPRRARSVASQSIIAYTMSLGAENSVAYSNNSIACPTNFTISVTTEILPVSMTKTSVDCTMYICGDSTECSNLLLQYGSFCTQLNRALTGIAVEQDKNTQQVFAQVKQIYKTPPIKDFGGFNFSQILPDPSKPSKRSFIEDLLFNKVTLADAGFIKQYGDCLGDIAARDLICAQKFNGLTVLPPLLTDEMIAQYTSALLAGTITSGWTFGAGAALQIPFAMQMAYRFNGIGVTQNVLYENQKLIANQFNSAIGKIQDSLSSTASALGKLQDVVNQNAQALNTLVKQLSSNFGAISSVLNDILSRLDKVEAEVQIDRLITGRLQSLQTYVTQQLIRAAEIRASANLAATKMSECVLGQSKRVDFCGKGYHLMSFPQSAPHGVVFLHVTYVPAQEKNFTTAPAICHDGKAHFPREGVFVSNGTHWFVTQRNFCEPQIITTDNTFVSGNCDVVIGIVNNTVYDPLQPELDSFKEELDKYFKNHTSPDVDLGDISGINASVVNIQKEIDRLNEVAKNLNESLIDLQELGKYEQYIKGGGSGGGQIYEGKLTAEGLRFGIVASRFNHALVDRLVEGAIDAIVRHGGREEDITLVRVPGSWEIPVAAGELARKEDIDAVIAIGVLIRGATPHFDYIASEVSKGLADLSLELRKPITFGVITADTLEQAIERAGTKHGNKGWEAALSAIEMANLFKSLR

SEQ ID NO: 4054 - protein, 1371 aa, Artificial Sequence
  SARS-CoV-2/France/HF1805/2020__EPI_ISL_414628 spike protein (1-1211)(I714C_Y1110C) LumSynth construct
MFVFLVLLPLVSSQCVNLTTRTQLPPAYTNSFTRGVYYPDKVFRSSVLHSTQDLFLPFFSNVTWFHAIHVSGTNGTKRFDNPVLPFNDGVYFASTEKSNIIRGWIFGTTLDSKTQSLLIVNNATNVVIKVCEFQFCNDPFLGVYYHKNNKSWMESEFRVYSSANNCTFEYVSQPFLMDLEGKQGNFKNLREFVFKNIDGYFKIYSKHTPINLVRDLPQGFSALEPLVDLPIGINITRFQTLLALHRSYLTPGDSSSGWTAGAAAYYVGYLQPRTFLLKYNENGTITDAVDCALDPLSETKCTLKSFTVEKGIYQTSNFRVQPTESIVRFPNITNLCPFGEVFNATRFASVYAWNRKRISNCVADYSVLYNSASFSTFKCYGVSPTKLNDLCFTNVYADSFVIRGDEVRQIAPGQTGKIADYNYKLPDDFTGCVIAWNSNNLDSKVGGNYNYLYRLFRKSNLKPFERDISTEIYQAGSTPCNGVEGFNCYFPLQSYGFQPTNGVGYQPYRVVVLSFELLHAPATVCGPKKSTNLVKNKCVNFNFNGLTGTGVLTESNKKFLPFQQFGRDIADTTDAVRDPQTLEILDITPCSFGGVSVITPGTNTSNQVAVLYQGVNCTEVPVAIHADQLTPTWRVYSTGSNVFQTRAGCLIGAEHVNNSYECDIPIGAGICASYQTQTNSPRRARSVASQSIIAYTMSLGAENSVAYSNNSIACPTNFTISVTTEILPVSMTKTSVDCTMYICGDSTECSNLLLQYGSFCTQLNRALTGIAVEQDKNTQEVFAQVKQIYKTPPIKDFGGFNFSQILPDPSKPSKRSFIEDLLFNKVTLADAGFIKQYGDCLGDIAARDLICAQKFNGLTVLPPLLTDEMIAQYTSALLAGTITSGWTFGAGAALQIPFAMQMAYRFNGIGVTQNVLYENQKLIANQFNSAIGKIQDSLSSTASALGKLQDVVNQNAQALNTLVKQLSSNFGAISSVLNDILSRLDKVEAEVQIDRLITGRLQSLQTYVTQQLIRAAEIRASANLAATKMSECVLGQSKRVDFCGKGYHLMSFPQSAPHGVVFLHVTYVPAQEKNFTTAPAICHDGKAHFPREGVFVSNGTHWFVTQRNFCEPQIITTDNTFVSGNCDVVIGVVNNTVYDPLQPELDSFKEELDKYFKNHTSPDVDLGDISGINASVVNIQKEIDRLNEVAKNLNESLIDLQELGKYEQYIKGGGSGGGQIYEGKLTAEGLRFGIVASRFNHALVDRLVEGAIDAIVRHGGREEDITLVRVPGSWEIPVAAGELARKEDIDAVIAIGVLIRGATPHFDYIASEVSKGLADLSLELRKPITFGVITADTLEQAIERAGTKHGNKGWEAALSAIEMANLFKSLR

SEQ ID NO: 4055 - protein, 1371 aa, Artificial Sequence
  SARS-CoV-2/Netherlands/ZuidHolland_9/2020__EPI_ISL_414445 spike protein (1-1211)(I714C_Y1110C) LumSynth construct
MFVFLVLLPLVSSQCVNLTTRTQLPPAYTNSFTRGVYYPDKVFRSSVLHSTQDLFLPFFSNVTWFHAIHVSGTNGTKRFDNPVLPFNDGVYFASTEKSNIIRGWIFGTTLDSKTQSLLIVNNATNVVIKVCEFQFCNDPFLGVYYHKNNKSWMESEFRVYSSANNCTFEYVSQPFLMDLEGKQGNFKNLREFVFKNIDGYFKIYSKHTPINLVRDLPQGFSALEPLVDLPIGINITRFQTLLALHRSYLTPGDSSSGWTAGAAAYYVGYLQPRTFLLKYNENGTITDAVDCALDPLSETKCTLKSFTVEKGIYQTSNFRVQPTESIVRFPNITNLCPFGEVFNATRFASVYAWNRKRISNCVADYSVLYNSASFSTFKCYGVSPTKLNDLCFTNVYADSFVIRGDEVRQIAPGQTGKIADYNYKLPDDFTGCVIAWNSNNLDSKVGGNYNYLYRLFRKSNLKPFERDISTEIYQAGSTPCNGVEGFNCYFPLQSYGFQPTNGVGYQPYRVVVLSFELLHAPATVCGPKKSTNLVKNKCVNFNFNGLTGTGVLTESNKKFLPFQQFGRDIADTTDAVRDPQTLEILDITPCSFGGVSVITPGTNTSNQVAVLYQGVNCTEVPVAIHADQLTPTWRVYSTGSNVFQTRAGCLIGAEHVNNSYECDIPIGAGICASYQTQTNSPRRARSVASQSIIAYTMSLGAENSVAYSNNSIACPTNFTISVTTEILPVSMTKTSVDCTMYICGDSTECSNLLLQYGSFCTQLNRALTGIAVEQDKNTQEVFAQVKQIYKTPPIKDFGGFNFSQILPDPSKPSKRSFIEDLLFNKVTLADAGFIKQYGDCLGDIAARDLICVQKFNGLTVLPPLLTDEMIAQYTSALLAGTITSGWTFGAGAALQIPFAMQMAYRFNGIGVTQNVLYENQKLIANQFNSAIGKIQDSLSSTASALGKLQDVVNQNAQALNTLVKQLSSNFGAISSVLNDILSRLDKVEAEVQIDRLITGRLQSLQTYVTQQLIRAAEIRASANLAATKMSECVLGQSKRVDFCGKGYHLMSFPQSAPHGVVFLHVTYVPAQEKNFTTAPAICHDGKAHFPREGVFVSNGTHWFVTQRNFCEPQIITTDNTFVSGNCDVVIGIVNNTVYDPLQPELDSFKEELDKYFKNHTSPDVDLGDISGINASVVNIQKEIDRLNEVAKNLNESLIDLQELGKYEQYIKGGGSGGGQIYEGKLTAEGLRFGIVASRFNHALVDRLVEGAIDAIVRHGGREEDITLVRVPGSWEIPVAAGELARKEDIDAVIAIGVLIRGATPHFDYIASEVSKGLADLSLELRKPITFGVITADTLEQAIERAGTKHGNKGWEAALSAIEMANLFKSLR

SEQ ID NO: 4056 - protein, 1371 aa, Artificial Sequence
  SARS-CoV-2/Finland/FIN03032020A/2020__EPI_ISL_413602 spike protein (1-1211)(I714C_Y1110C) LumSynth construct
MFVFLVLLPLVSSQCVNLTTRTQLPPAYTNSFTRGVYYPDKVFRSSVLHSTQDLFLPFFSNVTWFHAIHVSGTNGTKRFDNPVLPFNDGVYFASTEKSNIIRGWIFGTTLDSKTQSLLIVNNATNVVIKVCEFQFCNDPFLGVYYHKNNKSWMESEFRVYSSANNCTFEYVSQPFLMDLEGKQGNFKNLREFVFKNIDGYFKIYSKHTPINLVRDLPQGFSALEPLVDLPIGINITRFQTLLALHRSYLTPGDSSSGWTAGAAAYYVGYLQPRTFLLKYNENGTITDAVDCALDPLSETKCTLKSFTVEKGIYQTSNFRVQPTESIVRFPNITNLCPFGEVFNATRFASVYAWNRKRISNCVADYSVLYNSASFSTFKCYGVSPTKLNDLCFTNVYADSFVIRGDEVRQIAPGQTGKIADYNYKLPDDFTGCVISWNSNNLDSKVGGNYNYLYRLFRKSNLKPFERDISTEIYQAGSTPCNGVEGFNCYFPLQSYGFQPTNGVGYQPYRVVVLSFELLHAPATVCGPKKSTNLVKNKCVNFNFNGLTGTGVLTESNKKFLPFQQFGRDIADTTDAVRDPQTLEILDITPCSFGGVSVITPGTNTSNQVAVLYQGVNCTEVPVAIHADQLTPTWRVYSTGSNVFQTRAGCLIGAEHVNNSYECDIPIGAGICASYQTQTNSPRRARSVASQSIIAYTMSLGAENSVAYSNNSIACPTNFTISVTTEILPVSMTKTSVDCTMYICGDSTECSNLLLQYGSFCTQLNRALTGIAVEQDKNTQEVFAQVKQIYKTPPIKDFGGFNFSQILPDPSKPSKRSFIEDLLFNKVTLADAGFIKQYGDCLGDIAARDLICAQKFNGLTVLPPLLTDEMIAQYTSALLAGTITSGWTFGAGAALQIPFAMQMAYRFNGIGVTQNVLYENQKLIANQFNSAIGKIQDSLSSTASALGKLQDVVNQNAQALNTLVKQLSSNFGAISSVLNDILSRLDKVEAEVQIDRLITGRLQSLQTYVTQQLIRAAEIRASANLAATKMSECVLGQSKRVDFCGKGYHLMSFPQSAPHGVVFLHVTYVPAQEKNFTTAPAICHDGKAHFPREGVFVSNGTHWFVTQRNFCEPQIITTDNTFVSGNCDVVIGIVNNTVYDPLQPELDSFKEELDKYFKNHTSPDVDLGDISGINASVVNIQKEIDRLNEVAKNLNESLIDLQELGKYEQYIKGGGSGGGQIYEGKLTAEGLRFGIVASRFNHALVDRLVEGAIDAIVRHGGREEDITLVRVPGSWEIPVAAGELARKEDIDAVIAIGVLIRGATPHFDYIASEVSKGLADLSLELRKPITFGVITADTLEQAIERAGTKHGNKGWEAALSAIEMANLFKSLR

SEQ ID NO: 4057 - protein, 1371 aa, Artificial Sequence
  SARS-CoV-2/France/GE1977/2020__EPI_ISL_414632 spike protein (1-1211)(I714C_Y1110C) LumSynth construct
MFVFLVLLPLVSSQCVNLTTRTQLPPAYTNSFTRGVYYPDKVFRSSVLHSTQDLFLPFFSNVTWFHAIHVSGTNGTKRFDNPVLPFNDGVYFASTEKSNIIRGWIFGTTLDSKTQSLLIVNNATNVVIKVCEFQFCNDPFLGVYYHKNNKSWMESEFRVYSSANNCTFEYVSQPFLMDLEGKQGNFKNLREFVFKNIDGYFKIYSKHTPINLVRDLPQGFSALEPLVDLPIGINITRFQTLLALHRSYLTPGDSSSGWTAGAAAYYVGYLQPRTFLLKYNENGTITDAVDCALDPLSETKCTLKSFTVEKGIYQTSNFRVQPTESIVRFPNITNLCPFGEVFNATRFASVYAWNRKRISNCVADYSVLYNSASFSTFKCYGVSPTKLNDLCFTNVYADSFVIRGDEVRQIAPGQTGKIADYNYKLPDDFTGCVIAWNSNNLDSKVGGNYNYLYRLFRKSNLKPFERDISTEIYQAGSTPCNGVEGFNCYFPLQSYGFQPTNGVGYQPYRVVVLSFELLHAPATVCGPKKSTNLVKNKCVNFNFNGLTGTGVLTESNKKFLPFQQFGRDIADTTDAVRDPQTLEILDITPCSFGGVSVITPGTNTSNQVAVLYQGVNCTEVPVAIHADQLTPTWRVYSTGSNVFQTRAGCLIGAEHVNNSYECDIPIGAGICASYQTQTNSPRRARSVASQSIIAYTMSLGAENSVAYSNNSIACPTNFTISVTTEILPVSMTKTSVDCTMYICGDSTECSNLLLQYGSFCTQLNRALTGIAVEQDKNTQEVFAQVKQIYKTPPIKDFGGFNFSQILPDPSKPSKRSFIEDLLFNKVTLADAGFIKQYGDCLGDIAARDLICAQKFNGLTVLPPLLTDEMIAQYTSALLAGTITSGWTFGAGAALQIPFAMQMAYRFNGIGVTQNVLYENQKLIANQFNSAIGKIQDSLFSTASALGKLQDVVNQNAQALNTLVKQLSSNFGAISSVLNDILSRLDKVEAEVQIDRLITGRLQSLQTYVTQQLIRAAEIRASANLAATKMSECVLGQSKRVDFCGKGYHLMSFPQSAPHGVVFLHVTYVPAQEKNFTTAPAICHDGKAHFPREGVFVSNGTHWFVTQRNFCEPQIITTDNTFVSGNCDVVIGIVNNTVYDPLQPELDSFKEELDKYFKNHTSPDVDLGDISGINASVVNIQKEIDRLNEVAKNLNESLIDLQELGKYEQYIKGGGSGGGQIYEGKLTAEGLRFGIVASRFNHALVDRLVEGAIDAIVRHGGREEDITLVRVPGSWEIPVAAGELARKEDIDAVIAIGVLIRGATPHFDYIASEVSKGLADLSLELRKPITFGVITADTLEQAIERAGTKHGNKGWEAALSAIEMANLFKSLR

SEQ ID NO: 4058 - protein, 1371 aa, Artificial Sequence
  SARS-CoV-2/Finland/FIN-313/2020__EPI_ISL_414641 spike protein (1-1211)(I714C_Y1110C) LumSynth construct
MFVFLVLLPLVSSQCVNLTTRTQLPPAYTNSFTRGVYYPDKVFRSSVLHSTQDLFLPFFSNVTWFHAIHVSGTNGTKRFDNPVLPFNDGVYFASTEKSNIIRGWIFGTTLDSKTQSLLIVNNATNVVIKVCEFQFCNDPFLGVYYHKNNKSWMESEFRVYSSANNCTFEYVSQPFLMDLEGKQGNFKNLREFVFKNIDGYFKIYSKHTPINLVRDLPQGFSALEPLVDLPIGINITRFKTLLALHRSYLTPGDSSSGWTAGAAAYYVGYLQPRTFLLKYNENGTITDAVDCALDPLSETKCTLKSFTVEKGIYQTSNFRVQPTESIVRFPNITNLCPFGEVFNATRFASVYAWNRKRISNCVADYSVLYNSASFSTFKCYGVSPTKLNDLCFTNVYADSFVIRGDEVRQIAPGQTGKIADYNYKLPDDFTGCVIAWNSNNLDSKVGGNYNYLYRLFRKSNLKPFERDISTEIYQAGSTPCNGVEGFNCYFPLQSYGFQPTNGVGYQPYRVVVLSFELLHAPATVCGPKKSTNLVKNKCVNFNFNGLTGTGVLTESNKKFLPFQQFGRDIADTTDAVRDPQTLEILDITPCSFGGVSVITPGTNTSNQVAVLYQGVNCTEVPVAIHADQLTPTWRVYSTGSNVFQTRAGCLIGAEHVNNSYECDIPIGAGICASYQTQTNSPRRARSVASQSIIAYTMSLGAENSVAYSNNSIACPTNFTISVTTEILPVSMTKTSVDCTMYICGDSTECSNLLLQYGSFCTQLNRALTGIAVEQDKNTQEVFAQVKQIYKTPPIKDFGGFNFSQILPDPSKPSKRSFIEDLLFNKVTLADAGFIKQYGDCLGDIAARDLICAQKFNGLTVLPPLLTDEMIAQYTSALLAGTITSGWTFGAGAALQIPFAMQMAYRFNGIGVTQNVLYENQKLIANQFNSAIGKIQDSLSSTASALGKLQDVVNQNAQALNTLVKQLSSNFGAISSVLNDILSRLDKVEAEVQIDRLITGRLQSLQTYVTQQLIRAAEIRASANLAATKMSECVLGQSKRVDFCGKGYHLMSFPQSAPHGVVFLHVTYVPAQEKNFTTAPAICHDGKAHFPREGVFVSNGTHWFVTQRNFCEPQIITTDNTFVSGNCDVVIGIVNNTVYDPLQPELDSFKEELDKYFKNHTSPDVDLGDISGINASVVNIQKEIDRLNEVAKNLNESLIDLQELGKYEQYIKGGGSGGGQIYEGKLTAEGLRFGIVASRFNHALVDRLVEGAIDAIVRHGGREEDITLVRVPGSWEIPVAAGELARKEDIDAVIAIGVLIRGATPHFDYIASEVSKGLADLSLELRKPITFGVITADTLEQAIERAGTKHGNKGWEAALSAIEMANLFKSLR

SEQ ID NO: 4059 - protein, 1371 aa, Artificial Sequence
  SARS-CoV-2/Netherlands/ZuidHolland_2/2020__EPI_ISL_414556 spike protein (1-1211)(I714C_Y1110C) LumSynth construct
MFVFLVLLPLVSSQCVNLTTRTQLPPAYTNSFTRGVYYPDKVFRSSVLHSTQDLFLPFFSNVTWFHAIHVSGTNGTKRFDNPVLPFNDGVYFASTEKSNIIRGWIFGTTLDSKTQSLLIVNNATNVVIKVCEFQFCNDPFLGVYYHKNNKSWMESEFRVYSSANNCTFEYVSQPFLMDLEGKQGNFKNLREFVFKNIDGYFKIYSKHTPINLVRDLPQGFSALEPLVDLPIGINITRFQTLLALHRSYLTPGDSSSGWTAGAAAYYVGYLQPRTFLLKYNENGTITDAVDCALDPLSETKCTLKSFTVEKGIYQTSNFRVQPTESIVRFPNITNLCPFGEVFNATRFASVYAWNRKRISNCVADYSVLYNSASFSTFKCYGVSPTKLNDLCFTNVYADSFVIRGDEVRQIAPGQTGKIADYNYKLPDDFTGCVIAWNSNNLDSKVGGNYNYLYRLFRKSNLKPFERDISTEIYQAGSTPCNGVEGFNCYFPLQSYGFQPTNGVGYQPYRVVVLSFELLHAPATVCGPKKSTNLVKNKCVNFNFNGLTGTGVLTESNKKFLPFQQFGRDIADTTDAVRDPQTLEILDITPCSFGGVSVITPGTNTSNQVAVLYQGVNCTEVPVAIHADQLTPTWRVYSTGSNVFQTRAGCLIGAEHVNNSYECDIPIGAGICASYQTQTNSPRRARSVASQSIIAYTMSLGAENSVAYSNNSIACPTNFTISVTTEILPVSMTKTSVDCTMYICGDSTECSNLLLQYGSFCTQLNRALTGIALEQDKNTQEVFAQVKQIYKTPPIKDFGGFNFSQILPDPSKPSKRSFIEDLLFNKVTLADAGFIKQYGDCLGDIAARDLICAQKFNGLTVLPPLLTDEMIAQYTSALLAGTITSGWTFGAGAALQIPFAMQMAYRFNGIGVTQNVLYENQKLIANQFNSAIGKIQDSLSSTASALGKLQDVVNQNAQALNTLVKQLSSNFGAISSVLNDILSRLDKVEAEVQIDRLITGRLQSLQTYVTQQLIRAAEIRASANLAATKMSECVLGQSKRVDFCGKGYHLMSFPQSAPHGVVFLHVTYVPAQEKNFTTAPAICHDGKAHFPREGVFVSNGTHWFVTQRNFCEPQIITTDNTFVSGNCDVVIGIVNNTVYDPLQPELDSFKEELDKYFKNHTSPDVDLGDISGINASVVNIQKEIDRLNEVAKNLNESLIDLQELGKYEQYIKGGGSGGGQIYEGKLTAEGLRFGIVASRFNHALVDRLVEGAIDAIVRHGGREEDITLVRVPGSWEIPVAAGELARKEDIDAVIAIGVLIRGATPHFDYIASEVSKGLADLSLELRKPITFGVITADTLEQAIERAGTKHGNKGWEAALSAIEMANLFKSLR

SEQ ID NO: 4060 - protein, 1371 aa, Artificial Sequence
  SARS-CoV-2/USA/WA-UW31/2020__EPI_ISL_414618 spike protein (1-1211)(I714C_Y1110C) LumSynth construct
MFVFLVLLPLVSSQCVNLTTRTQLPPAYTNSFTRGVYYPDKVFRSSVLHSTQDLFLPFFSNVTWFHAIHVSGTNGTKRFDNPVLPFNDGVYFASTEKSNIIRGWIFGTTLDSKTQSLLIVNNATNVVIKVCEFQFCNDPFLGVYYHKNNKSWMESEFRVYSSANNCTFEYVSQPFLMDLEGKQGNFKNLREFVFKNIDGYFKIYSKHTPINLVRDLPQGFSALEPLVDLPIGINITRFQTLLALHRSYLTPGDSSSGWTAGAAAYYVGYLQPRTFLLKYNENGTITDAVDCALDPLSETKCTLKSFTVEKGIYQTSNFRVQPTESIVRFPNITNLCPFGEVFNATRFASVYAWNRKRISNCVADYSVLYNSASFSTFKCYGVSPTKLNDLCFTNVYADSFVIRGDEVRQIAPGQTGKIADYNYKLPDDFTGCVIAWNSNNLDSKVGGNYNYLYRLFRKSNLKPFERDISTEIYQAGSTPCNGAEGFNCYFPLQSYGFQPTNGVGYQPYRVVVLSFELLHAPATVCGPKKSTNLVKNKCVNFNFNGLTGTGVLTESNKKFLPFQQFGRDIADTTDAVRDPQTLEILDITPCSFGGVSVITPGTNTSNQVAVLYQDVNCTEVPVAIHADQLTPTWRVYSTGSNVFQTRAGCLIGAEHVNNSYECDIPIGAGICASYQTQTNSPRRARSVASQSIIAYTMSLGAENSVAYSNNSIACPTNFTISVTTEILPVSMTKTSVDCTMYICGDSTECSNLLLQYGSFCTQLNRALTGIAVEQDKNTQEVFAQVKQIYKTPPIKDFGGFNFSQILPDPSKPSKRSFIEDLLFNKVTLADAGFIKQYGDCLGDIAARDLICAQKFNGLTVLPPLLTDEMIAQYTSALLAGTITSGWTFGAGAALQIPFAMQMAYRFNGIGVTQNVLYENQKLIANQFNSAIGKIQDSLSSTASALGKLQDVVNQNAQALNTLVKQLSSNFGAISSVLNDILSRLDKVEAEVQIDRLITGRLQSLQTYVTQQLIRAAEIRASANLAATKMSECVLGQSKRVDFCGKGYHLMSFPQSAPHGVVFLHVTYVPAQEKNFTTAPAICHDGKAHFPREGVFVSNGTHWFVTQRNFCEPQIITTDNTFVSGNCDVVIGIVNNTVYDPLQPELDSFKEELDKYFKNHTSPDVDLGDISGINASVVNIQKEIDRLNEVAKNLNESLIDLQELGKYEQYIKGGGSGGGQIYEGKLTAEGLRFGIVASRFNHALVDRLVEGAIDAIVRHGGREEDITLVRVPGSWEIPVAAGELARKEDIDAVIAIGVLIRGATPHFDYIASEVSKGLADLSLELRKPITFGVITADTLEQAIERAGTKHGNKGWEAALSAIEMANLFKSLR

SEQ ID NO: 4061 - protein, 1371 aa, Artificial Sequence
  SARS-CoV-2/South Korea/SNU01/2020__EPI_ISL_411929 spike protein (1-1211)(I714C_Y1110C) LumSynth construct
MFVFLVLLPLVSSQCVNLTTRTQLPPAYTNSFTRGVYYPDKVFRSSVLHSTQDLFLPFFSNVTWFHAIHVSGTNGTKRFDNPVLPFNDGVYFASTEKSNIIRGWIFGTTLDSKTQSLLIVNNATNVVIKVCEFQFCNDPFLGVYYHKNNKSWMESEFRVYSSANNCTFEYVSQPFLMDLEGKQGNFKNLREFVFKNIDGYFKIYSKHTPINLVRDLPQGFWALEPLVDLPIGINITRFQTLLALHRSYLTPGDSSSGWTAGAAAYYVGYLQPRTFLLKYNENGTITDAVDCALDPLSETKCTLKSFTVEKGIYQTSNFRVQPTESIVRFPNITNLCPFGEVFNATRFASVYAWNRKRISNCVADYSVLYNSASFSTFKCYGVSPTKLNDLCFTNVYADSFVIRGDEVRQIAPGQTGKIADYNYKLPDDFTGCVIAWNSNNLDSKVGGNYNYLYRLFRKSNLKPFERDISTEIYQAGSTPCNGVEGFNCYFPLQSYGFQPTNGVGYQPYRVVVLSFELLHAPATVCGPKKSTNLVKNKCVNFNFNGLTGTGVLTESNKKFLPFQQFGRDIADTTDAVRDPQTLEILDITPCSFGGVSVITPGTNTSNQVAVLYQDVNCTEVPVAIHADQLTPTWRVYSTGSNVFQTRAGCLIGAEHVNNSYECDIPIGAGICASYQTQTNSPRRARSVASQSIIAYTMSLGAENSVAYSNNSIACPTNFTISVTTEILPVSMTKTSVDCTMYICGDSTECSNLLLQYGSFCTQLNRALTGIAVEQDKNTQEVFAQVKQIYKTPPIKDFGGFNFSQILPDPSKPSKRSFIEDLLFNKVTLADAGFIKQYGDCLGDIAARDLICAQKFNGLTVLPPLLTDEMIAQYTSALLAGTITSGWTFGAGAALQIPFAMQMAYRFNGIGVTQNVLYENQKLIANQFNSAIGKIQDSLSSTASALGKLQDVVNQNAQALNTLVKQLSSNFGAISSVLNDILSRLDKVEAEVQIDRLITGRLQSLQTYVTQQLIRAAEIRASANLAATKMSECVLGQSKRVDFCGKGYHLMSFPQSAPHGVVFLHVTYVPAQEKNFTTAPAICHDGKAHFPREGVFVSNGTHWFVTQRNFCEPQIITTDNTFVSGNCDVVIGIVNNTVYDPLQPELDSFKEELDKYFKNHTSPDVDLGDISGINASVVNIQKEIDRLNEVAKNLNESLIDLQELGKYEQYIKGGGSGGGQIYEGKLTAEGLRFGIVASRFNHALVDRLVEGAIDAIVRHGGREEDITLVRVPGSWEIPVAAGELARKEDIDAVIAIGVLIRGATPHFDYIASEVSKGLADLSLELRKPITFGVITADTLEQAIERAGTKHGNKGWEAALSAIEMANLFKSLR

SEQ ID NO: 4062 - protein, 1371 aa, Artificial Sequence
  SARS-CoV-2/China/WF0004/2020__EPI_ISL_413694 spike protein (1-1211)(I714C_Y1110C) LumSynth construct
MFVFLVLLPLVSSQCVNLTTRTQLPPAYTNSFTRGVYYPDKVFRSSVLHSTQDLFLPFFSNVTWFHAIHVSGTNGTKRFDNPVLPFNDGVYFASTEKSNIIRGWIFGTTLDSKTQSLLIVNNATNVVIKVCEFQFCNDPFLGVYYHKNNKSWTESEFRVYSSANNCTFEYVSQPFLMDLEGKQGNFKNLREFVFKNIDGYFKIYSKHTPINLVRDLPQGFSALEPLVDLPIGINITRFQTLLALHRSYLTPGDSSSGWTAGAAAYYVGYLQPRTFLLKYNENGTITDAVDCALDPLSETKCTLKSFTVEKGIYQTSNFRVQPTESIVRFPNITNLCPFGEVFNATRFASVYAWNRKRISNCVADYSVLYNSASFSTFKCYGVSPTKLNDLCFTNVYADSFVIRGDEVRQIAPGQTGKIADYNYKLPDDFTGCVIAWNSNNLDSKVGGNYNYLYRLFRKSNLKPFERDISTEIYQAGSTPCNGVEGFNCYFPLQSYGFQPTNGVGYQPYRVVVLSFELLHAPATVCGPKKSTNLVKNKCVNFNFNGLTGTGVLTESNKKFLPFQQFGRDIADTTDAVRDPQTLEILDITPCSFGGVSVITPGTNTSNQVAVLYQDVNCTEVPVAIHADQLTPTWRVYSTGSNVFQTRAGCLIGAEHVNNSYECDIPIGAGICASYQTQTNSPRRARSVASQSIIAYTMSLGAENSVAYSNNSIACPTNFTISVTTEILPVSMTKTSVDCTMYICGDSTECSNLLLQYGSFCTQLNRALTGIAVEQDKNTQEVFAQVKQIYKTPPIKDFGGFNFSQILPDPSKPSKRSFIEDLLFNKVTLADAGFIKQYGDCLGDIAARDLICAQKFNGLTVLPPLLTDEMIAQYTSALLAGTITSGWTFGAGAALQIPFAMQMAYRFNGIGVTQNVLYENQKLIANQFNSAIGKIQDSLSSTASALGKLQDVVNQNAQALNTLVKQLSSNFGAISSVLNDILSRLDKVEAEVQIDRLITGRLQSLQTYVTQQLIRAAEIRASANLAATKMSECVLGQSKRFDFCGKGYHLMSFPQSAPHGVVFLHVTYVPAQEKNFTTAPAICHDGKAHFPREGVFVSNGTHWFVTQRNFCEPQIITTDNTFVSGNCDVVIGIVNNTVYDPLQPELDSFKEELDKYFKNHTSPDVDLGDISGINASVVNIQKEIDRLNEVAKNLNESLIDLQELGKYEQYIKGGGSGGGQIYEGKLTAEGLRFGIVASRFNHALVDRLVEGAIDAIVRHGGREEDITLVRVPGSWEIPVAAGELARKEDIDAVIAIGVLIRGATPHFDYIASEVSKGLADLSLELRKPITFGVITADTLEQAIERAGTKHGNKGWEAALSAIEMANLFKSLR

SEQ ID NO: 4063 - protein, 1371 aa, Artificial Sequence
  SARS-CoV-2/China/WF0028/2020__EPI_ISL_413791 spike protein (1-1211)(I714C_Y1110C) LumSynth construct
MFVFLVLLPLVSSQCVNLTTRTQLPPAYTNSFTRGVYYPDKVFRSSVLHSTQDLFLPFFSNVTWFHAIHVSGTNGTKRFDNPVLPFNDGVYFASTEKSNIIRGWIFGTTLDSKTQSLLIVNNATNVVIKVCEFQFCNDPFLGVYYHKNNKSWMESEFRVYSSANNCTFEYVSQPFLMDLEGKQGNFKNLREFVFKNIDGYFKIYSKHTPINLVRDLPQGFSALEPLVDLPIGINITRFQTLLALHRSYLTPGDSSSGWTAGAAAYYVGYLQPRTFLLKYNENGTITDAVDCALDPLSETKCTLKSFTVEKGIYQTSNFRVQPTESIVRFPNITNLCPFGEVFNATRFASVYAWNRKRISNCVADYSVLYNSASFSTFKCYGVSPTKLNDLCFTNVYADSFVIRGDEVRQIAPGQTGKIADYNYKLPDDFTGCVIAWNSNNLDSKVGGNYNYLYRLFRKSNLKPFERDISTEIYQAGSTPCNGVEGFNCYFPLQSYGFQPTNGVGYQPYRVVVLSFELLHAPATVCGPKKSTNLVKNKCVNFNFNGLTGTGVLTESNKKFLPFQQFGRDIADTTDAVRDPQTLEILDITPCSFGGVSVITPGTNTSNQVAVLYQDVNCTEVPVAIHADQLTPTWRVYSTGSNVFQTRAGCLIGAEHVNNSYECDIPIGAGICASYQTQTNSPRRARSVASQSIIAYTMSLGAENSVAYSNNSIACPTNFTISVTTEILPVSMTKTSVDCTMYICGDSTECSNLLLQYGSFCTQLNRALTGIAVEQDKNTQEVFAQVKQIYKTPPIKDFGGFNFSQILPDPSKPSKRSFIEDLLFNKVTLADAGFIKQYGDCLGDIAARDLICAQKFNGLTVLPPLLTDEMIAQYTSALLAGTITSGWTFGAGAALQIPFAMQMAYRFNGIGVTQNVLYENQKLIANQFNSAIGKIQDSLSSTASALGKLQDVVNQNAQALNTLVKQLSSNFGAISSVLNDILSRLDKVEAEVQIDRLITGRLQSLQTYVTQQLIRAAEIRASANLAATKMSECVLGQSKRVDFCGKGYHLMSFPQSAPHGVVFLHVTYVPAQEKNFTTAPAICHDGKAHFPREGVFVSNGTHWFVTQRNFCEPQIITTDNTFVSGNCDVVIGIVNNTVYDPLQPELESFKEELDKYFKNHTSPDVDLGDISGINASVVNIQKEIDRLNEVAKNLNESLIDLQELGKYEQYIKGGGSGGGQIYEGKLTAEGLRFGIVASRFNHALVDRLVEGAIDAIVRHGGREEDITLVRVPGSWEIPVAAGELARKEDIDAVIAIGVLIRGATPHFDYIASEVSKGLADLSLELRKPITFGVITADTLEQAIERAGTKHGNKGWEAALSAIEMANLFKSLR

SEQ ID NO: 4064 - protein, 1371 aa, Artificial Sequence
  SARS-CoV-2/2019-nCoV/USA-CruiseA-18/2020__MT159716.1 spike protein (1-1211)(I714C_Y1110C) LumSynth construct
MFVFLVLLPLVSSQCVNLTTRTQLPPAYTNSFTRGVYYPDKVFRSSVLHSTQDLFLPFFSNVTWFHAIHVSGTNGTKRFDNPVLPFNDGVYFASTEKSNIIRGWIFGTTLDSKTQSLLIVNNATNVVIKVCEFQFCNDPFLGVYYHKNNKSWMESELRVYSSANNCTFEYVSQPFLMDLEGKQGNFKNLREFVFKNIDGYFKIYSKHTPINLVRDLPQGFSALEPLVDLPIGINITRFQTLLALHRSYLTPGDSSSGWTAGAAAYYVGYLQPRTFLLKYNENGTITDAVDCALDPLSETKCTLKSFTVEKGIYQTSNFRVQPTESIVRFPNITNLCPFGEVFNATRFASVYAWNRKRISNCVADYSVLYNSASFSTFKCYGVSPTKLNDLCFTNVYADSFVIRGDEVRQIAPGQTGKIADYNYKLPDDFTGCVIAWNSNNLDSKVGGNYNYLYRLFRKSNLKPFERDISTEIYQAGSTPCNGVEGFNCYFPLQSYGFQPTNGVGYQPYRVVVLSFELLHAPATVCGPKKSTNLVKNKCVNFNFNGLTGTGVLTESNKKFLPFQQFGRDIADTTDAVRDPQTLEILDITPCSFGGVSVITPGTNTSNQVAVLYQDVNCTEVPVAIHADQLTPTWRVYSTGSNVFQTRAGCLIGAEHVNNSYECDIPIGAGICASYQTQTNSPRRARSVASQSIIAYTMSLGAENSVAYSNNSIACPTNFTISVTTEILPVSMTKTSVDCTMYICGDSTECSNLLLQYGSFCTQLNRALTGIAVEQDKNTQEVFAQVKQIYKTPPIKDFGGFNFSQILPDPSKPSKRSFIEDLLFNKVTLADAGFIKQYGDCLGDIAARDLICAQKFNGLTVLPPLLTDEMIAQYTSALLAGTITSGWTFGAGAALQIPFAMQMAYRFNGIGVTQNVLYENQKLIANQFNSAIGKIQDSLSSTASALGKLQDVVNQNAQALNTLVKQLSSNFGAISSVLNDILSRLDKVEAEVQIDRLITGRLQSLQTYVTQQLIRAAEIRASANLAATKMSECVLGQSKRVDFCGKGYHLMSFPQSAPHGVVFLHVTYVPAQEKNFTTAPAICHDGKAHFPREGVFVSNGTHWFVTQRNFCEPQIITTDNTFVSGNCDVVIGIVNNTVYDPLQPELDSFKEELDKYFKNHTSPDVDLGDISGINASVVNIQKEIDRLNEVAKNLNESLIDLQELGKYEQYIKGGGSGGGQIYEGKLTAEGLRFGIVASRFNHALVDRLVEGAIDAIVRHGGREEDITLVRVPGSWEIPVAAGELARKEDIDAVIAIGVLIRGATPHFDYIASEVSKGLADLSLELRKPITFGVITADTLEQAIERAGTKHGNKGWEAALSAIEMANLFKSLR

SEQ ID NO: 4065 - protein, 1371 aa, Artificial Sequence
  SARS-CoV-2/SARS-CoV-2/Yunnan-01/human/2020/CHN__MT049951.1 spike protein (1-1211)(I714C_Y1110C) LumSynth construct
MFVFLVLLPLVSSQCVNLTTRTQLPPANTNSFTRGVYYPDKVFRSSVLHSTQDLFLPFFSNVTWFHAIHVSGTNGTKRFDNPVLPFNDGVYFASTEKSNIIRGWIFGTTLDSKTQSLLIVNNATNVVIKVCEFQFCNDPFLGVYYHKNNKSWMESEFRVYSSANNCTFEYVSQPFLMDLEGKQGNFKNLREFVFKNIDGYFKIYSKHTPINLVRDLPQGFSALEPLVDLPIGINITRFQTLLALHRSYLTPGDSSSGWTAGAAAYYVGYLQPRTFLLKYNENGTITDAVDCALDPLSETKCTLKSFTVEKGIYQTSNFRVQPTESIVRFPNITNLCPFGEVFNATRFASVYAWNRKRISNCVADYSVLYNSASFSTFKCYGVSPTKLNDLCFTNVYADSFVIRGDEVRQIAPGQTGKIADYNYKLPDDFTGCVIAWNSNNLDSKVGGNYNYLYRLFRKSNLKPFERDISTEIYQAGSTPCNGVEGFNCYFPLQSYGFQPTNGVGYQPYRVVVLSFELLHAPATVCGPKKSTNLVKNKCVNFNFNGLTGTGVLTESNKKFLPFQQFGRDIADTTDAVRDPQTLEILDITPCSFGGVSVITPGTNTSNQVAVLYQDVNCTEVPVAIHADQLTPTWRVYSTGSNVFQTRAGCLIGAEHVNNSYECDIPIGAGICASYQTQTNSPRRARSVASQSIIAYTMSLGAENSVAYSNNSIACPTNFTISVTTEILPVSMTKTSVDCTMYICGDSTECSNLLLQYGSFCTQLNRALTGIAVEQDKNTQEVFAQVKQIYKTPPIKDFGGFNFSQILPDPSKPSKRSFIEDLLFNKVTLADAGFIKQYGDCLGDIAARDLICAQKFNGLTVLPPLLTDEMIAQYTSALLAGTITSGWTFGAGAALQIPFAMQMAYRFNGIGVTQNVLYENQKLIANQFNSAIGKIQDSLSSTASALGKLQDVVNQNAQALNTLVKQLSSNFGAISSVLNDILSRLDKVEAEVQIDRLITGRLQSLQTYVTQQLIRAAEIRASANLAATKMSECVLGQSKRVDFCGKGYHLMSFPQSAPHGVVFLHVTYVPAQEKNFTTAPAICHDGKAHFPREGVFVSNGTHWFVTQRNFCEPQIITTDNTFVSGNCDVVIGIVNNTVYDPLQPELDSFKEELDKYFKNHTSPDVDLGDISGINASVVNIQKEIDRLNEVAKNLNESLIDLQELGKYEQYIKGGGSGGGQIYEGKLTAEGLRFGIVASRFNHALVDRLVEGAIDAIVRHGGREEDITLVRVPGSWEIPVAAGELARKEDIDAVIAIGVLIRGATPHFDYIASEVSKGLADLSLELRKPITFGVITADTLEQAIERAGTKHGNKGWEAALSAIEMANLFKSLR

SEQ ID NO: 4066 - protein, 1371 aa, Artificial Sequence
  SARS-CoV-2/USA/WA-UW292/2020__EPI_ISL_418077 spike protein (1-1211)(I714C_Y1110C) LumSynth construct
MFVFLVLLPLVSSQCVNLTTRTQLPPAYTNSFTRGVYYPDKVFRSSVLHSTQDLFLPFFSNVTWFHAIHVSGTNGTKRFDNPVLPFNDGVYFASTEKSNIIRGWIFGTTLDSKTQSLLIVNNATNVVIKVCEFQFCNDPFLGVYYHKNNKSWMESEFRVYSSANNCTFEYVSQPFLMDLEGKQGNFKNLREFVFKNIDGYFKIYSKHTPINLVRDLPQGFSALEPLVDLPIGINITRFQTLLALHRSYLTPGDSSSGWTAGAAAYYVGYLQPRTFLLKYNENGTITDAVDCALDPLSETKCTLKSFTVEKGIYQTSNFRVQPTESIVRFPNITNLCPFGEVFNATRFASVYAWNRKRISNCVADYSVLYNSASFSTFKCYGVSPTKLNDLCFTNVYADSFVIRGDEVRQIAPGQTGKIADYNYKLPDDFTGCVIAWNSNNLDSKVGGNYNYLYRLFRKSNLKPFERDISTEIYQASSTPCNGVEGFNCYFPLQSYGFQPTNGVGYQPYRVVVLSFELLHAPATVCGPKKSTNLVKNKCVNFNFNGLTGTGVLTESNKKFLPFQQFGRDIADTTDAVRDPQTLEILDITPCSFGGVSVITPGTNTSNQVAVLYQDVNCTEVPVAIHADQLTPTWRVYSTGSNVFQTRAGCLIGAEHVNNSYECDIPIGAGICASYQTQTNSPRRARSVASQSIIAYTMSLGAENSVAYSNNSIACPTNFTISVTTEILPVSMTKTSVDCTMYICGDSTECSNLLLQYGSFCTQLNRALTGIAVEQDKNTQEVFAQVKQIYKTPPIKDFGGFNFSQILPDPSKPSKRSFIEDLLFNKVTLADAGFIKQYGDCLGDIAARDLICAQKFNGLTVLPPLLTDEMIAQYTSALLAGTITSGWTFGAGAALQIPFAMQMAYRFNGIGVTQNVLYENQKLIANQFNSAIGKIQDSLSSTASALGKLQDVVNQNAQALNTLVKQLSSNFGAISSVLNDILSRLDKVEAEVQIDRLITGRLQSLQTYVTQQLIRAAEIRASANLAATKMSECVLGQSKRVDFCGKGYHLMSFPQSAPHGVVFLHVTYVPAQEKNFTTAPAICHDGKAHFPREGVFVSNGTHWFVTQRNFCEPQIITTDNTFVSGNCDVVIGIVNNTVYDPLQPELDSFKEELDKYFKNHTSPDVDLGDISGINASVVNIQKEIDRLNEVAKNLNESLIDLQELGKYEQYIKGGGSGGGQIYEGKLTAEGLRFGIVASRFNHALVDRLVEGAIDAIVRHGGREEDITLVRVPGSWEIPVAAGELARKEDIDAVIAIGVLIRGATPHFDYIASEVSKGLADLSLELRKPITFGVITADTLEQAIERAGTKHGNKGWEAALSAIEMANLFKSLR

SEQ ID NO: 4067 - protein, 1371 aa, Artificial Sequence
  SARS-CoV-2/Iceland/192/2020__EPI_ISL_417819 spike protein (1-1211)(I714C_Y1110C) LumSynth construct
MFVFFVLLPLVSSQCVNLTTRTQLPPAYTNSFTRGVYYPDKVFRSSVLHSTQDLFLPFFSNVTWFHAIHVSGTNGTKRFDNPVLPFNDGVYFASTEKSNIIRGWIFGTTLDSKTQSLLIVNNATNVVIKVCEFQFCNDPFLGVYYHKNNKSWMESEFRVYSSANNCTFEYVSQPFLMDLEGKQGNFKNLREFVFKNIDGYFKIYSKHTPINLVRDLPQGFSALEPLVDLPIGINITRFQTLLALHRSYLTPGDSSSGWTAGAAAYYVGYLQPRTFLLKYNENGTITDAVDCALDPLSETKCTLKSFTVEKGIYQTSNFRVQPTESIVRFPNITNLCPFGEVFNATRFASVYAWNRKRISNCVADYSVLYNSASFSTFKCYGVSPTKLNDLCFTNVYADSFVIRGDEVRQIAPGQTGKIADYNYKLPDDFTGCVIAWNSNNLDSKVGGNYNYLYRLFRKSNLKPFERDISTEIYQAGSTPCNGVEGFNCYFPLQSYGFQPTNGVGYQPYRVVVLSFELLHAPATVCGPKKSTNLVKNKCVNFNFNGLTGTGVLTESNKKFLPFQQFGRDIADTTDAVRDPQTLEILDITPCSFGGVSVITPGTNTSNQVAVLYQGVNCTEVPVAIHADQLTPTWRVYSTGSNVFQTRAGCLIGAEHVNNSYECDIPIGAGICASYQTQTNSPRRARSVASQSIIAYTMSLGAENSVAYSNNSIACPTNFTISVTTEILPVSMTKTSVDCTMYICGDSTECSNLLLQYGSFCTQLNRALTGIAVEQDKNTQEVFAQVKQIYKTPPIKDFGGFNFSQILPDPSKPSKRSFIEDLLFNKVTLADAGFIKQYGDCLGDIAARDLICAQKFNGLTVLPPLLTDEMIAQYTSALLAGTITSGWTFGAGAALQIPFAMQMAYRFNGIGVTQNVLYENQKLIANQFNSAIGKIQDSLSSTASALGKLQDVVNQNAQALNTLVKQLSSNFGAISSVLNDILSRLDKVEAEVQIDRLITGRLQSLQTYVTQQLIRAAEIRASANLAATKMSECVLGQSKRVDFCGKGYHLMSFPQSAPHGVVFLHVTYVPAQEKNFTTAPAICHDGKAHFPREGVFVSNGTHWFVTQRNFCEPQIITTDNTFVSGNCDVVIGIVNNTVYDPLQPELDSFKEELDKYFKNHTSPDVDLGDISGINASVVNIQKEIDRLNEVAKNLNESLIDLQELGKYEQYIKGGGSGGGQIYEGKLTAEGLRFGIVASRFNHALVDRLVEGAIDAIVRHGGREEDITLVRVPGSWEIPVAAGELARKEDIDAVIAIGVLIRGATPHFDYIASEVSKGLADLSLELRKPITFGVITADTLEQAIERAGTKHGNKGWEAALSAIEMANLFKSLR

SEQ ID NO: 4068 - protein, 1371 aa, Artificial Sequence
  SARS-CoV-2/Belgium/ULG-6939/2020__EPI_ISL_417020 spike protein (1-1211)(I714C_Y1110C) LumSynth construct
MFVFLVLLPLVSSQCVNLTTRTQLPPAYTNSFTRGVYYPDKVFRSSVLHSTQDLFLPFFSNVTWFHAIHVSGTNGTKRFDNPVLPFNDGVYFASTEKSNIIRGWIFGTTLDSKTQSLLIVNNATNVVIKVCEFQFCNDPFLGVYYHKNNKSWMESEFRVYSSANNCTFEYVSQPFLMDLEGKQGNFKNLREFVFKNIDGYFKIYSKHTPINLVRDLPQGFSALEPLVDLPIGINITRFQTLLALHRSYLTPGDSSSGWTAGAAAYYVGYLQPRTFLLKYNENGTITDAVDCALDPLSETKCTLKSFTVEKGIYQTSNFRVQPTESIVRFPNITNLCPFGEVFNATRFASVYAWNRKRISNCVADYSVLYNSASFSTFKCYGVSPTKLNDLCFTNVYADSFVIRGDEVRQIAPGQTGKIADYNYKLPDDFTGCVIAWNSNNLDSKVGGNYNYLYRLFRKSNLKPFERDISTEIYQAGSTPCNGVEGFNCYFPLQSYGFQPTNGVGYQPYRVVVLSFELLHAPATVCGPKKSTNLVKNKCVNFNFNGLTGTGVLTESNKKFLPFQQFGRDIADTTDAVRDPQTLEILDITPCSFGGVSVITPGTNTSNQVAVLYQGVNCTEVPVAIHADQLTPTWRVYSTGSNVFQTRAGCLIGAEHVNNSYECDIPIGAGICASYQTQTNSPRRARSVASQSIIAYTMSLGAENSVVYSNNSIACPTNFTISVTTEILPVSMTKTSVDCTMYICGDSTECSNLLLQYGSFCTQLNRALTGIAVEQDKNTQEVFAQVKQIYKTPPIKDFGGFNFSQILPDPSKPSKRSFIEDLLFNKVTLADAGFIKQYGDCLGDIAARDLICAQKFNGLTVLPPLLTDEMIAQYTSALLAGTITSGWTFGAGAALQIPFAMQMAYRFNGIGVTQNVLYENQKLIANQFNSAIGKIQDSLSSTASALGKLQDVVNQNAQALNTLVKQLSSNFGAISSVLNDILSRLDKVEAEVQIDRLITGRLQSLQTYVTQQLIRAAEIRASANLAATKMSECVLGQSKRVDFCGKGYHLMSFPQSAPHGVVFLHVTYVPAQEKNFTTAPAICHDGKAHFPREGVFVSNGTHWFVTQRNFCEPQIITTDNTFVSGNCDVVIGIVNNTVYDPLQPELDSFKEELDKYFKNHTSPDVDLGDISGINASVVNIQKEIDRLNEVAKNLNESLIDLQELGKYEQYIKGGGSGGGQIYEGKLTAEGLRFGIVASRFNHALVDRLVEGAIDAIVRHGGREEDITLVRVPGSWEIPVAAGELARKEDIDAVIAIGVLIRGATPHFDYIASEVSKGLADLSLELRKPITFGVITADTLEQAIERAGTKHGNKGWEAALSAIEMANLFKSLR

SEQ ID NO: 4069 - protein, 1371 aa, Artificial Sequence
  SARS-CoV-2/France/HF2496/2020__EPI_ISL_418231 spike protein (1-1211)(I714C_Y1110C) LumSynth construct
MFVFLVLLPLVSSQCVNLTTRTQLPPAYTNSFTRGVYYPDKVFRSSVLHSTQDLFLPFFSNVTWFHAIHVSGTNGTKRFDNPVLPFNDGVYFASTEKSNIIRGWIFGTTLDSKTQSLLIVNNATNVVIKVCEFQFCNDPFLGVYYHKNNKSWMESEFRVYSSANNCTFEYVSQPFLMDLEGKQGNFKNLREFVFKNIDGYFKIYSKHTPINLVRDLPQGFSALEPLVDLPIGINITRFQTLLALHRSYLTPGDSSSGWTAGAAAYYVGYLQPRTFLLKYNENGTITDAVDCALDPLSETKCTLKSFTVEKGIYQTSNFRVQPTESIVRFPNITNLCPFGEVFNATRFASVYAWNRKRISNCVADYSVLYNSASFSTFKCYGVSPTKLNDLCFTNVYADSFVIRGDEVRQIAPGQTGKIADYNYKLPDDFTGCVIAWNSNNLDSKVGGNYNYLYRLFRKSNLKPFERDISTEIYQAGSTPCNGVEGFNCYFPLQSYGFQPTNGVGYQPYRVVVLSFELLHAPATVCGPKKSTNLVKNKCVNFNFNGLTGTGVLTESNKKFLPFQQFGRDIADTTDAVRDPQTLEILDITPCSFGGVSVITPGTNTSNQVAVLYQGVNCTEVPVAIHADQLTPTWRVYSTGSNVFQTRAGCLIGAEHVNNSYECDIPIGAGICASYQTQTNSPRRARSVASQSIIAYTMSLGAENSVAYSNNSIACPTNFTISVTTEILPVSMTKTSVDCTMYICGDSTECSNLLLQYGSFCTQLNRALTGIAVEQDKNTQEVFAQVKQIYKTPPIKDFGGFNFSQILPDPSKPSKRSFIEDLLFNKVTLADAGFIKQYGDCLGDIVARDLICAQKFNGLTVLPPLLTDEMIAQYTSALLAGTITSGWTFGAGAALQIPFAMQMAYRFNGIGVTQNVLYENQKLIANQFNSAIGKIQDSLSSTASALGKLQDVVNQNAQALNTLVKQLSSNFGAISSVLNDILSRLDKVEAEVQIDRLITGRLQSLQTYVTQQLIRAAEIRASANLAATKMSECVLGQSKRVDFCGKGYHLMSFPQSAPHGVVFLHVTYVPAQEKNFTTAPAICHDGKAHFPREGVFVSNGTHWFVTQRNFCEPQIITTDNTFVSGNCDVVIGIVNNTVYDPLQPELDSFKEELDKYFKNHTSPDVDLGDISGINASVVNIQKEIDRLNEVAKNLNESLIDLQELGKYEQYIKGGGSGGGQIYEGKLTAEGLRFGIVASRFNHALVDRLVEGAIDAIVRHGGREEDITLVRVPGSWEIPVAAGELARKEDIDAVIAIGVLIRGATPHFDYIASEVSKGLADLSLELRKPITFGVITADTLEQAIERAGTKHGNKGWEAALSAIEMANLFKSLR

SEQ ID NO: 4070 - protein, 1371 aa, Artificial Sequence
  SARS-CoV-2/USA/WA-UW291/2020__EPI_ISL_418076 spike protein (1-1211)(I714C_Y1110C) LumSynth construct
MFVFLVLLPLVSSQCVNLTTRTQLPPAYTNSFTRGVYYPDKVFRSSVLHSTQDLFLPFFSNVTWFHAIHVSGTNGTKRFDNPVLPFNDGVYFASTEKSNIIRGWIFGTTLDSKTQSLLIVNNATNVVIKVCEFQFCNDPFLGVYYHKNNKSWMESEFRVYSSANNCTFEYVSQPFLMDLEGKQGNFKNLREFVFKNIDGYFKIYSKHTPINLVRDLPQGFSALEPLVDLPIGINITRFQTLLALHRSYLTPGDSSSGWTAGAAAYYVGYLQPRTFLLKYNENGTITDAVDCALDPLSETKCTLKSFTVEKGIYQTSNFRVQPTESIVRFPNITNLCPFGEVFNATRFASVYAWNRKRISNCVADYSVLYNSASFSTFKCYGVSPTKLNDLCFTNVYADSFVIRGDEVRQIAPGQTGKIADYNYKLPDDFTGCVIAWNSNNLDSKVGGNYNYLYRLFRKSNLKPFERDISTEIYQAGSTPCNGVEGFNCYFPLQSYGFQPTNGVGYQPYRVVVLSFELLHAPATVCGPKKSTNLVKNKCVNFNFNGLTGTGVLTESNKKFLPFQQFGRDIADTTDAVRDPQTLEILDITPCSFGGVSVITPGTNTSNQVAVLYQGVNCTEVPVAIHADQLTPTWRVYSTGSNVFQTRAGCLIGAEHVNNSYECDIPIGAGICASYQTQTNSPRRARSVASQSIIAYTMSLGAENSVAYSNNSIACPTNFTISVTTEILPVSMTKTSVDCTMYICGDSTECSNLLLQYGSFCTQLNRALTGIAVEQDKNTQEVFAQVKQIYKTPPIKDFGGFNFSQILPDPSKPSKRSFIEDLLFNKVTLADAGFIKQYGDCLGDIAARDLICAQKFNGLTVLPPLLTDEMIAQYTSALLAGTITSGWTFGAGAALQIPFAMQMAYRFNGIGVTQNVLYENQKLIANQFNSAIGKIQYSLSSTASALGKLQDVVNQNAQALNTLVKQLSSNFGAISSVLNDILSRLDKVEAEVQIDRLITGRLQSLQTYVTQQLIRAAEIRASANLAATKMSECVLGQSKRVDFCGKGYHLMSFPQSAPHGVVFLHVTYVPAQEKNFTTAPAICHDGKAHFPREGVFVSNGTHWFVTQRNFCEPQIITTDNTFVSGNCDVVIGIVNNTVYDPLQPELDSFKEELDKYFKNHTSPDVDLGDISGINASVVNIQKEIDRLNEVAKNLNESLIDLQELGKYEQYIKGGGSGGGQIYEGKLTAEGLRFGIVASRFNHALVDRLVEGAIDAIVRHGGREEDITLVRVPGSWEIPVAAGELARKEDIDAVIAIGVLIRGATPHFDYIASEVSKGLADLSLELRKPITFGVITADTLEQAIERAGTKHGNKGWEAALSAIEMANLFKSLR

SEQ ID NO: 4071 - protein, 1371 aa, Artificial Sequence; identical to SEQ ID NO: 4034
  SARS-CoV-2/Portugal/PT0034/2020__EPI_ISL_418019 spike protein (1-1211)(I714C_Y1110C) LumSynth construct

SEQ ID NO: 4072 - protein, 1371 aa, Artificial Sequence
  SARS-CoV-2/Iceland/202/2020__EPI_ISL_417750 spike protein (1-1211)(I714C_Y1110C) LumSynth construct
MFVFLVLLPLVSSQCVNLTTRTQLPPAYTNSFTRGVYYPDKVFRSSVLHSTQDLFLPFFSNVTWFHAIHVSGTNGTKRFDNPVLPFNDGVYFASTEKSNIIRGWIFGTTLDSKTQSLLIVNNATNVVIKVCEFQFCNDPFLGVYYHKNNKSWMESEFRVYSSANNCTFEYVSQPFLMDLEGKQGNFKNLREFVFKNIDGYFKIYSKHTPINLVRDLPQGFSALEPLVDLPIGINITRFQTLLALHRSYLTPGDSSSGWTAGAAAYYVGYLQPRTFLLKYNENGTITDAVDCALDPLSETKCTLKSFTVEKGIYQTSNFRVQPTESIVRFPNITNLCPFGEVFNATRFASVYAWNRKRISNCVADYSVLYNSASFSTFKCYGVSPTKLNDLCFTNVYADSFVIRGDEVRQIAPGQTGKIADYNYKLPDDFTGCVIAWNSNNLDSKVGGNYNYLYRLFRKSNLKPFERDISTEIYQAGSTPCNGVEGFNCYFPLQSYGFQPTNGVGYQPYRVVVLSFELLHAPATVCGPKKSTNLVKNKCVNFNFNGLTGTGVLTESNKKFLPFQQFGRDIADTTDAVRDPQTLEILDITPCSFGGVSVITPGTNTSNQVAVLYQDVNCTEVPVAIHADQLTPTWRVYSTGSNVFQTRAGCLIGAEHVNNSYECDIPIGAGICASYQTQTNSPRRARSVASQSIIAYTMSLGAENSVAYSNNSIACPTNFTISVTTEILPVSMTKTSVDCTMYICGDSTECSNLLLQYGSFCTQLNRALTGIAVEQDKNTQEVFAQVKQIYKTPPIKDFGGFNFSQILPDPSKPSKRSFIEDLLFNKVTLADAGFIKQYGDCLGDIAARDLICAQKFNGLTVLPPLLTDEMIAQYTSALLAGTITSGWTFGAGAALQIPFAMQMAYRFNGIGVTQNVLYENQKLIANQFNSAIGKIQDSLSSTASALGKLQDVVNQNAQALNTLVKQLSSNFGAISSVLNDILSRLDKVEAEVQIDRLITGRLQSLQTYVTQQLIRAAEIRASANLAATKMSECVLGQSKRVDFCGKGYHLMSFPQSAPHGVVFLHVTYVPAQEKNFTTAPAICHDGKAHFPREGVFVSNGTHWFVTQRNFCEPQIITTDNTFVSGNCDVVIGIVNNTVYDPLQPELDSFKEELDKYFKNHTSPDVDLGDIPGINASVVNIQKEIDRLNEVAKNLNESLIDLQELGKYEQYIKGGGSGGGQIYEGKLTAEGLRFGIVASRFNHALVDRLVEGAIDAIVRHGGREEDITLVRVPGSWEIPVAAGELARKEDIDAVIAIGVLIRGATPHFDYIASEVSKGLADLSLELRKPITFGVITADTLEQAIERAGTKHGNKGWEAALSAIEMANLFKSLR

SEQ ID NO: 4073 - protein, 1371 aa, Artificial Sequence
  SARS-CoV-2/USA/WA-UW261/2020__EPI_ISL_418046 spike protein (1-1211)(I714C_Y1110C) LumSynth construct
MFVFLVLLPLVSSQCVNLTTRTQLPPAYTNSFTRGVYYPDKVFRSSVLHSTQDLFLPFFSNVTWFHAIHVSGTNGTKRFDNPVLPFNDGVYFASTEKSNIIRGWIFGTTLDSKTQSLLIVNNATNVVIKVCEFQFCNDPFLGVYYHKNNKSWMESEFRVYSSANNCTFEYVSQPFLMDLEGKQGNFKNLREFVFKNIDGYFKIYSKHTPINLVRDLPQGFSALEPLVDLPIGINITRFQTLLALHRSYLTPGDSSSGWTAGAAAYYVGYLQPRTFLLKYNENGTITDAVDCALDPLSETKCTLKSFTVEKGIYQTSNFRVQPTESIVRFPNITNLCPFGEVFNATRFTSVYAWNRKRISNCVADYSVLYNSASFSTFKCYGVSPTKLNDLCFTNVYADSFVIRGDEVRQIAPGQTGKIADYNYKLPDDFTGCVIAWNSNNLDSKVGGNYNYLYRLFRKSNLKPFERDISTEIYQAGSTPCNGVEGFNCYFPLQSYGFQPTNGVGYQPYRVVVLSFELLHAPATVCGPKKSTNLVKNKCVNFNFNGLTGTGVLTESNKKFLPFQQFGRDIADTTDAVRDPQTLEILDITPCSFGGVSVITPGTNTSNQVAVLYQDVNCTEVPVAIHADQLTPTWRVYSTGSNVFQTRAGCLIGAEHVNNSYECDIPIGAGICASYQTQTNSPRRARSVASQSIIAYTMSLGAENSVAYSNNSIACPTNFTISVTTEILPVSMTKTSVDCTMYICGDSTECSNLLLQYGSFCTQLNRALTGIAVEQDKNTQEVFAQVKQIYKTPPIKDFGGFNFSQILPDPSKPSKRSFIEDLLFNKVTLADAGFIKQYGDCLGDIAARDLICAQKFNGLTVLPPLLTDEMIAQYTSALLAGTITSGWTFGAGAALQIPFAMQMAYRFNGIGVTQNVLYENQKLIANQFNSAIGKIQDSLSSTASALGKLQDVVNQNAQALNTLVKQLSSNFGAISSVLNDILSRLDKVEAEVQIDRLITGRLQSLQTYVTQQLIRAAEIRASANLAATKMSECVLGQSKRVDFCGKGYHLMSFPQSAPHGVVFLHVTYVPAQEKNFTTAPAICHDGKAHFPREGVFVSNGTHWFVTQRNFCEPQIITTDNTFVSGNCDVVIGIVNNTVYDPLQPELDSFKEELDKYFKNHTSPDVDLGDISGINASVVNIQKEIDRLNEVAKNLNESLIDLQELGKYEQYIKGGGSGGGQIYEGKLTAEGLRFGIVASRFNHALVDRLVEGAIDAIVRHGGREEDITLVRVPGSWEIPVAAGELARKEDIDAVIAIGVLIRGATPHFDYIASEVSKGLADLSLELRKPITFGVITADTLEQAIERAGTKHGNKGWEAALSAIEMANLFKSLR

SEQ ID NO: 4074 - protein, 1371 aa, Artificial Sequence
  SARS-CoV-2/Portugal/PT0035/2020__EPI_ISL_418020 spike protein (1-1211)(I714C_Y1110C) LumSynth construct
MFVFLVLLPLVSSQCVNLTTRTQLPPAYTNSFTRGVYYPDKVFRSSVLHSTQDLFLPFFSNVTWFHAIHVSGTNGTKRFDNPVLPFNDGVYFASTEKSNIIRGWIFGTTLDSKTQSLLIVNNATNVVIKVCEFQFCNDPFLGVYYHKNNKSWMESEFRVYSSANNCTFEYVSQPFLMDLEGKQGNFKNLREFVFKNIDGYFKIYSKHTPINLVRDLPQGFSALEPLVDLPIGINITRFQTLLALHRSYLTPGDSSSGWTAGAAAYYVGYLQPRTFLLKYNENGTITDAVDCALDPLSETKCTLKSFTVEKGIYQTSNFRVQPTESIVRFPNITNLCPFGEVFNATRFASVYAWNRKRISNCVADYSVLYNSASFSTFKCYGVSPTKLNDLCFTNVYADSFVIRGDEVRQIAPGQTGKIADYNYKLPDDFTGCVIAWNSNNLDSKVGGNYNYLYRLFRKSNLKPFERDISTEIYQAGSTPCNGVEGFNCYFPLQSYGFQPTNGVGYQPYRVVVLSFELLHAPATVCGPKKSTNLVKNKCVNFNFNGLTGTGVLTESNKKFLPFQQFGRDIADTTDAVRDPQTLEILDITPCSFGGVSVITPGTNTSNQVAVLYQDVNCTEVPVAIHADQLTPTWRVYSTGSNVFQTRAGCLIGAEHVNNSYECDIPIGAGICASYQTQTNSPRRARSVASQSIIAYTMSLGAENSVAYSNNSIACPTNFTISVTTEILPVSMTKTSVDCTMYICGDSTECSNLLLQYGSFCTQLNRALTGIAVEQDKNTQEVFAQVKQIYKTPPIKDFGGFNFSQILPDPSKPSKRSFIEDLLFNKVTLADAGFIKQYGDCLGDISARDLICAQKFNGLTVLPPLLTDEMIAQYTSALLAGTITSGWTFGAGAALQIPFAMQMAYRFNGIGVTQNVLYENQKLIANQFNSAIGKIQDSLSSTASALGKLQDVVNQNAQALNTLVKQLSSNFGAISSVLNDILSRLDKVEAEVQIDRLITGRLQSLQTYVTQQLIRAAEIRASANLAATKMSECVLGQSKRVDFCGKGYHLMSFPQSAPHGVVFLHVTYVPAQEKNFTTAPAICHDGKAHFPREGVFVSNGTHWFVTQRNFCEPQIITTDNTFVSGNCDVVIGIVNNTVYDPLQPELDSFKEELDKYFKNHTSPDVDLGDISGINASVVNIQKEIDRLNEVAKNLNESLIDLQELGKYEQYIKGGGSGGGQIYEGKLTAEGLRFGIVASRFNHALVDRLVEGAIDAIVRHGGREEDITLVRVPGSWEIPVAAGELARKEDIDAVIAIGVLIRGATPHFDYIASEVSKGLADLSLELRKPITFGVITADTLEQAIERAGTKHGNKGWEAALSAIEMANLFKSLR

SEQ ID NO: 4075 - protein, 1371 aa, Artificial Sequence
  SARS-CoV-2/USA/NY-NYUMC7/2020__EPI_ISL_418192 spike protein (1-1211)(I714C_Y1110C) LumSynth construct
MFVFLVLLPLVSSQCVNLTTRTQLPPAYTNSFTRGVYYPDKVFRSSVLHSTQDLFLPFFSNVTWFHAIHVSGTNGTKRFDNPVLPFNDGVYFASTEKSNIIRGWIFGTTLDSKTQSLLIVNNATNVVIKVCEFQFCNDPFLGVYHHKNNKSWMESEFRVYSSANNCTFEYVSQPFLMDLEGKQGNFKNLREFVFKNIDGYFKIYSKHTPINLVRDLPQGFSALEPLVDLPIGINITRFQTLLALHRSYLTPGDSSSGWTAGAAAYYVGYLQPRTFLLKYNENGTITDAVDCALDPLSETKCTLKSFTVEKGIYQTSNFRVQPTESIVRFPNITNLCPFGEVFNATRFASVYAWNRKRISNCVADYSVLYNSASFSTFKCYGVSPTKLNDLCFTNVYADSFVIRGDEVRQIAPGQTGKIADYNYKLPDDFTGCVIAWNSNNLDSKVGGNYNYLYRLFRKSNLKPFERDISTEIYQAGSTPCNGVEGFNCYFPLQSYGFQPTNGVGYQPYRVVVLSFELLHAPATVCGPKKSTNLVKNKCVNFNFNGLTGTGVLTESNKKFLPFQQFGRDIADTTDAVRDPQTLEILDITPCSFGGVSVITPGTNTSNQVAVLYQGVNCTEVPVAIHADQLTPTWRVYSTGSNVFQTRAGCLIGAEHVNNSYECDIPIGAGICASYQTQTNSPRRARSVASQSIIAYTMSLGAENSVAYSNNSIACPTNFTISVTTEILPVSMTKTSVDCTMYICGDSTECSNLLLQYGSFCTQLNRALTGIAVEQDKNTQEVFAQVKQIYKTPPIKDFGGFNFSQILPDPSKPSKRSFIEDLLFNKVTLADAGFIKQYGDCLGDIAARDLICAQKFNGLTVLPPLLTDEMIAQYTSALLAGTITSGWTFGAGAALQIPFAMQMAYRFNGIGVTQNVLYENQKLIANQFNSAIGKIQDSLSSTASALGKLQDVVNQNAQALNTLVKQLSSNFGAISSVLNDILSRLDKVEAEVQIDRLITGRLQSLQTYVTQQLIRAAEIRASANLAATKMSECVLGQSKRVDFCGKGYHLMSFPQSAPHGVVFLHVTYVPAQEKNFTTAPAICHDGKAHFPREGVFVSNGTHWFVTQRNFCEPQIITTDNTFVSGNCDVVIGIVNNTVYDPLQPELDSFKEELDKYFKNHTSPDVDLGDISGINASVVNIQKEIDRLNEVAKNLNESLIDLQELGKYEQYIKGGGSGGGQIYEGKLTAEGLRFGIVASRFNHALVDRLVEGAIDAIVRHGGREEDITLVRVPGSWEIPVAAGELARKEDIDAVIAIGVLIRGATPHFDYIASEVSKGLADLSLELRKPITFGVITADTLEQAIERAGTKHGNKGWEAALSAIEMANLFKSLR

SEQ ID NO: 4076 - protein, 1371 aa, Artificial Sequence
  SARS-CoV-2/Iceland/189/2020__EPI_ISL_417709 spike protein (1-1211)(I714C_Y1110C) LumSynth construct
MFVFLVLLPLVSSQCVNLTTRTQLPPAYTNSFTRGVYYPDKVFRSSVLHSTQDLFLPFFSNVTWFHAIHVSGTNGTKRFDNPVLPFNDGVYFASTEKSNIIRGWIFGTTLDSKTQSLLIVNNATNVVIKVCEFQFCNDPFLGVYYHKNNKSWMESEFRVYSSANNCTFEYVSQPFLMDLEGKQGNFKNLREFVFKNIDGYFKIYSKHTPINLVRDLPQGFSALEPLVDLPIGINITRFQTLLALHRSYLTPGDSSSGWTAGAAAYYVGYLQPRTFLLKYNENGTITDAVDCALDPLSETKCTLKSFTVEKGIYQTSNFRVQPTESIVRFPNITNLCPFGEVFNATRFASVYAWNRKRISNCVADYSVLYNSASFSTFKCYGVSPTKLNDLCFTNVYADSFVIRGDEVRQIAPGQTGKIADYNYKLPDDFTGCVIAWNSNNLDSKVGGNYNYLYRLFRKSNLKPFERDISTEIYQAGSTPCNGVEGFNCYFPLQSYGFQPTNGVGYQPYRVVVLSFELLHAPATVCGPKKSTNLVKNKCVNFNFNGLTGTGVLTESNKKFLPFQQFGRDIADTTDAVRDPQTLEILDITPCSFGGVSVITPGTNTSNQVAVLYQGVNCTEVPVAIHADQLTPTWRVYSTGSNVFQTRAGCLIGAEHVNNSYECDIPIGAGICASYQTQTNSPRRARSVASQSIIAYTMSLGAENSVAYSNNSIACPTNFTISVTTEILPVSMTKTSVDCTMYICGDSTECSNLLLQYGSFCTQLNRALTGIAVEQDKNTQEVFAQVKQIYKTPPIKDFGGFNFSQILPDPSKPSKRSFIEDLLFNKVTLADAGFTKQYGDCLGDIAARDLICAQKFNGLTVLPPLLTDEMIAQYTSALLAGTITSGWTFGAGAALQIPFAMQMAYRFNGIGVTQNVLYENQKLIANQFNSAIGKIQDSLSSTASALGKLQDVVNQNAQALNTLVKQLSSNFGAISSVLNDILSRLDKVEAEVQIDRLITGRLQSLQTYVTQQLIRAAEIRASANLAATKMSECVLGQSKRVDFCGKGYHLMSFPQSAPHGVVFLHVTYVPAQEKNFTTAPAICHDGKAHFPREGVFVSNGTHWFVTQRNFCEPQIITTDNTFVSGNCDVVIGIVNNTVYDPLQPELDSFKEELDKYFKNHTSPDVDLGDISGINASVVNIQKEIDRLNEVAKNLNESLIDLQELGKYEQYIKGGGSGGGQIYEGKLTAEGLRFGIVASRFNHALVDRLVEGAIDAIVRHGGREEDITLVRVPGSWEIPVAAGELARKEDIDAVIAIGVLIRGATPHFDYIASEVSKGLADLSLELRKPITFGVITADTLEQAIERAGTKHGNKGWEAALSAIEMANLFKSLR

SEQ ID NO: 4077 - protein, 1371 aa, Artificial Sequence
  SARS-CoV-2/Australia/NSW56/2020__EPI_ISL_417408 spike protein (1-1211)(I714C_Y1110C) LumSynth construct
MFVFLVLLPLVSSQCVNLTTRTQLPPAYTNSFTRGVYYPDKVFRSSVLHSTQDLFLPFFSNVTWFHAIHVSGTNGTKRFDNPVLPFNDGVYFASTEKSNIIRGWIFGTTLDSKTQSLLIVNNATNVVIKVCEFQFCNDPFLGVYYHKNNKSWMESEFRVYSSANNCTFEYVSQPFLMDLEGKQGNFKNLREFVFKNIDGYFKIYSKHTPINLVRDLPQGFSALEPLVDLPIGINITRFQTLLALHRSYLTPGDSSSGWTAGAAAYYVGYLQPRTFLLKYNENGTITDAVDCALDPLSETKCTLKSFTVEKGIYQTSNFRVQPTESIVRFPNITNLCPFGEVFNATRFASVYAWNRKRISNCVADYSVLYNSASFSTFKCYGVSPTKLNDLCFTNVYADSFVIRGDEVRQIAPGQTGKIADYNYKLPDDFTGCVIAWNSNNLDSKVGGNYNYLYRLFRKSNLKPFERDISTEIYQAGSTPCNGVEGFNCYFPLQSYGFQPTNGVGYQPYRVVVLSFELLHAPATVCGPKKSTNLVKNKCVNFNFNGLTGTGVLTESNKKFLPFQQFGRDIADTTDAVRDPQTLEILDITPCSFGGVSVITPGTNTSNQVAVLYQDVNCTEVPVAIHADQLTPTWRVYSTGSNVFQTRAGCLIGAEHVNNSYECDIPIGAGICASYQTQTNSPRRARSVASQSIIAYTMSLGAENSVAYSNNSIACPTNFTISVTTEILPVSMTKTSVDCTMYICGDSTECSNLLLQYGSFCTQLNRALTGIAVEQDKNTQEVFAQVKQIYKTPPIKDFGGFNFSQILPDSSKPSKRSFIEDLLFNKVTLADAGFIKQYGDCLGDIAARDLICAQKFNGLTVLPPLLTDEMIAQYTSALLAGTITSGWTFGAGAALQIPFAMQMAYRFNGIGVTQNVLYENQKLIANQFNSAIGKIQDSLSSTASALGKLQDVVNQNAQALNTLVKQLSSNFGAISSVLNDILSRLDKVEAEVQIDRLITGRLQSLQTYVTQQLIRAAEIRASANLAATKMSECVLGQSKRVDFCGKGYHLMSFPQSAPHGVVFLHVTYVPAQEKNFTTAPAICHDGKAHFPREGVFVSNGTHWFVTQRNFCEPQIITTDNTFVSGNCDVVIGIVNNTVYDPLQPELDSFKEELDKYFKNHTSPDVDLGDISGINASVVNIQKEIDRLNEVAKNLNESLIDLQELGKYEQYIKGGGSGGGQIYEGKLTAEGLRFGIVASRFNHALVDRLVEGAIDAIVRHGGREEDITLVRVPGSWEIPVAAGELARKEDIDAVIAIGVLIRGATPHFDYIASEVSKGLADLSLELRKPITFGVITADTLEQAIERAGTKHGNKGWEAALSAIEMANLFKSLR

SEQ ID NO: 4078 - protein, 1371 aa, Artificial Sequence
  SARS-CoV-2/Iceland/280/2020__EPI_ISL_417608 spike protein (1-1211)(I714C_Y1110C) LumSynth construct
MFVFLVLLPLVSSQCVNLTTRTQLPPAYTNSFTRGVYYPDKVFRSSVLHSTQDLFLPFFSNVTWFHAIHVSGTNGTKRFDNPVLPFNDGVYFASTEKSNIIRGWIFGTTLDSKTQSLLIVNNATNVVIKVCEFQFCNDPFLGVYYHKNNKSWMESEFRVYSSANNCTFEYVSQPFLMDLEGKQGNFKNLREFVFKNIDGYFKIYSKHTPINLVRDLPQGFSALEPLVDLPIGINITRFQTLLALHRSYLTPGDSSSGWTAGAAAYYVGYLQPRTFLLKYNENGTITDAVDCALDPLSETKCTLKSFTVEKGIYQTSNFRVQPTESIVRFPNITNLCPFGEVFNATRFASVYAWNRKRISNCVADYSVLYNSASFSTFKCYGVSPTKLNDLCFTNVYADSFVIRGDEVRQIAPGQTGKIADYNYKLPDDFTGCVIAWNSNNLDSKVGGNYNYLYRLFRKSNLKPFERDISTEIYQAGSTPCNGVEGFNCYFPLQSYGFQPTNGVGYQPYRVVVLSFELLHAPATVCGPKKSTNLVKNKCVNFNFNGLTGTGVLTESNKKFLPFQQFGRDIADTTDAVRDPQTLEILDITPCSFGGVSVITPGTNTSNQVAVLYQGVNCTEVPVAIHADQLTPTWRVYSTGSNVFQTRAGCLIGAEHVNNSYECDIPIGAGICASYHTQTNSPRRARSVASQSIIAYTMSLGAENSVAYSNNSIACPTNFTISVTTEILPVSMTKTSVDCTMYICGDSTECSNLLLQYGSFCTQLNRALTGIAVEQDKNTQEVFAQVKQIYKTPPIKDFGGFNFSQILPDPSKPSKRSFIEDLLFNKVTLADAGFIKQYGDCLGDIAARDLICAQKFNGLTVLPPLLTDEMIAQYTSALLAGTITSGWTFGAGAALQIPFAMQMAYRFNGIGVTQNVLYENQKLIANQFNSAIGKIQDSLSSTASALGKLQDVVNQNAQALNTLVKQLSSNFGAISSVLNDILSRLDKVEAEVQIDRLITGRLQSLQTYVTQQLIRAAEIRASANLAATKMSECVLGQSKRVDFCGKGYHLMSFPQSAPHGVVFLHVTYVPAQEKNFTTAPAICHDGKAHFPREGVFVSNGTHWFVTQRNFCEPQIITTDNTFVSGNCDVVIGIVNNTVYDPLQPELDSFKEELDKYFKNHTSPDVDLGDISGINASVVNIQKEIDRLNEVAKNLNESLIDLQELGKYEQYIKGGGSGGGQIYEGKLTAEGLRFGIVASRFNHALVDRLVEGAIDAIVRHGGREEDITLVRVPGSWEIPVAAGELARKEDIDAVIAIGVLIRGATPHFDYIASEVSKGLADLSLELRKPITFGVITADTLEQAIERAGTKHGNKGWEAALSAIEMANLFKSLR

SEQ ID NO: 4079 - protein, 1371 aa, Artificial Sequence; identical to SEQ ID NO: 4034
  SARS-CoV-2/Iceland/247/2020__EPI_ISL_417575 spike protein (1-1211)(I714C_Y1110C) LumSynth construct

SEQ ID NO: 4080 - protein, 1371 aa, Artificial Sequence
  SARS-CoV-2/Iceland/238/2020__EPI_ISL_417566 spike protein (1-1211)(I714C_Y1110C) LumSynth construct
MFVFLVLLPLVSSQCVNLTTRTQLPPAYTNSFTRGVYYPDKVFRSSVLHSTQDLFLPFFSNVTWFHAIHVSGTNGTKRFDNPVLPFNDGVYFASTEKSNIIRGWIFGTTLDSKTQSLLIVNNATNVVIKVCEFQFCNDPFLGVYYHKNNKSWMESEFRVYSSANNCTFEYVSQPFLMDLEGKQGNFKNLREFVFKNIDGYFKIYSKHTPINLVRDLPQGFSALEPLVDLPIGINITRFQTLLALHRSYLTPGDSSSGWTAGAAAYYVGYLQPRTFLLKYNENGTITDAVDCALDPLSETKCTLKSFTVEKGIYQTSNFRVQPTESIVRFPNITNLCPFGEVFNATRFASVYAWNRKRISNCVADYSVLYNSASFSTFKCYGVSPTKLNDLCFTNVYADSFVIRGDEVRQIAPGQTGKIADYNYKLPDDFTGCVIAWNSNNLDSKVGGNYNYLYRLFRKSNLKPFERDISTEIYQAGSTPCNGVEGFNCYFPLQSYGFQPTNGVGYQPYRVVVLSFELLHAPATVCGPKKSTNLVKNKCVNFNFNGLTGTGVLTESNKKFLPFQQFGRDIADTTDAVRDPQTLEILDITPCSFGGVSVITPGTNTSNQVAVLYQGVNCTEVPVAIHADQLTPTWRVYSTGSNVFQTRAGCLIGAEHVNNSYECDIPIGAGICASYQTQTNSPRRARSVASQSIIAYTMSLGAENSVAYSNNSIACPTNFTISVTTEILPVSMTKTSVDCTMYICGDSTECSNLLLQYGSFCTQLNRALTGIAVEQDKNTQEVFAQVKQIYKTPPIKDFGGFNFSQILPDPSKPSKRSFIEDLLFNKVTLADVGFIKQYGDCLGDIAARDLICAQKFNGLTVLPPLLTDEMIAQYTSALLAGTITSGWTFGAGAALQIPFAMQMAYRFNGIGVTQNVLYENQKLIANQFNSAIGKIQDSLSSTASALGKLQDVVNQNAQALNTLVKQLSSNFGAISSVLNDILSRLDKVEAEVQIDRLITGRLQSLQTYVTQQLIRAAEIRASANLAATKMSECVLGQSKRVDFCGKGYHLMSFPQSAPHGVVFLHVTYVPAQEKNFTTAPAICHDGKAHFPREGVFVSNGTHWFVTQRNFCEPQIITTDNTFVSGNCDVVIGIVNNTVYDPLQPELDSFKEELDKYFKNHTSPDVDLGDISGINASVVNIQKEIDRLNEVAKNLNESLIDLQELGKYEQYIKGGGSGGGQIYEGKLTAEGLRFGIVASRFNHALVDRLVEGAIDAIVRHGGREEDITLVRVPGSWEIPVAAGELARKEDIDAVIAIGVLIRGATPHFDYIASEVSKGLADLSLELRKPITFGVITADTLEQAIERAGTKHGNKGWEAALSAIEMANLFKSLR

SEQ ID NO: 4081 - protein, 1371 aa, Artificial Sequence
  SARS-CoV-2/Greece/16/2020__EPI_ISL_418265 spike protein (1-1211)(I714C_Y1110C) LumSynth construct
MFVFLVLLPLVSSQCVNLTTRTQLPPAYTNSFTRGVYYPDKVFRSSVLHSTQDLFLPFFSNVTWFHAIHVSGTNGTKRFDNPVLPFNDGVYFASTEKSNIIRGWIFGTTLDSKTQSLLIVNNATNVVIKVCEFQFCNDPFLGVYYHKNNKSWMESEFRVYSSANNCTFEYVSQPFLMDLEGKQGNFKNLREFVFKNVDGYFKIYSKHTPINLVRDLPQGFSALEPLVDLPIGINITRFQTLLALHRSYLTPGDSSSGWTAGAAAYYVGYLQPRTFLLKYNENGTITDAVDCALDPLSETKCTLKSFTVEKGIYQTSNFRVQPTESIVRFPNITNLCPFGEVFNATRFASVYAWNRKRISNCVADYSVLYNSASFSTFKCYGVSPTKLNDLCFTNVYADSFVIRGDEVRQIAPGQTGKIADYNYKLPDDFTGCVIAWNSNNLDSKVGGNYNYLYRLFRKSNLKPFERDISTEIYQAGSTPCNGVEGFNCYFPLQSYGFQPTNGVGYQPYRVVVLSFELLHAPATVCGPKKSTNLVKNKCVNFNFNGLTGTGVLTESNKKFLPFQQFGRDIADTTDAVRDPQTLEILDITPCSFGGVSVITPGTNTSNQVAVLYQDVNCTEVPVAIHADQLTPTWRVYSTGSNVFQTRAGCLIGAEHVNNSYECDIPIGAGICASYQTQTNSPRRARSVASQSIIAYTMSLGAENSVAYSNNSIACPTNFTISVTTEILPVSMTKTSVDCTMYICGDSTECSNLLLQYGSFCTQLNRALTGIAVEQDKNTQEVFAQVKQIYKTPPIKDFGGFNFSQILPDPSKPSKRSFIEDLLFNKVTLADAGFIKQYGDCLGDIAARDLICAQKFNGLTVLPPLLTDEMIAQYTSALLAGTITSGWTFGAGAALQIPFAMQMAYRFNGIGVTQNVLYENQKLIANQFNSAIGKIQDSLSSTASALGKLQDVVNQNAQALNTLVKQLSSNFGAISSVLNDILSRLDKVEAEVQIDRLITGRLQSLQTYVTQQLIRAAEIRASANLAATKMSECVLGQSKRVDFCGKGYHLMSFPQSAPHGVVFLHVTYVPAQEKNFTTAPAICHDGKAHFPREGVFVSNGTHWFVTQRNFCEPQIITTDNTFVSGNCDVVIGIVNNTVYDPLQPELDSFKEELDKYFKNHTSPDVDLGDISGINASVVNIQKEIDRLNEVAKNLNESLIDLQELGKYEQYIKGGGSGGGQIYEGKLTAEGLRFGIVASRFNHALVDRLVEGAIDAIVRHGGREEDITLVRVPGSWEIPVAAGELARKEDIDAVIAIGVLIRGATPHFDYIASEVSKGLADLSLELRKPITFGVITADTLEQAIERAGTKHGNKGWEAALSAIEMANLFKSLR

SEQ ID NO: 4082 - protein, 1371 aa, Artificial Sequence
  SARS-CoV-2/Iceland/319/2020__EPI_ISL_417648 spike protein (1-1211)(I714C_Y1110C) LumSynth construct
MFVFLVLLPLVSSQCVNLTTRTQLPPAYTNSFTRGVYYPDKVFRSSVLHSTQDLFLPFFSNVTWFHAIHVSGTNGTKRFDNPVLPFNDGVYFASTEKSNIIRGWIFGTTLDSKTQSLLIVNNATNVVIKVCEFQFCNDPFLGVYYHKNNKSWMESEFRVYSSANNCTFEYVSQPFLIDLEGKQGNFKNLREFVFKNIDGYFKIYSKHTPINLVRDLPQGFSALEPLVDLPIGINITRFQTLLALHRSYLTPGDSSSGWTAGAAAYYVGYLQPRTFLLKYNENGTITDAVDCALDPLSETKCTLKSFTVEKGIYQTSNFRVQPTESIVRFPNITNLCPFGEVFNATRFASVYAWNRKRISNCVADYSVLYNSASFSTFKCYGVSPTKLNDLCFTNVYADSFVIRGDEVRQIAPGQTGKIADYNYKLPDDFTGCVIAWNSNNLDSKVGGNYNYLYRLFRKSNLKPFERDISTEIYQAGSTPCNGVEGFNCYFPLQSYGFQPTNGVGYQPYRVVVLSFELLHAPATVCGPKKSTNLVKNKCVNFNFNGLTGTGVLTESNKKFLPFQQFGRDIADTTDAVRDPQTLEILDITPCSFGGVSVITPGTNTSNQVAVLYQGVNCTEVPVAIHADQLTPTWRVYSTGSNVFQTRAGCLIGAEHVNNSYECDIPIGAGICASYQTQTNSPRRARSVASQSIIAYTMSLGAENSVAYSNNSIACPTNFTISVTTEILPVSMTKTSVDCTMYICGDSTECSNLLLQYGSFCTQLNRALTGIAVEQDKNTQEVFAQVKQIYKTPPIKDFGGFNFSQILPDPSKPSKRSFIEDLLFNKVTLADAGFIKQYGDCLGDIAARDLICAQKFNGLTVLPPLLTDEMIAQYTSALLAGTITSGWTFGAGAALQIPFAMQMAYRFNGIGVTQNVLYENQKLIANQFNSAIGKIQDSLSSTASALGKLQDVVNQNAQALNTLVKQLSSNFGAISSVLNDILSRLDKVEAEVQIDRLITGRLQSLQTYVTQQLIRAAEIRASANLAATKMSECVLGQSKRVDFCGKGYHLMSFPQSAPHGVVFLHVTYVPAQEKNFTTAPAICHDGKAHFPREGVFVSNGTHWFVTQRNFCEPQIITTDNTFVSGNCDVVIGIVNNTVYDPLQPELDSFKEELDKYFKNHTSPDVDLGDISGINASVVNIQKEIDRLNEVAKNLNESLIDLQELGKYEQYIKGGGSGGGQIYEGKLTAEGLRFGIVASRFNHALVDRLVEGAIDAIVRHGGREEDITLVRVPGSWEIPVAAGELARKEDIDAVIAIGVLIRGATPHFDYIASEVSKGLADLSLELRKPITFGVITADTLEQAIERAGTKHGNKGWEAALSAIEMANLFKSLR

SEQ ID NO: 4083 - protein, 1371 aa, Artificial Sequence
  SARS-CoV-2/Congo/94/2020__EPI_ISL_417947 spike protein (1-1211)(I714C_Y1110C) LumSynth construct
MFVFLVLLPLVSSQCVNLTTRTQLPPAYTNSFTRGVYYPDKVFRSSVLHSTQDLFLPFFSNVTWFHAIHVSGTNGTKRFDNPVLPFNDGVYFASTEKSNIIRGWIFGTTLDSKTQSLLIVNNATNVVIKVCEFQFCNDPFLGVYYHKNNKSWMESEFRVYSSANNCTFEYVSQPFLMDLEGKQGNFKNLREFVFKNIDGYFKIYSKHTPINLVRDLPQGFSALEPLVDLPIGINITRFQTLLALHRSYLTPGDSSSGWTAGAAAYYVGYLQPRTFLLKYNENGTITDAVDCALDPLSETKCTLKSFTVEKGIYQTSNFRVQPTESIVRFPNITNLCPFGEVFNATRFASVYAWNRKRISNCVADYSVLYNSASFSTFKCYGVSPTKLNDLCFTNVYADSFVIRGDEVRQIAPGQTGKIADYNYKLPDDFTGCVIAWNSNNLDSKVGGNYNYLYRLFRKSNLKPFERDISTEIYQAGSTPCNGVEGFNCYFPLQSYGFQPTNGVGYQPYRVVVLSFELLHAPATVCGPKKSTNLVKNKCVNFNFNGLTGTGVLTESNKKFLPFQQFGRDIADTTDAVRDPQTLEILDITPCSFGGVSVITPGTNTSNQVAVLYQGVNCTEVPVAIHADQLTPTWRVYSTGSNVFQTRAGCLIGAEHVNNSYECDIPIGAGICASYQTQTNSPRRARSVASQSIIAYTMSLGAENSVAYSNNSIACPTNFTISVTTEILPVSMTKTSVDCTMYICGDSTECSNLLLQYGSFCTQLNRALTGIAVEQDKNTQEVFAQVKQIYKTPPIKDFGGFNFSQILPDPSKPSKRSFIEDILFNKVTLADAGFIKQYGDCLGDIAARDLICAQKFNGLTVLPPLLTDEMIAQYTSALLAGTITSGWTFGAGAALQIPFAMQMAYRFNGIGVTQNVLYENQKLIANQFNSAIGKIQDSLSSTASALGKLQDVVNQNAQALNTLVKQLSSNFGAISSVLNDILSRLDKVEAEVQIDRLITGRLQSLQTYVTQQLIRAAEIRASANLAATKMSECVLGQSKRVDFCGKGYHLMSFPQSAPHGVVFLHVTYVPAQEKNFTTAPAICHDGKAHFPREGVFVSNGTHWFVTQRNFCEPQIITTDNTFVSGNCDVVIGIVNNTVYDPLQPELDSFKEELDKYFKNHTSPDVDLGDISGINASVVNIQKEIDRLNEVAKNLNESLIDLQELGKYEQYIKGGGSGGGQIYEGKLTAEGLRFGIVASRFNHALVDRLVEGAIDAIVRHGGREEDITLVRVPGSWEIPVAAGELARKEDIDAVIAIGVLIRGATPHFDYIASEVSKGLADLSLELRKPITFGVITADTLEQAIERAGTKHGNKGWEAALSAIEMANLFKSLR

SEQ ID NO: 4084 - protein, 1371 aa, Artificial Sequence
  SARS-CoV-2/Congo/158/2020__EPI_ISL_417950 spike protein (1-1211)(I714C_Y1110C) LumSynth construct
MFVFLVLLPLVSSQCVNLTTRTQLPPAYTNSFTRGVYYPDKVFRSSVLHSTQDLFLPFFSNVTWFHAIHVSGTNGTKRFDNPVLPFNDGVYFASTEKSNIIRGWIFGTTLDSKTQSLLIVNNATNVVIKVCEFQFCNDPFLGVYYHKNNKSWMESEFRVYSSANNCTFEYVSQPFLMDLEGKQGNFKNLREFVFKNIDGYFKIYSKHTPINLVRDLPQGFSALEPLVDLPIGINITRFQTLLALHRSYLTPGDSSSGWTAGAAAYYVGYLQPRTFLLKYNENGTITDAVDCALDPLSETKCTLKSFTVEKGIYQTSNFRVQPTESIVRFPNITNLCPFGEVFNATRFASVYAWNRKRISNCVADYSVLYNSASFSTFKCYGVSPTKLNDLCFTNVYADSFVIRGDEVRQIAPGQTGKIADYNYKLPDDFTGCVIAWNSNNLDSKVGGNYNYLYRLFRKSNLKPFERDISTEIYQAGSTPCNGVEGFNCYFPLQSYGFQPTNGVGYQPYRVVVLSFELLHAPATVCGPKKSTNLVKNKCVNFNFNGLTGTGVLTESNKKFLPFQQFGRDIADTTDAVRDPQTLEILDITPCSFGGVSVITPGTNTSNQVAVLYQDVNCTEVPVAIHADQLTPTWRVYSTGSNVFQTRAGCLIGAEHVNNSYECDIPIGAGICASYQTQTNSPRRARSVASQSIIAYTMSLGAENSVAYSNNSIACPTNFTISVTTEILPVSMTKTSVDCTMYICGDSTECSNLLLQYGSFCTQLNRALTGIAVEQDKNTQEVFAQVKQIYKTPPIKDFGGFNFSQILPDPSKPSKRSFIEDLLFNKVTLADAGFIKQYGDCLGDIAARDLICAQKFNGLTVLPPLLTDEMIAQYTSALLAGTITSGWTFGAGAALQIPFAMQMAYRFNGIGVTQNVLYENQKLIANQFNSAIGKIQDSLSSTASALGKLQDVVNQNAQALNTLVKQLSSNFGAISSVLNDILSRLDKVEAEVQIDRLITGRLQSLQTYVTQQLIRAAEIRASANLAATKMSECVLGQSKRVDFCGKGYHLMSFPQSAPHGVVFLHVTYVPAQEKNFTTAPAICHDGKAHFPREGVFVSNGTHWFVTQRNFCEPQIITTDNTFLSGNCDVVIGIVNNTVYDPLQPELDSFKEELDKYFKNHTSPDVDLGDISGINASVVNIQKEIDRLNEVAKNLNESLIDLQELGKYEQYIKGGGSGGGQIYEGKLTAEGLRFGIVASRFNHALVDRLVEGAIDAIVRHGGREEDITLVRVPGSWEIPVAAGELARKEDIDAVIAIGVLIRGATPHFDYIASEVSKGLADLSLELRKPITFGVITADTLEQAIERAGTKHGNKGWEAALSAIEMANLFKSLR

SEQ ID NO: 4085 - protein, 1371 aa, Artificial Sequence
  SARS-CoV-2/USA/UT-00034/2020__EPI_ISL_417977 spike protein (1-1211)(I714C_Y1110C) LumSynth construct
MFVFLVLLPLVSSQCVNLTTRTQLPPAYTNSFTRGVYYPDKVFRSSVLHSTQDLFLPFFSNVTWFHAIHVSGTNGTKRFDNPVLPFNDGVYFASTEKSNIIRGWIFGTTLDSKTQSLLIVNNATNVVIKVCEFQFCNDPFLGVYYYKNNKSWMESEFRVYSSANNCTFEYVSQPFLMDLEGKQGNFKNLREFVFKNIDGYFKIYSKHTPINLVRDLPQGFSALEPLVDLPIGINITRFQTLLALHRSYLTPGDSSSGWTAGAAAYYVGYLQPRTFLLKYNENGTITDAVDCALDPLSETKCTLKSFTVEKGIYQTSNFRVQPTESIVRFPNITNLCPFGEVFNATRFASVYAWNRKRISNCVADYSVLYNSASFSTFKCYGVSPTKLNDLCFTNVYADSFVIRGDEVRQIAPGQTGKIADYNYKLPDDFTGCVIAWNSNNLDSKVGGNYNYLYRLFRKSNLKPFERDISTEIYQAGSTPCNGVEGFNCYFPLQSYGFQPTNGVGYQPYRVVVLSFELLHAPATVCGPKKSTNLVKNKCVNFNFNGLTGTGVLTESNKKFLPFQQFGRDIADTTDAVRDPQTLEILDITPCSFGGVSVITPGTNTSNQVAVLYQGVNCTEVPVAIHADQLTPTWRVYSTGSNVFQTRAGCLIGAEHVNNSYECDIPIGAGICASYQTQTNSPRRARSVASQSIIAYTMSLGAENSVAYSNNSIACPTNFTISVTTEILPVSMTKTSVDCTMYICGDSTECSNLLLQYGSFCTQLNRALTGIAVEQDKNTQEVFAQVKQIYKTPPIKDFGGFNFSQILPDPSKPSKRSFIEDLLFNKVTLADAGFIKQYGDCLGDIAARDLICAQKFNGLTVLPPLLTDEMIAQYTSALLAGTITSGWTFGAGAALQIPFAMQMAYRFNGIGVTQNVLYENQKLIANQFNSAIGKIQDSLSSTASALGKLQDVVNQNAQALNTLVKQLSSNFGAISSVLNDILSRLDKVEAEVQIDRLITGRLQSLQTYVTQQLIRAAEIRASANLAATKMSECVLGQSKRVDFCGKGYHLMSFPQSAPHGVVFLHVTYVPAQEKNFTTAPAICHDGKAHFPREGVFVSNGTHWFVTQRNFCEPQIITTDNTFVSGNCDVVIGIVNNTVYDPLQPELDSFKEELDKYFKNHTSPDVDLGDISGINASVVNIQKEIDRLNEVAKNLNESLIDLQELGKYEQYIKGGGSGGGQIYEGKLTAEGLRFGIVASRFNHALVDRLVEGAIDAIVRHGGREEDITLVRVPGSWEIPVAAGELARKEDIDAVIAIGVLIRGATPHFDYIASEVSKGLADLSLELRKPITFGVITADTLEQAIERAGTKHGNKGWEAALSAIEMANLFKSLR

SEQ ID NO: 4086 - protein, 1371 aa, Artificial Sequence
  SARS-CoV-2/USA/UT-00033/2020__EPI_ISL_417976 spike protein (1-1211)(I714C_Y1110C) LumSynth construct
MFVFLVLLPLVSSQCVNLTTRTQLPPAYTNSFTRGVYYPDKVFRSSVLHSTQDLFLPFFSNVTWFHAIHVSGTNGTKRFDNPVLPFNDGVYFASTEKSNIIRGWIFGTTLDSKTQSLLIVNNATNVVIKVCEFQFCNDPFLGVYYHKNNKSWMESEFRVYSSANNCTFEYVSQPFLMDLEGKQGNFKNLREFVFKNIDGYFKIYSKHTPINLVRDLPQGFSALEPLVDLPIGINITRFQTLLALHRSYLTPGDSSSGLTAGAAAYYVGYLQPRTFLLKYNENGTITDAVDCALDPLSETKCTLKSFTVEKGIYQTSNFRVQPTESIVRFPNITNLCPFGEVFNATRFASVYAWNRKRISNCVADYSVLYNSASFSTFKCYGVSPTKLNDLCFTNVYADSFVIRGDEVRQIAPGQTGKIADYNYKLPDDFTGCVIAWNSNNLDSKVGGNYNYLYRLFRKSNLKPFERDISTEIYQAGSTPCNGVEGFNCYFPLQSYGFQPTNGVGYQPYRVVVLSFELLHAPATVCGPKKSTNLVKNKCVNFNFNGLTGTGVLTESNKKFLPFQQFGRDIADTTDAVRDPQTLEILDITPCSFGGVSVITPGTNTSNQVAVLYQGVNCTEVPVAIHADQLTPTWRVYSTGSNVFQTRAGCLIGAEHVNNSYECDIPIGAGICASYQTQTNSPRRARSVASQSIIAYTMSLGAENSVAYSNNSIACPTNFTISVTTEILPVSMTKTSVDCTMYICGDSTECSNLLLQYGSFCTQLNRALTGIAVEQDKNTQEVFAQVKQIYKTPPIKDFGGFNFSQILPDPSKPSKRSFIEDLLFNKVTLADAGFIKQYGDCLGDIAARDLICAQKFNGLTVLPPLLTDEMIAQYTSALLAGTITSGWTFGAGAALQIPFAMQMAYRFNGIGVTQNVLYENQKLIANQFNSAIGKIQDSLSSTASALGKLQDVVNQNAQALNTLVKQLSSNFGAISSVLNDILSRLDKVEAEVQIDRLITGRLQSLQTYVTQQLIRAAEIRASANLAATKMSECVLGQSKRVDFCGKGYHLMSFPQSAPHGVVFLHVTYVPAQEKNFTTAPAICHDGKAHFPREGVFVSNGTHWFVTQRNFCEPQIITTDNTFVSGNCDVVIGIVNNTVYDPLQPELDSFKEELDKYFKNHTSPDVDLGDISGINASVVNIQKEIDRLNEVAKNLNESLIDLQELGKYEQYIKGGGSGGGQIYEGKLTAEGLRFGIVASRFNHALVDRLVEGAIDAIVRHGGREEDITLVRVPGSWEIPVAAGELARKEDIDAVIAIGVLIRGATPHFDYIASEVSKGLADLSLELRKPITFGVITADTLEQAIERAGTKHGNKGWEAALSAIEMANLFKSLR

SEQ ID NO: 4087 - protein, 1371 aa, Artificial Sequence
  SARS-CoV-2/USA/WI-13/2020__EPI_ISL_417516 spike protein (1-1211)(I714C_Y1110C) LumSynth construct
MFVFLVLLPLVSSQCVNLTTRTQLPPAYTNSFTRGVYYPDKVFRSSVLHSTQDLFLPFFSNVTWFHAIHVSGTNGTKRFDNPVLPFNDGVYFASTEKSNIIRGWIFGTTLDSKTQSLLIVNNATNVVIKVCEFQFCNDPFLGVYYHKNNKSWMESEFRVYSSANNCTFEYVSQPFLMDLEGKQGNFKNLREFVFKNIDGYFKIYSKHTPINLVRDLPQGFSALEPLVDLPIGINITRFQTLLALHRSYLTPGDSSSGWTAGAAAYYVGYLQPRTFLLKYNENGTITDAVDCALDPLSETKCTLKSFTVEKGIYQTSNFRVLPTESIVRFPNITNLCPFGEVFNATRFASVYAWNRKRISNCVADYSVLYNSASFSTFKCYGVSPTKLNDLCFTNVYADSFVIRGDEVRQIAPGQTGKIADYNYKLPDDFTGCVIAWNSNNLDSKVGGNYNYLYRLFRKSNLKPFERDISTEIYQAGSTPCNGVEGFNCYFPLQSYGFQPTNGVGYQPYRVVVLSFELLHAPATVCGPKKSTNLVKNKCVNFNFNGLTGTGVLTESNKKFLPFQQFGRDIADTTDAVRDPQTLEILDITPCSFGGVSVITPGTNTSNQVAVLYQGVNCTEVPVAIHADQLTPTWRVYSTGSNVFQTRAGCLIGAEHVNNSYECDIPIGAGICASYQTQTNSPRRARSVASQSIIAYTMSLGAENSVAYSNNSIACPTNFTISVTTEILPVSMTKTSVDCTMYICGDSTECSNLLLQYGSFCTQLNRALTGIAVEQDKNTQEVFAQVKQIYKTPPIKDFGGFNFSQILPDPSKPSKRSFIEDLLFNKVTLADAGFIKQYGDCLGDIAARDLICAQKFNGLTVLPPLLTDEMIAQYTSALLAGTITSGWTFGAGAALQIPFAMQMAYRFNGIGVTQNVLYENQKLIANQFNSAIGKIQDSLSSTASALGKLQDVVNQNAQALNTLVKQLSSNFGAISSVLNDILSRLDKVEAEVQIDRLITGRLQSLQTYVTQQLIRAAEIRASANLAATKMSECVLGQSKRVDFCGKGYHLMSFPQSAPHGVVFLHVTYVPAQEKNFTTAPAICHDGKAHFPREGVFVSNGTHWFVTQRNFCEPQIITTDNTFVSGNCDVVIGIVNNTVYDPLQPELDSFKEELDKYFKNHTSPDVDLGDISGINASVVNIQKEIDRLNEVAKNLNESLIDLQELGKYEQYIKGGGSGGGQIYEGKLTAEGLRFGIVASRFNHALVDRLVEGAIDAIVRHGGREEDITLVRVPGSWEIPVAAGELARKEDIDAVIAIGVLIRGATPHFDYIASEVSKGLADLSLELRKPITFGVITADTLEQAIERAGTKHGNKGWEAALSAIEMANLFKSLR

SEQ ID NO: 4088 - protein, 1370 aa, Artificial Sequence
  SARS-CoV-2/India/1-27/2020__EPI_ISL_413522 spike protein (1-1210)(I713C_Y1109C) LumSynth construct
MFVFLVLLPLVSSQCVNLTTRTQLPPAYTNSFTRGVYYPDKVFRSSVLHSTQDLFLPFFSNVTWFHAIHVSGTNGTKRFDNPVLPFNDGVYFASTEKSNIIRGWIFGTTLDSKTQSLLIVNNATNVVIKVCEFQFCNDPFLGVYHKNNKSWMESEFRVYSSANNCTFEYVSQPFLMDLEGKQGNFKNLREFVFKNIDGYFKIYSKHTPINLVRDLPQGFSALEPLVDLPIGINITRFQTLLALHRSYLTPGDSSSGWTAGAAAYYVGYLQPRTFLLKYNENGTITDAVDCALDPLSETKCTLKSFTVEKGIYQTSNFRVQPTESIVRFPNITNLCPFGEVFNATRFASVYAWNRKRISNCVADYSVLYNSASFSTFKCYGVSPTKLNDLCFTNVYADSFVIRGDEVIQIAPGQTGKIADYNYKLPDDFTGCVIAWNSNNLDSKVGGNYNYLYRLFRKSNLKPFERDISTEIYQAGSTPCNGVEGFNCYFPLQSYGFQPTNGVGYQPYRVVVLSFELLHAPATVCGPKKSTNLVKNKCVNFNFNGLTGTGVLTESNKKFLPFQQFGRDIADTTDAVRDPQTLEILDITPCSFGGVSVITPGTNTSNQVAVLYQDVNCTEVPVAIHADQLTPTWRVYSTGSNVFQTRAGCLIGAEHVNNSYECDIPIGAGICASYQTQTNSPRRARSVASQSIIAYTMSLGAENSVAYSNNSIACPTNFTISVTTEILPVSMTKTSVDCTMYICGDSTECSNLLLQYGSFCTQLNRALTGIAVEQDKNTQEVFAQVKQIYKTPPIKDFGGFNFSQILPDPSKPSKRSFIEDLLFNKVTLADAGFIKQYGDCLGDIAARDLICAQKFNGLTVLPPLLTDEMIAQYTSALLAGTITSGWTFGAGAALQIPFAMQMAYRFNGIGVTQNVLYENQKLIANQFNSAIGKIQDSLSSTASALGKLQDVVNQNAQALNTLVKQLSSNFGAISSVLNDILSRLDKVEAEVQIDRLITGRLQSLQTYVTQQLIRAAEIRASANLAATKMSECVLGQSKRVDFCGKGYHLMSFPQSAPHGVVFLHVTYVPAQEKNFTTAPAICHDGKAHFPREGVFVSNGTHWFVTQRNFCEPQIITTDNTFVSGNCDVVIGIVNNTVYDPLQPELDSFKEELDKYFKNHTSPDVDLGDISGINASVVNIQKEIDRLNEVAKNLNESLIDLQELGKYEQYIKGGGSGGGQIYEGKLTAEGLRFGIVASRFNHALVDRLVEGAIDAIVRHGGREEDITLVRVPGSWEIPVAAGELARKEDIDAVIAIGVLIRGATPHFDYIASEVSKGLADLSLELRKPITFGVITADTLEQAIERAGTKHGNKGWEAALSAIEMANLFKSLR

SEQ ID NO: 4089 - protein, 1365 aa, Artificial Sequence
  SARS-CoV-2/pangolin/Guangxi/P4L/2017__EPI_ISL_410538 spike protein (1-1205)(I708C_Y1104C) LumSynth construct
MFVFLFVLPLVSSQCVNLTTRTGIPPGYTNSSTRGVYYPDKVFRSSILHLTQDLFLPFFSNVTWFNTINYQGGFKKFDNPVLPFNDGVYFASTEKSNIIRGWIFGTTLDARTQSLLIVNNATNVVIKVCEFQFCTDPFLGVYYHNNNKTWVENEFRVYSSANNCTFEYISQPFLMDLEGKQGNFKNLREFVFKNVDGYFKIYSKHTPIDLVRDLPRGFAALEPLVDLPIGINITRFQTLLALHRSYLTPGNLESGWTTGAAAYYVGYLQQRTFLLSYNQNGTITDAVDCSLDPLSETKCTLKSLTVEKGIYQTSNFRVQPTISIVRFPNITNLCPFGEVFNASKFASVYAWNRKRISNCVADYSVLYNSTSFSTFKCYGVSPTKLNDLCFTNVYADSFVVKGDEVRQIAPGQTGVIADYNYKLPDDFTGCVIAWNSVKQDALTGGNYGYLYRLFRKSKLKPFERDISTEIYQAGSTPCNGQVGLNCYYPLERYGFHPTTGVNYQPFRVVVLSFELLNGPATVCGPKLSTTLVKDKCVNFNFNGLTGTGVLTTSKKQFLPFQQFGRDISDTTDAVRDPQTLEILDITPCSFGGVSVITPGTNTSNQVAVLYQDVNCTEVPMAIHAEQLTPAWRVYSAGANVFQTRAGCLVGAEHVNNSYECDIPVGAGICASYHSMSSLRSVNQRSIIAYTMSLGAENSVAYSNNSIACPTNFTISVTTEILPVSMTKTSVDCTMYICGDSIECSNLLLQYGSFCTQLNRALTGIAVEQDKNTQEVFAQVKQIYKTPPIKDFGGFNFSQILPDPSKPSKRSFIEDLLFNKVTLADAGFIKQYGDCLGDIAARDLICAQKFNGLTVLPPLLTDEMIAQYTSALLAGTITSGWTFGAGAALQIPFAMQMAYRFNGIGVTQNVLYENQKLIANQFNSAIGKIQDSLSSTASALGKLQDVVNQNAQALNTLVKQLSSNFGAISSVLNDILSRLDKVEAEVQIDRLITGRLQSLQTYVTQQLIRAAEIRASANLAATKMSECVLGQSKRVDFCGKGYHLMSFPQSAPHGVVFLHVTYVPAQEKNFTTAPAICHEGKAHFPREGVFVSNGTHWFITQRNFCEPQIITTDNTFVSGSCDVVIGIVNNTVYDPLQPELDSFKEELDKYFKNHTSPDVDLGDISGINASVVNIQKEIDRLNEVAKNLNESPIDLQELGKYEQYIKGGGSGGGQIYEGKLTAEGLRFGIVASRFNHALVDRLVEGAIDAIVRHGGREEDITLVRVPGSWEIPVAAGELARKEDIDAVIAIGVLIRGATPHFDYIASEVSKGLADLSLELRKPITFGVITADTLEQAIERAGTKHGNKGWEAALSAIEMANLFKSLR

SEQ ID NO: 4090 - protein, 1365 aa, Artificial Sequence
  SARS-CoV-2/pangolin/Guangxi/P5L/2017__EPI_ISL_410540 spike protein (1-1205)(I708C_Y1104C) LumSynth construct
MFVFLFVLPLVSSQCVNLTTRTGIPPGYTNSSTRGVYYPDKVFRSSILHLTQDLFLPFFSNVTWFNTINYQGGFKKFDNPVLPFNDGVYFASTEKSNIIRGWIFGTTLDARTQSLLIVNNATNVVIKVCEFQFCTDPFLGVYYHNNNKTWVENEFRVYSSANNCTFEYISQPFLMDLEGKQGNFKNLREFVFKNVDGYFKIYSKHTPIDLVRDLPRGFAALEPLVDLPIGINITRFQTLLALHRSYLTPGKLESGWTTGAAAYYVGYLQQRTFLLSYNQNGTITDAVDCSLDPLSETKCTLKSLTVEKGIYQTSNFRVQPTISIVRFPNITNLCPFGEVFNASKFASVYAWNRKRISNCVADYSVLYNSTSFSTFKCYGVSPTKLNDLCFTNVYADSFVVKGDEVRQIAPGQTGVIADYNYKLPDDFTGCVIAWNSVKQDALTGGNYGYLYRLFRKSKLKPFERDISTEIYQAGSTPCNGQVGLNCYYPLERYGFHPTTGVNYQPFRVVVLSFELLNGPATVCGPKLSTTLVKDKCVNFNFNGLTGTGVLTTSKKQFLPFQQFGRDISDTTDAVRDPQTLEILDITPCSFGGVSVITPGTNTSNQVAVLYQDVNCTEVPMAIHAEQLTPAWRVYSAGANVFQTRAGCLVGAEHVNNSYECDIPVGAGICASYHSMSSFRSVNQRSIIAYTMSLGAENSVAYSNNSIACPTNFTISVTTEILPVSMTKTSVDCTMYICGDSIECSNLLLQYGSFCTQLNRALTGIAVEQDKNTQEVFAQVKQIYKTPPIKDFGGFNFSQILPDPSKPSKRSFIEDLLFNKVTLADAGFIKQYGDCLGDIAARDLICAQKFNGLTVLPPLLTDEMIAQYTSALLAGTITSGWTFGAGAALQIPFAMQMAYRFNGIGVTQNVLYENQKLIANQFNSAIGKIQDSLSSTASALGKLQDVVNQNAQALNTLVKQLSSNFGAISSVLNDILSRLDKVEAEVQIDRLITGRLQSLQTYVTQQLIRAAEIRASANLAATKMSECVLGQSKRVDFCGKGYHLMSFPQSAPHGVVFLHVTYVPAQEKNFTTAPAICHEGKAHFPREGVFVSNGTHWFITQRNFCEPQIITTDNTFVSGSCDVVIGIVNNTVYDPLQPELDSFKEELDKYFKNHTSPDVDLGDISGINASVVNIQKEIDRLNEVAKNLNESLIDLQELGKYEQYIKGGGSGGGQIYEGKLTAEGLRFGIVASRFNHALVDRLVEGAIDAIVRHGGREEDITLVRVPGSWEIPVAAGELARKEDIDAVIAIGVLIRGATPHFDYIASEVSKGLADLSLELRKPITFGVITADTLEQAIERAGTKHGNKGWEAALSAIEMANLFKSLR

SEQ ID NO: 4091 - protein, 1365 aa, Artificial Sequence
  SARS-CoV-2/pangolin/Guangxi/P5E/2017__EPI_ISL_410541 spike protein (1-1205)(I708C_Y1104C) LumSynth construct
MFVFLFVLPLVSSQCVNLTTRTGIPPGYTNSSTRGVYYPDKVFRSSILHLTQDLFLPFFSNVTWFNTITYQGGSKKFDNPVLPFNDGVYFASTEKSNIIRGWIFGTTLDARTQSLLIVNNATNVVIKVCEFQFCTDPFLGVYYHNNNKTWVENEFRVYSSANNCTFEYISQPFLMDLEGKQGNFKNLREFVFKNVDGYFKIYSKHTPIDLVRDLPRGFAALEPLVDLPIGINITRFQTLLALHRSYLTPGKLESGWTTGAAAYYVGYLQQRTFLLSYNQNGTITDAVDCSLDPLSETKCTLKSLTVEKGIYQTSNFRVQPTISIVRFPNITNLCPFGEVFNASKFASVYAWNRKRISNCVADYSVLYNSTSFSTFKCYGVSPTKLNDLCFTNVYADSFVVKGDEVRQIAPGQTGVIADYNYKLPDDFTGCVIAWNSVKQDALTGDNYGYLYRLFRKSKLKPFERDISTEIYQAGSTPCNGQVGLNCYYPLERYGFHPTTGVNYQPFRVVVLSFELLNGPATVCGPKLSTTLVKDKCVNFNFNGLTGTGVLTTSKKQFLPFQQFGRDISDTTDAVRDPQTLEILDITPCSFGGVSVITPGTNTSNQVAVLYQDVNCTEVPMAIHAEQLTPAWRVYSAGANVFQTRAGCLVGAEHVNNSYECDIPVGAGICASYHSMSSFRSVNQRSIIAYTMSLGAENSVAYSNNSIACPTNFTISVTTEILPVSMTKTSVDCTMYICGDSIECSNLLLQYGSFCTQLNRALTGIAVEQDKNTQEVFAQVKQIYKTPPIKDFGGFNFSQILPDPSKPSKRSFIEDLLFNKVTLADAGFIKQYGDCLGDIAARDLICAQKFNGLTVLPPLLTDEMIAQYTSALLAGTITSGWTFGAGAALQIPFAMQMAYRFNGIGVTQNVLYENQKLIANQFNSAIGKIQDSLSSTASALGKLQDVVNQNAQALNTLVKQLSSNFGAISSVLNDILSRLDKVEAEVQIDRLITGRLQSLQTYVTQQLIRAAEIRASANLAATKMSECVLGQSKRVDFCGKGYHLMSFPQSAPHGVVFLHVTYVPAQEKNFTTAPAICHEGKAHFPREGVFVSNGTHWFITQRNFCEPQIITTDNTFVSGSCDVVIGIVNNTVYDPLQPELDSFKEELDKYFKNHTSPDVDLGDISGINASVVNIQKEIDRLNEVAKNLNESLIDLQELGKYEQYIKGGGSGGGQIYEGKLTAEGLRFGIVASRFNHALVDRLVEGAIDAIVRHGGREEDITLVRVPGSWEIPVAAGELARKEDIDAVIAIGVLIRGATPHFDYIASEVSKGLADLSLELRKPITFGVITADTLEQAIERAGTKHGNKGWEAALSAIEMANLFKSLR

SEQ ID NO: 4092 - protein, 1363 aa, Artificial Sequence
  SARS-CoV-2/pangolin/Guangxi/P1E/2017__EPI_ISL_410539 spike protein (1-1203)(I706C_Y1102C) LumSynth construct
MFVFLFVLPLVSSQCVNLTTRTGIQPGYTNSSTRGVYYPDKVFRSSILHLTQDLFLPFFSNVTWFNTINYQGGFKKFDNPVLPFNDGVYFASTEKSNIIRGWIFGTTLDARTQSLLIVNNATNVVIKVCEFQFCTDPFLGVYYHNNNKTWVENEFRVYSSANNCTFEYISQPFLMDLEGKQGNFKNLREFVFKNVDGYFKIYSKHTPIDLVRDLPRGFAALEPLVDLPIGINITRFQTLLALHRSYLTPGKLESGWTTGAAAYYVGYLQQRTFLLSYNQNGTITDAVDCSLDPLSETKCTLKSLTVEKGIYQTSNFRVQPTISIVRFPNITNLCPFGEVFNASKFASVYAWNRKRISNCVADYSVLYNSTSFSTFKCYGVSPTKLNDLCFTNVYADSFVVKGDEVRQIAPGQTGVIADYNYKLPDDFTGCVIAWNSVKQDALTGGNYLYRLFRKSKLKPFERDISTEIYQAGSTPCNGQVGLNCYYPLERYGFHPTTGVNYQPFRVVVLSFELLNGPATVCGPKLSTTLVKDKCVNFNFNGLTGTGVLTTSKKQFLPFQQFGRDISDTTDAVRDPQTLEILDITPCSFGGVSVITPGTNTSNQVAVLYQDVNCTEVPMAIHAEQLTPAWRVYSAGANVFQTRAGCLVGAEHVNNSYECDIPVGAGICASYHSMSSLRSVNQRSIIAYTMSLGAENSVAYSNNSIACPTNFTISVTTEILPVSMTKTSVDCTMYICGDSIECSNLLLQYGSFCTQLNRALTGIAVEQDKNTQEVFAQVKQIYKTPPIKDFGGFNFSQILPDPSKPSKRSFIEDLLFNKVTLADAGFIKQYGDCLGDIAARDLICAQKFNGLTVLPPLLTDEMIAQYTSALLAGTITSGWTFGAGAALQIPFAMQMAYRFNGIGVTQNVLYENQKLIANQFNSAIGKIQDSLSSTASALGKLQDVVNQNAQALNTLVKQLSSNFGAISSVLNDILSRLDKVEAEVQIDRLITGRLQSLQTYVTQQLIRAAEIRASANLAATKMSECVLGQSKRVDFCGKGYHLMSFPQSAPHGVVFLHVTYVPAQEKNFTTAPAICHEGKAHFPREGVFVSNGTHWFITQRNFCEPQIITTDNTFVSGSCDVVIGIVNNTVYDPLQPELDSFKEELDKYFKNHTSPDVDLGDISGINASVVNIQKEIDRLNEVAKNLNESLIDLQELGKYEQYIKGGGSGGGQIYEGKLTAEGLRFGIVASRFNHALVDRLVEGAIDAIVRHGGREEDITLVRVPGSWEIPVAAGELARKEDIDAVIAIGVLIRGATPHFDYIASEVSKGLADLSLELRKPITFGVITADTLEQAIERAGTKHGNKGWEAALSAIEMANLFKSLR

SEQ ID NO: 4093 - protein, 1371 aa, Artificial Sequence
  SARS-CoV-2/Wuhan/WIV05/2019__EPI_ISL_402128 spike protein (1-1211)(P715C_P1069C) LumSynth construct
MFVFLVLLPLVSSQCVNLTTRTQLPPAYTNSFTRGVYYPDKVFRSSVLHSTQDLFLPFFSNVTWFHAIHVSGTNGTKRFDNPVLPFNDGVYFASTEKSNIIRGWIFGTTLDSKTQSLLIVNNATNVVIKVCEFQFCNDPFLGVYYHKNNKSWMESEFRVYSSANNCTFEYVSQPFLMDLEGKQGNFKNLREFVFKNIDGYFKIYSKHTPINLVRDLPQGFSALEPLVDLPIGINITRFQTLLALHRSYLTPGDSSSGWTAGAAAYYVGYLQPRTFLLKYNENGTITDAVDCALDPLSETKCTLKSFTVEKGIYQTSNFRVQPTESIVRFPNITNLCPFGEVFNATRFASVYAWNRKRISNCVADYSVLYNSASFSTFKCYGVSPTKLNDLCFTNVYADSFVIRGDEVRQIAPGQTGKIADYNYKLPDDFTGCVIAWNSNNLDSKVGGNYNYLYRLFRKSNLKPFERDISTEIYQAGSTPCNGVEGFNCYFPLQSYGFQPTNGVGYQPYRVVVLSFELLHAPATVCGPKKSTNLVKNKCVNFNFNGLTGTGVLTESNKKFLPFQQFGRDIADTTDAVRDPQTLEILDITPCSFGGVSVITPGTNTSNQVAVLYQDVNCTEVPVAIHADQLTPTWRVYSTGSNVFQTRAGCLIGAEHVNNSYECDIPIGAGICASYQTQTNSPRRARSVASQSIIAYTMSLGAENSVAYSNNSIAICTNFTISVTTEILPVSMTKTSVDCTMYICGDSTECSNLLLQYGSFCTQLNRALTGIAVEQDKNTQEVFAQVKQIYKTPPIKDFGGFNFSQILPDPSKPSKRSFIEDLLFNKVTLADAGFIKQYGDCLGDIAARDLICAQKFNGLTVLPPLLTDEMIAQYTSALLAGTITSGWTFGAGAALQIPFAMQMAYRFNGIGVTQNVLYENQKLIANQFNSAIGKIQDSLSSTASALGKLQDVVNQNAQALNTLVKQLSSNFGAISSVLNDILSRLDKVEAEVQIDRLITGRLQSLQTYVTQQLIRAAEIRASANLAATKMSECVLGQSKRVDFCGKGYHLMSFPQSAPHGVVFLHVTYVCAQEKNFTTAPAICHDGKAHFPREGVFVSNGTHWFVTQRNFYEPQIITTDNTFVSGNCDVVIGIVNNTVYDPLQPELDSFKEELDKYFKNHTSPDVDLGDISGINASVVNIQKEIDRLNEVAKNLNESLIDLQELGKYEQYIKGGGSGGGQIYEGKLTAEGLRFGIVASRFNHALVDRLVEGAIDAIVRHGGREEDITLVRVPGSWEIPVAAGELARKEDIDAVIAIGVLIRGATPHFDYIASEVSKGLADLSLELRKPITFGVITADTLEQAIERAGTKHGNKGWEAALSAIEMANLFKSLR

SEQ ID NO: 4094 - protein, 1367 aa, Artificial Sequence
  SARS-CoV-2/bat/Yunnan/RaTG13/2013__EPI_ISL_402131 spike protein (1-1207)(P711C_P1065C) LumSynth construct
MFVFLVLLPLVSSQCVNLTTRTQLPPAYTNSSTRGVYYPDKVFRSSVLHLTQDLFLPFFSNVTWFHAIHVSGTNGIKRFDNPVLPFNDGVYFASTEKSNIIRGWIFGTTLDSKTQSLLIVNNATNVVIKVCEFQFCNDPFLGVYYHKNNKSWMESEFRVYSSANNCTFEYVSQPFLMDLEGKQGNFKNLREFVFKNIDGYFKIYSKHTPINLVRDLPPGFSALEPLVDLPIGINITRFQTLLALHRSYLTPGDSSSGWTAGAAAYYVGYLQPRTFLLKYNENGTITDAVDCALDPLSETKCTLKSFTVEKGIYQTSNFRVQPTDSIVRFPNITNLCPFGEVFNATTFASVYAWNRKRISNCVADYSVLYNSTSFSTFKCYGVSPTKLNDLCFTNVYADSFVITGDEVRQIAPGQTGKIADYNYKLPDDFTGCVIAWNSKHIDAKEGGNFNYLYRLFRKANLKPFERDISTEIYQAGSKPCNGQTGLNCYYPLYRYGFYPTDGVGHQPYRVVVLSFELLNAPATVCGPKKSTNLVKNKCVNFNFNGLTGTGVLTESNKKFLPFQQFGRDIADTTDAVRDPQTLEILDITPCSFGGVSVITPGTNASNQVAVLYQDVNCTEVPVAIHADQLTPTWRVYSTGSNVFQTRAGCLIGAEHVNNSYECDIPIGAGICASYQTQTNSRSVASQSIIAYTMSLGAENSVAYSNNSIAICTNFTISVTTEILPVSMTKTSVDCTMYICGDSTECSNLLLQYGSFCTQLNRALTGIAVEQDKNTQEVFAQVKQIYKTPPIKDFGGFNFSQILPDPSKPSKRSFIEDLLFNKVTLADAGFIKQYGDCLGDIAARDLICAQKFNGLTVLPPLLTDEMIAQYTSALLAGTITSGWTFGAGAALQIPFAMQMAYRFNGIGVTQNVLYENQKLIANQFNSAIGKIQDSLSSTASALGKLQDVVNQNAQALNTLVKQLSSNFGAISSVLNDILSRLDKVEAEVQIDRLITGRLQSLQTYVTQQLIRAAEIRASANLAATKMSECVLGQSKRVDFCGKGYHLMSFPQSAPHGVVFLHVTYVCAQEKNFTTAPAICHDGKAHFPREGVFVSNGTHWFVTQRNFYEPQIITTDNTFVSGSCDVVIGIVNNTVYDPLQPELDSFKEELDKYFKNHTSPDVDLGDISGINASVVNIQKEIDRLNEVAKNLNESLIDLQELGKYEQYIKGGGSGGGQIYEGKLTAEGLRFGIVASRFNHALVDRLVEGAIDAIVRHGGREEDITLVRVPGSWEIPVAAGELARKEDIDAVIAIGVLIRGATPHFDYIASEVSKGLADLSLELRKPITFGVITADTLEQAIERAGTKHGNKGWEAALSAIEMANLFKSLR

SEQ ID NO: 4095 - protein, 1371 aa, Artificial Sequence
  SARS-CoV-2/Wuhan/HBCDC-HB-01/2019__EPI_ISL_402132 spike protein (1-1211)(P715C_P1069C) LumSynth construct
MFVFLVLLPLVSSQCVNLTTRTQLPPAYTNSITRGVYYPDKVFRSSVLHSTQDLFLPFFSNVTWFHAIHVSGTNGTKRFDNPVLPFNDGVYFASTEKSNIIRGWIFGTTLDSKTQSLLIVNNATNVVIKVCEFQFCNDPFLGVYYHKNNKSWMESEFRVYSSANNCTFEYVSQPFLMDLEGKQGNFKNLREFVFKNIDGYFKIYSKHTPINLVRDLPQGFSALEPLVDLPIGINITRFQTLLALHRSYLTPGDSSSGWTAGAAAYYVGYLQPRTFLLKYNENGTITDAVDCALDPLSETKCTLKSFTVEKGIYQTSNFRVQPTESIVRFPNITNLCPFGEVFNATRFASVYAWNRKRISNCVADYSVLYNSASFSTFKCYGVSPTKLNDLCFTNVYADSFVIRGDEVRQIAPGQTGKIADYNYKLPDDFTGCVIAWNSNNLDSKVGGNYNYLYRLFRKSNLKPFERDISTEIYQAGSTPCNGVEGFNCYFPLQSYGFQPTNGVGYQPYRVVVLSFELLHAPATVCGPKKSTNLVKNKCVNFNFNGLTGTGVLTESNKKFLPFQQFGRDIADTTDAVRDPQTLEILDITPCSFGGVSVITPGTNTSNQVAVLYQDVNCTEVPVAIHADQLTPTWRVYSTGSNVFQTRAGCLIGAEHVNNSYECDIPIGAGICASYQTQTNSPRRARSVASQSIIAYTMSLGAENSVAYSNNSIAICTNFTISVTTEILPVSMTKTSVDCTMYICGDSTECSNLLLQYGSFCTQLNRALTGIAVEQDKNTQEVFAQVKQIYKTPPIKDFGGFNFSQILPDPSKPSKRSFIEDLLFNKVTLADAGFIKQYGDCLGDIAARDLICAQKFNGLTVLPPLLTDEMIAQYTSALLAGTITSGWTFGAGAALQIPFAMQMAYRFNGIGVTQNVLYENQKLIANQFNSAIGKIQDSLSSTASALGKLQDVVNQNAQALNTLVKQLSSNFGAISSVLNDILSRLDKVEAEVQIDRLITGRLQSLQTYVTQQLIRAAEIRASANLAATKMSECVLGQSKRVDFCGKGYHLMSFPQSAPHGVVFLHVTYVCAQEKNFTTAPAICHDGKAHFPREGVFVSNGTHWFVTQRNFYEPQIITTDNTFVSGNCDVVIGIVNNTVYDPLQPELDSFKEELDKYFKNHTSPDVDLGDISGINASVVNIQKEIDRLNEVAKNLNESLIDLQELGKYEQYIKGGGSGGGQIYEGKLTAEGLRFGIVASRFNHALVDRLVEGAIDAIVRHGGREEDITLVRVPGSWEIPVAAGELARKEDIDAVIAIGVLIRGATPHFDYIASEVSKGLADLSLELRKPITFGVITADTLEQAIERAGTKHGNKGWEAALSAIEMANLFKSLR

SEQ ID NO: 4096 - protein, 1371 aa, Artificial Sequence
  SARS-CoV-2/Guangdong/20SF028/2020__EPI_ISL_403936 spike protein (1-1211)(P715C_P1069C) LumSynth construct
MFVFLVLLPLVSSQCVNLTTRTQLPPAYTNSFTRGVYYPDKVFRSSVLYSTQDLFLPFFSNVTWFHAIHVSGTNGTKRFDNPVLPFNDGVYFASTEKSNIIRGWIFGTTLDSKTQSLLIVNNATNVVIKVCEFQFCNDPFLGVYYHKNNKSWMESEFRVYSSANNCTFEYVSQPFLMDLEGKQGNFKNLREFVFKNIDGYFKIYSKHTPINLVRDLPQGFSALEPLVDLPIGINITRFQTLLALHRSYLTPGDSSSGWTAGAAAYYVGYLQPRTFLLKYNENGTITDAVDCALDPLSETKCTLKSFTVEKGIYQTSNFRVQPTESIVRFPNITNLCPFGEVFNATRFASVYAWNRKRISNCVADYSVLYNSASFSTFKCYGVSPTKLNDLCFTNVYADSFVIRGDEVRQIAPGQTGKIADYNYKLPDDFTGCVIAWNSNNLDSKVGGNYNYLYRLFRKSNLKPFERDISTEIYQAGSTPCNGVEGFNCYFPLQSYGFQPTNGVGYQPYRVVVLSFELLHAPATVCGPKKSTNLVKNKCVNFNFNGLTGTGVLTESNKKFLPFQQFGRDIADTTDAVRDPQTLEILDITPCSFGGVSVITPGTNTSNQVAVLYQDVNCTEVPVAIHADQLTPTWRVYSTGSNVFQTRAGCLIGAEHVNNSYECDIPIGAGICASYQTQTNSPRRARSVASQSIIAYTMSLGAENSVAYSNNSIAICTNFTISVTTEILPVSMTKTSVDCTMYICGDSTECSNLLLQYGSFCTQLNRALTGIAVEQDKNTQEVFAQVKQIYKTPPIKDFGGFNFSQILPDPSKPSKRSFIEDLLFNKVTLADAGFIKQYGDCLGDIAARDLICAQKFNGLTVLPPLLTDEMIAQYTSALLAGTITSGWTFGAGAALQIPFAMQMAYRFNGIGVTQNVLYENQKLIANQFNSAIGKIQDSLSSTASALGKLQDVVNQNAQALNTLVKQLSSNFGAISSVLNDILSRLDKVEAEVQIDRLITGRLQSLQTYVTQQLIRAAEIRASANLAATKMSECVLGQSKRVDFCGKGYHLMSFPQSAPHGVVFLHVTYVCAQEKNFTTAPAICHDGKAHFPREGVFVSNGTHWFVTQRNFYEPQIITTDNTFVSGNCDVVIGIVNNTVYDPLQPELDSFKEELDKYFKNHTSPDVDLGDISGINASVVNIQKEIDRLNEVAKNLNESLIDLQELGKYEQYIKGGGSGGGQIYEGKLTAEGLRFGIVASRFNHALVDRLVEGAIDAIVRHGGREEDITLVRVPGSWEIPVAAGELARKEDIDAVIAIGVLIRGATPHFDYIASEVSKGLADLSLELRKPITFGVITADTLEQAIERAGTKHGNKGWEAALSAIEMANLFKSLR

SEQ ID NO: 4097 - protein, 1371 aa, Artificial Sequence
  SARS-CoV-2/Shenzhen/SZTH-001/2020__EPI_ISL_406592 spike protein (1-1211)(P715C_P1069C) LumSynth construct
MFVFLVLLPLVSSQCVNLTTRTQLPPAYTNSFTRGVYYPDKVFRSSVLHSTQDLFLPFFSNVTWFHAIHVSGTNGTKRFDNPVLPFNDGVYFASTEKSNIIRGWIFGTTLDSKTQSLLIVNNATNVVIKVCEFQFCNDPFLGVYYHKNNKSWMESEFRVYSSANNCTFEYVSQPFLMDLEGKQGNFKNLREFVFKNIDGYFKIYSKHTPINLVRDLPQGFSALEPLVDLPIGINITRFQTLLALHRSYLTPGDSSSGWTAGAAAYYVGYLQPRTFLLKYNENGTITDAVDCALDPLSETKCTLKSFTVEKGIYQTSNFRVQPTESIVRFPNITNLCPFGEVFNATRFASVYAWNRKRISNCVADYSVLYNSASFSTFKCYGVSPTKLNDLCFTNVYADSFVIRGDEVRQIAPGQTGKIADYNYKLPDDFTGCVIAWNSNNLDSKVGGNYNYLYRLFRKSNLKPFERDISTEIYQAGSTPCNGVEGFNCYFPLQSYGFQPTNGVGYQPYRVVVLSFELLHAPATVCGPKKSTNLVKNKCVNFNFNGLTGTGVLTESNKKFLPFQQFGRDIADTTDAVRDPQTLEILDITPCSFGGVSVITPGTNTSNQVAVLYQDVNCTEVPVAIHADQLTPTWRVYSTGSNVFQTRAGCLIGAEHVNNSYECDIPIGAGICASYQTQTNSPRRARSVASQSIIAYTMSLGAENSVAYSNNSIAICTNFTISVTTEILPVSMTKTSVDCTMYICGDSTECSNLLLQYGSFCTQLNRALTGIAVEQDKNTQEVFAQVKQIYKTPPIKDFGGFNFSQILPDPSKPSKRSFIEDLLFNKVTLADAGFIKQYGDCLGDIAARDLICAQKFNGLTVLPPLLTDEMIAQYTSALLAGTITSGWTFGAGAALQIPFAMQMAYRFNGIGVTQNVLYENQKLIANQFNSAIGKIQDSLSSTASALGKLQDVVNQNAQALNTLVKQLSSNFGAISSVLNDILSRLDKVEAEVQIDRLITGRLQSLQTYVTQQLIRAAEIRASANLAATKMSECVLGQSKRVDFCGKGYHLMSFPQSAPHGVVFLHVTYVCAQEKNFTTAPAICHDGKAHFPREGVFVSNGTHWFVTQRNFYEPQIITTDNTFVSGNCDVLIGIVNNTVYDPLQPELDSFKEELDKYFKNHTSPDVDLGDISGINASVVNIQKEIDRLNEVAKNLNESLIDLQELGKYEQYIKGGGSGGGQIYEGKLTAEGLRFGIVASRFNHALVDRLVEGAIDAIVRHGGREEDITLVRVPGSWEIPVAAGELARKEDIDAVIAIGVLIRGATPHFDYIASEVSKGLADLSLELRKPITFGVITADTLEQAIERAGTKHGNKGWEAALSAIEMANLFKSLR

SEQ ID NO: 4098 - protein, 1371 aa, Artificial Sequence
  SARS-CoV-2/Shenzhen/SZTH-004/2020__EPI_ISL_406595 spike protein (1-1211)(P715C_P1069C) LumSynth construct
MFVFLVLLPLVSSQCVNLTTRTQLPPAYTNSFTRGVYYPDKVFRSSVLHSTQDLFLPFFSNVTWFHAIHVSGTNGTKRFDNPVLPFNDGVYFASTEKSNIIRGWIFGTTLDSKTQSLLIVNNATNVVIKVCEFQFCNDPFLGVYYHKNNKSWMESEFRVYSSANNCTFEYVSQPFLMDLEGKQGNFKNLREFVFKNIDGYFKIYSKHTPINLVRDLPQGFSALEPLVDLPIGINITRFQTLLALHRSYLTPGDSSSGWTAGAAAYYVGYLQPRTFLLKYNENGTITDAVDCALDPLSETKCTLKSFTVEKGIYQTSNFRVQPTESIVRFPNITNLCPFGEVFNATRFASVYAWDRKRISNCVAYYSVLYNSASFSTFKCYGVSPTKLNDLCFTNVYADSFVIRGDEVRQIAPGQTGKIADYNYKLPDDFTGCVIAWNSNNLDSKVGGNYNYLYRLFRKSNLKPFERDISTEIYQAGSTPCNGVEGFNCYFPLQSYGFQPTNGVGYQPYRVVVLSFELLHAPATVCGPKKSTNLVKNKCVNFNFNGLTGTGVLTESNKKFLPFQQFGRDIADTTDAVRDPQTLEILDITPCSFGGVSVITPGTNTSNQVAVLYQDVNCTEVPVAIHADQLTPTWRVYSTGSNVFQTRAGCLIGAEHVNNSYECDIPIGAGICASYQTQTNSPRRARSVASQSIIAYTMSLGAENSVAYSNNSIAICTNFTISVTTEILPVSMTKTSVDCTMYICGDSTECSNLLLQYGSFCTQLNRALTGIAVEQDKNTQEVFAQVKQIYKTPPIKDFGGFNFSQILPDPSKPSKRSFIEDLLFNKVTLADAGFIKQYGDCLGDIAARDLICAQKFNGLTVLPPLLTDEMIAQYTSALLAGTITSGWTFGAGAALQIPFAMQMAYRFNGIGVTQNVLYENQKLIANQFNSAIGKIQDSLSSTASALGKLQDVVNQNAQALNTLVKQLSSNFGAISSVLNDILSRLDKVEAEVQIDRLITGRLQSLQTYVTQQLIRAAEIRASANLAATKMSECVLGQSKRVDFCGKGYHLMSFPQSAPHGVVFLHVTYVCAQEKNFTTAPAICHDGKAHFPREGVFVSNGTHWFVTQRNFYEPQIITTDNTFVSGNCDVVIGIVNNTVYDPLQPELDSFKEELDKYFKNHTSPDVDLGDISGINASVVNIQKEIDRLNEVAKNLNESLIDLQELGKYEQYIKGGGSGGGQIYEGKLTAEGLRFGIVASRFNHALVDRLVEGAIDAIVRHGGREEDITLVRVPGSWEIPVAAGELARKEDIDAVIAIGVLIRGATPHFDYIASEVSKGLADLSLELRKPITFGVITADTLEQAIERAGTKHGNKGWEAALSAIEMANLFKSLR

SEQ ID NO: 4099 - protein, 1371 aa, Artificial Sequence
  SARS-CoV-2/France/IDF0372/2020__EPI_ISL_406596 spike protein (1-1211)(P715C_P1069C) LumSynth construct
MFVFLVLLPLVSSQCVNLTTRTQLPPAYTNSFTRGVYYPDKVFRSSVLHSTQDLFLPFFSNVTWFHAIHVSGTNGTKRFDNPVLPFNDGVYFASTEKSNIIRGWIFGTTLDSKTQSLLIVNNATNVVIKVCEFQFCNDPFLGVYYHKNNKSWMESEFRVYSSANNCTFEYVSQPFLMDLEGKQGNFKNLREFVFKNIDGYFKIYSKHTPINLVRDLPQGFSALEPLVDLPIGINITRFQTLLALHRSYLTPGDSSSGWTAGAAAYYVGYLQPRTFLLKYNENGTITDAVDCALDPLSETKCTLKSFTVEKGIYQTSNFRVQPTESIVRFPNITNLCPFGEVFNATRFASVYAWNRKRISNCVADYSFLYNSASFSTFKCYGVSPTKLNDLCFTNVYADSFVIRGDEVRQIAPGQTGKIADYNYKLPDDFTGCVIAWNSNNLDSKVGGNYNYLYRLFRKSNLKPFERDISTEIYQAGSTPCNGVEGFNCYFPLQSYGFQPTNGVGYQPYRVVVLSFELLHAPATVCGPKKSTNLVKNKCVNFNFNGLTGTGVLTESNKKFLPFQQFGRDIADTTDAVRDPQTLEILDITPCSFGGVSVITPGTNTSNQVAVLYQDVNCTEVPVAIHADQLTPTWRVYSTGSNVFQTRAGCLIGAEHVNNSYECDIPIGAGICASYQTQTNSPRRARSVASQSIIAYTMSLGAENSVAYSNNSIAICTNFTISVTTEILPVSMTKTSVDCTMYICGDSTECSNLLLQYGSFCTQLNRALTGIAVEQDKNTQEVFAQVKQIYKTPPIKDFGGFNFSQILPDPSKPSKRSFIEDLLFNKVTLADAGFIKQYGDCLGDIAARDLICAQKFNGLTVLPPLLTDEMIAQYTSALLAGTITSGWTFGAGAALQIPFAMQMAYRFNGIGVTQNVLYENQKLIANQFNSAIGKIQDSLSSTASALGKLQDVVNQNAQALNTLVKQLSSNFGAISSVLNDILSRLDKVEAEVQIDRLITGRLQSLQTYVTQQLIRAAEIRASANLAATKMSECVLGQSKRVDFCGKGYHLMSFPQSAPHGVVFLHVTYVCAQEKNFTTAPAICHDGKAHFPREGVFVSNGTHWFVTQRNFYEPQIITTDNTFVSGNCDVVIGIVNNTVYDPLQPELDSFKEELDKYFKNHTSPDVDLGDISGINASVVNIQKEIDRLNEVAKNLNESLIDLQELGKYEQYIKGGGSGGGQIYEGKLTAEGLRFGIVASRFNHALVDRLVEGAIDAIVRHGGREEDITLVRVPGSWEIPVAAGELARKEDIDAVIAIGVLIRGATPHFDYIASEVSKGLADLSLELRKPITFGVITADTLEQAIERAGTKHGNKGWEAALSAIEMANLFKSLR

SEQ ID NO: 4100 - protein, 1371 aa, Artificial Sequence
  SARS-CoV-2/Australia/VIC01/2020__EPI_ISL_406844 spike protein (1-1211)(P715C_P1069C) LumSynth construct
MFVFLVLLPLVSSQCVNLTTRTQLPPAYTNSFTRGVYYPDKVFRSSVLHSTQDLFLPFFSNVTWFHAIHVSGTNGTKRFDNPVLPFNDGVYFASTEKSNIIRGWIFGTTLDSKTQSLLIVNNATNVVIKVCEFQFCNDPFLGVYYHKNNKSWMESEFRVYSSANNCTFEYVSQPFLMDLEGKQGNFKNLREFVFKNIDGYFKIYSKHTPINLVRDLPQGFSALEPLVDLPIGINITRFQTLLALHRRYLTPGDSSSGWTAGAAAYYVGYLQPRTFLLKYNENGTITDAVDCALDPLSETKCTLKSFTVEKGIYQTSNFRVQPTESIVRFPNITNLCPFGEVFNATRFASVYAWNRKRISNCVADYSVLYNSASFSTFKCYGVSPTKLNDLCFTNVYADSFVIRGDEVRQIAPGQTGKIADYNYKLPDDFTGCVIAWNSNNLDSKVGGNYNYLYRLFRKSNLKPFERDISTEIYQAGSTPCNGVEGFNCYFPLQSYGFQPTNGVGYQPYRVVVLSFELLHAPATVCGPKKSTNLVKNKCVNFNFNGLTGTGVLTESNKKFLPFQQFGRDIADTTDAVRDPQTLEILDITPCSFGGVSVITPGTNTSNQVAVLYQDVNCTEVPVAIHADQLTPTWRVYSTGSNVFQTRAGCLIGAEHVNNSYECDIPIGAGICASYQTQTNSPRRARSVASQSIIAYTMSLGAENSVAYSNNSIAICTNFTISVTTEILPVSMTKTSVDCTMYICGDSTECSNLLLQYGSFCTQLNRALTGIAVEQDKNTQEVFAQVKQIYKTPPIKDFGGFNFSQILPDPSKPSKRSFIEDLLFNKVTLADAGFIKQYGDCLGDIAARDLICAQKFNGLTVLPPLLTDEMIAQYTSALLAGTITSGWTFGAGAALQIPFAMQMAYRFNGIGVTQNVLYENQKLIANQFNSAIGKIQDSLSSTASALGKLQDVVNQNAQALNTLVKQLSSNFGAISSVLNDILSRLDKVEAEVQIDRLITGRLQSLQTYVTQQLIRAAEIRASANLAATKMSECVLGQSKRVDFCGKGYHLMSFPQSAPHGVVFLHVTYVCAQEKNFTTAPAICHDGKAHFPREGVFVSNGTHWFVTQRNFYEPQIITTDNTFVSGNCDVVIGIVNNTVYDPLQPELDSFKEELDKYFKNHTSPDVDLGDISGINASVVNIQKEIDRLNEVAKNLNESLIDLQELGKYEQYIKGGGSGGGQIYEGKLTAEGLRFGIVASRFNHALVDRLVEGAIDAIVRHGGREEDITLVRVPGSWEIPVAAGELARKEDIDAVIAIGVLIRGATPHFDYIASEVSKGLADLSLELRKPITFGVITADTLEQAIERAGTKHGNKGWEAALSAIEMANLFKSLR

SEQ ID NO: 4101 - protein, 1371 aa, Artificial Sequence
  SARS-CoV-2/Germany/BavPat1/2020__EPI_ISL_406862 spike protein (1-1211)(P715C_P1069C) LumSynth construct
MFVFLVLLPLVSSQCVNLTTRTQLPPAYTNSFTRGVYYPDKVFRSSVLHSTQDLFLPFFSNVTWFHAIHVSGTNGTKRFDNPVLPFNDGVYFASTEKSNIIRGWIFGTTLDSKTQSLLIVNNATNVVIKVCEFQFCNDPFLGVYYHKNNKSWMESEFRVYSSANNCTFEYVSQPFLMDLEGKQGNFKNLREFVFKNIDGYFKIYSKHTPINLVRDLPQGFSALEPLVDLPIGINITRFQTLLALHRSYLTPGDSSSGWTAGAAAYYVGYLQPRTFLLKYNENGTITDAVDCALDPLSETKCTLKSFTVEKGIYQTSNFRVQPTESIVRFPNITNLCPFGEVFNATRFASVYAWNRKRISNCVADYSVLYNSASFSTFKCYGVSPTKLNDLCFTNVYADSFVIRGDEVRQIAPGQTGKIADYNYKLPDDFTGCVIAWNSNNLDSKVGGNYNYLYRLFRKSNLKPFERDISTEIYQAGSTPCNGVEGFNCYFPLQSYGFQPTNGVGYQPYRVVVLSFELLHAPATVCGPKKSTNLVKNKCVNFNFNGLTGTGVLTESNKKFLPFQQFGRDIADTTDAVRDPQTLEILDITPCSFGGVSVITPGTNTSNQVAVLYQGVNCTEVPVAIHADQLTPTWRVYSTGSNVFQTRAGCLIGAEHVNNSYECDIPIGAGICASYQTQTNSPRRARSVASQSIIAYTMSLGAENSVAYSNNSIAICTNFTISVTTEILPVSMTKTSVDCTMYICGDSTECSNLLLQYGSFCTQLNRALTGIAVEQDKNTQEVFAQVKQIYKTPPIKDFGGFNFSQILPDPSKPSKRSFIEDLLFNKVTLADAGFIKQYGDCLGDIAARDLICAQKFNGLTVLPPLLTDEMIAQYTSALLAGTITSGWTFGAGAALQIPFAMQMAYRFNGIGVTQNVLYENQKLIANQFNSAIGKIQDSLSSTASALGKLQDVVNQNAQALNTLVKQLSSNFGAISSVLNDILSRLDKVEAEVQIDRLITGRLQSLQTYVTQQLIRAAEIRASANLAATKMSECVLGQSKRVDFCGKGYHLMSFPQSAPHGVVFLHVTYVCAQEKNFTTAPAICHDGKAHFPREGVFVSNGTHWFVTQRNFYEPQIITTDNTFVSGNCDVVIGIVNNTVYDPLQPELDSFKEELDKYFKNHTSPDVDLGDISGINASVVNIQKEIDRLNEVAKNLNESLIDLQELGKYEQYIKGGGSGGGQIYEGKLTAEGLRFGIVASRFNHALVDRLVEGAIDAIVRHGGREEDITLVRVPGSWEIPVAAGELARKEDIDAVIAIGVLIRGATPHFDYIASEVSKGLADLSLELRKPITFGVITADTLEQAIERAGTKHGNKGWEAALSAIEMANLFKSLR

SEQ ID NO: 4102 - protein, 1371 aa, Artificial Sequence
  SARS-CoV-2/Wuhan/HBCDC-HB-02/2020__EPI_ISL_412978 spike protein (1-1211)(P715C_P1069C) LumSynth construct
MFVFLVLLPLVSSQCVNLTTRTQLPPAYTNSFTRGVYYPDKVFRSSVLHSTQDLFLPFFSNVTWFHAIHVSGTNGTKRFDNPVLPFNDGVYFASTEKSNIIRGWIFGTTLDSKTQSLLIVNNATNVVIKVCEFQFCNDPFLGVYYHKNNKSWMESEFRVYSSANNCTFEYVSQPFLMDLEGKQGNFKNLREFVFKNIDGYFKIYSKHTPINLVRDLPQGFSALEPLVDLPIGINITRFQTLLALHRSYLTPGDSSSGWTAGAAAYYVGYLQPRTFLLKYNENGTITDAVDCALDPLSETKCTLKSFTVEKGIYQTSNFRVQPTESIVRFPNITNLCPFGEVFNATRFASVYAWNRKRISNCVADYSVLYNSASFSTFKCYGVSPTKLNDLCFTNVYADSFVIRGDEVRQIAPGQTGKIADYNYKLPDDFTGCVIAWNSNNLDSKVGGNYNYLYRLFRKSNLKPFERDISTEIYQAGSTPCNGVEGFNCYFPLQSYGFQPTNGVGYQPYRVVVLSFELLHAPATVCGPKKSTNLVKNKCVNFNFNGLTGTGVLTESNKKFLPFQQFGRDIADTTDAVRDPQTLEILDITPCSFGGVSVITPGTNTSNQVAVLYQDVNCTEVPVAIHADQLTPTWRVYSTGSNVFQTRAGCLIGAEHVNNSYECDIPIGAGICASYQTQTNSPRRARSVASQSIIAYTMSLGAENSVAYSNNSIAICTNFTISVTTEILPVSMTKTSVDCTMYICGDSTECSNFLLQYGSFCTQLNRALTGIAVEQDKNTQEVFAQVKQIYKTPPIKDFGGFNFSQILPDPSKPSKRSFIEDLLFNKVTLADAGFIKQYGDCLGDIAARDLICAQKFNGLTVLPPLLTDEMIAQYTSALLAGTITSGWTFGAGAALQIPFAMQMAYRFNGIGVTQNVLYENQKLIANQFNSAIGKIQDSLSSTASALGKLQDVVNQNAQALNTLVKQLSSNFGAISSVLNDILSRLDKVEAEVQIDRLITGRLQSLQTYVTQQLIRAAEIRASANLAATKMSECVLGQSKRVDFCGKGYHLMSFPQSAPHGVVFLHVTYVCAQEKNFTTAPAICHDGKAHFPREGVFVSNGTHWFVTQRNFYEPQIITTDNTFVSGNCDVVIGIVNNTVYDPLQPELDSFKEELDKYFKNHTSPDVDLGDISGINASVVNIQKEIDRLNEVAKNLNESLIDLQELGKYEQYIKGGGSGGGQIYEGKLTAEGLRFGIVASRFNHALVDRLVEGAIDAIVRHGGREEDITLVRVPGSWEIPVAAGELARKEDIDAVIAIGVLIRGATPHFDYIASEVSKGLADLSLELRKPITFGVITADTLEQAIERAGTKHGNKGWEAALSAIEMANLFKSLR

SEQ ID NO: 4103 - protein, 1371 aa, Artificial Sequence
  SARS-CoV-2/Australia/QLD02/2020__EPI_ISL_407896 spike protein (1-1211)(P715C_P1069C) LumSynth construct
MFVFLVLLPLVSSQCVNLTTRTQLPPAYTNSFTRGVYYPDKVFRSSVLHSTQDLFLPFFSNVTWFHAIHVSGTNGTKRFDNPVLPFNDGVYFASTEKSNIIRGWIFGTTLDSKTQSLLIVNNATNVVIKVCEFQFCNDPFLGVYYHKNNKSWMESEFRVYSSANNCTFEYVSQPFLMDLEGKQGNFKNLREFVFKNIDGYFKIYSKHTPINLVRDLPQGFSALEPLVDLPIGINITRFQTLLALHRSYLTPGDSSSGWTAGAAAYYVGYLQPRTFLLKYNENGTITDAVDCALDPLSETKCTLKSFTVEKGIYQTSNFRVQPTESIVRFPNITNLCPFGEVFNATRFASVYAWNRKRISNCVADYSVLYNSASFSTFKCYGVSPTKLNDLCFTNVYADSFVIRGDEVRQIAPGQTGKIADYNYKLPDDFTGCVIAWNSNNLDSKVGGNYNYLYRLFRKSNLKPFERDISTEIYQAGSTPCNGVEGFNCYFPLQSYGFQPTNGVGYQPYRVVVLSFELLHAPATVCGPKKSTNLVKNKCVNFNFNGLTGTGVLTESNKKFLPFQQFGRDIADTTDAVRDPQTLEILDITPCSFGGVSVITPGTNTSNQVAVLYQDVNCTEVPVAIHADQLTPTWRVYSTGSNVFQTRAGCLIGAEHVNNSYECDIPIGAGICASYQTQTNSPRRARSVASQSIIAYTMSLGAENSVAYSNNSIAICTNFTISVTTEILPVSMTKTSVDCTMYICGDSTECSNLLLQYGSFCTQLNRALTGIAVEQDKNTQEVFAQVKQIYKTPPIKDFGGFNFSQILPDPSKPSKRSFIEDLLFNKVTLADAGFIKQYGDCLGDIAARDLICAQKFNGLTVLPPLLTDEMIAQYTSALLAGTITSGWTFGAGAALQIPFAMQMAYRFNGIGVTQNVLYENQKLIANQFNSAIGKIQDSLSSTASALGKLQDVVNQNAQALNTLVKQLSSNFGAISSVLNDILSRLDKVEAEVQIDRLITGRLQSLQTYVTQQLIRAAEIRASANLAATKMSECVLGQSKRVDFCGKGYHLMSFPQSAPHGVVFLHVTYVCAQEKNFTTAPAICHDGKAHFPREGVFVSNGTHWFVTQRNFYEPQIITTDNTFVSGNCDVVIGIVNNTVYDPLQLELDSFKEELDKYFKNHTSPDVDLGDISGINASVVNIQKEIDRLNEVAKNLNESLIDLQELGKYEQYIKGGGSGGGQIYEGKLTAEGLRFGIVASRFNHALVDRLVEGAIDAIVRHGGREEDITLVRVPGSWEIPVAAGELARKEDIDAVIAIGVLIRGATPHFDYIASEVSKGLADLSLELRKPITFGVITADTLEQAIERAGTKHGNKGWEAALSAIEMANLFKSLR

SEQ ID NO: 4104 - protein, 1371 aa, Artificial Sequence
  SARS-CoV-2/India/1-31/2020__EPI_ISL_413523 spike protein (1-1211)(P715C_P1069C) LumSynth construct
MFVFLVLLPLVSSQCVNLTTRTQLPPAYTNSFTRGVYYPDKVFRSSVLHSTQDLFLPFFSNVTWFHAIHVSGTNGTKRFDNPVLPFNDGVYFASTEKSNIIRGWIFGTTLDSKTQSLLIVNNATNVVIKVCEFQFCNDPFLGVYYHKNNKSWMESEFRVYSSANNCTFEYVSQPFLMDLEGKQGNFKNLREFVFKNIDGYFKIYSKHTPINLVRDLPQGFSALEPLVDLPIGINITRFQTLLALHRSYLTPGDSSSGWTAGAAAYYVGYLQPRTFLLKYNENGTITDAVDCALDPLSETKCTLKSFTVEKGIYQTSNFRVQPTESIVRFPNITNLCPFGEVFNATRFASVYAWNRKRISNCVADYSVLYNSASFSTFKCYGVSPTKLNDLCFTNVYADSFVIRGDEVRQIAPGQTGKIADYNYKLPDDFTGCVIAWNSNNLDSKVGGNYNYLYRLFRKSNLKPFERDISTEIYQAGSTPCNGVEGFNCYFPLQSYGFQPTNGVGYQPYRVVVLSFELLHAPATVCGPKKSTNLVKNKCVNFNFNGLTGTGVLTESNKKFLPFQQFGRDIADTTDAVRDPQTLEILDITPCSFGGVSVITPGTNTSNQVAVLYQDVNCTEVPVAIHADQLTPTWRVYSTGSNVFQTRAGCLIGAEHVNNSYECDIPIGAGICASYQTQTNSPRRARSVASQSIIAYTMSLGAENSVAYSNNSIAICTNFTISVTTEILPVSMTKTSVDCTMYICGDSTECSNLLLQYGSFCTQLNRALTGIAVEQDKNTQEVFAQVKQIYKTPPIKDFGGFNFSQILPDPSKPSKRSFIEDLLFNKVTLADAGFIKQYGDCLGDIAARDLICAQKFNGLTVLPPLLTDEMIAQYTSALLAGTITSGWTFGAGAALQIPFAMQMAYRFNGIGVTQNVLYENQKLIANQFNSVIGKIQDSLSSTASALGKLQDVVNQNAQALNTLVKQLSSNFGAISSVLNDILSRLDKVEAEVQIDRLITGRLQSLQTYVTQQLIRAAEIRASANLAATKMSECVLGQSKRVDFCGKGYHLMSFPQSAPHGVVFLHVTYVCAQEKNFTTAPAICHDGKAHFPREGVFVSNGTHWFVTQRNFYEPQIITTDNTFVSGNCDVVIGIVNNTVYDPLQPELDSFKEELDKYFKNHTSPDVDLGDISGINASVVNIQKEIDRLNEVAKNLNESLIDLQELGKYEQYIKGGGSGGGQIYEGKLTAEGLRFGIVASRFNHALVDRLVEGAIDAIVRHGGREEDITLVRVPGSWEIPVAAGELARKEDIDAVIAIGVLIRGATPHFDYIASEVSKGLADLSLELRKPITFGVITADTLEQAIERAGTKHGNKGWEAALSAIEMANLFKSLR

SEQ ID NO: 4105 - protein, 1371 aa, Artificial Sequence
  SARS-CoV-2/Guangdong/GD2020087-P0008/2020__EPI_ISL_413863 spike protein (1-1211)(P715C_P1069C) LumSynth construct
MFVFLVLLPLVSSQCVNLTTRTQLPPAYTNSFTRGVYYPDKVFRSSVLHSTQDLFLPFFSNVTWFHAIHVSGTNGTKRFDNPVLPFNDGVYFASTEKSNIIRGWIFGTTLDSKTQSLLIVNNATNVVIKVCEFQFCNDPFLGVYYHKNNKSWMESEFRVYSSANNCTFEYVSQPFLMDLEGKQGNFKNLREFVFKNIDGYFKIYSKHTPINLVRDLPQGFSALEPLVDLPIGINITRFQTLLALHRSYLTPGDSSSGWTAGAAAYYVGYLQPRTFLLKYNENGTITDAVDCALDPLSETKCTLKSFTVEKGIYQTSNFRVQPTESIVRFPNITNLCPFGEVFNATRFASVYAWNRKRISNCVADYSVLYNSASFSTFKCYGVSPTKLNDLCFTNVYADSFVIRGDEVREIAPGQTGKIADYNYKLPDDFTGCVIAWNSNNLDSKVGGNYNYLYRLFRKSNLKPFERDISTEIYQAGSTPCNGVEGFNCYFPLQSYGFQPTNGVGYQPYRVVVLSFELLHAPATVCGPKKSTNLVKNKCVNFNFNGLTGTGVLTESNKKFLPFQQFGRDIADTTDAVRDPQTLEILDITPCSFGGVSVITPGTNTSNQVAVLYQDVNCTEVPVAIHADQLTPTWRVYSTGSNVFQTRAGCLIGAEHVNNSYECDIPIGAGICASYQTQTNSPRRARSVASQSIIAYTMSLGAENSVAYSNNSIAICTNFTISVTTEILPVSMTKTSVDCTMYICGDSTECSNLLLQYGSFCTQLNRALTGIAVEQDKNTQEVFAQVKQIYKTPPIKDFGGFNFSQILPDPSKPSKRSFIEDLLFNKVTLADAGFIKQYGDCLGDIAARDLICAQKFNGLTVLPPLLTDEMIAQYTSALLAGTITSGWTFGAGAALQIPFAMQMAYRFNGIGVTQNVLYENQKLIANQFNSAIGKIQDSLSSTASALGKLQDVVNQNAQALNTLVKQLSSNFGAISSVLNDILSRLDKVEAEVQIDRLITGRLQSLQTYVTQQLIRAAEIRASANLAATKMSECVLGQSKRVDFCGKGYHLMSFPQSAPHGVVFLHVTYVCAQEKNFTTAPAICHDGKAHFPREGVFVSNGTHWFVTQRNFYEPQIITTDNTFVSGNCDVVIGIVNNTVYDPLQPELDSFKEELDKYFKNHTSPDVDLGDISGINASVVNIQKEIDRLNEVAKNLNESLIDLQELGKYEQYIKGGGSGGGQIYEGKLTAEGLRFGIVASRFNHALVDRLVEGAIDAIVRHGGREEDITLVRVPGSWEIPVAAGELARKEDIDAVIAIGVLIRGATPHFDYIASEVSKGLADLSLELRKPITFGVITADTLEQAIERAGTKHGNKGWEAALSAIEMANLFKSLR

SEQ ID NO: 4106 - protein, 1371 aa, Artificial Sequence
  SARS-CoV-2/Sweden/01/2020__EPI_ISL_411951 spike protein (1-1211)(P715C_P1069C) LumSynth construct
MFVFLVLLPLVSSQCVNLTTRTQLPPAYTNSFTRGVYYPDKVFRSSVLHSTQDLFLPFFSNVTWFHAIHVSGTNGTKRFDNPVLPFNDGVYFASTEKSNIIRGWIFGTTLDSKTQSLLIVNNATNVVIKVCEFQFCNDPFLGVYYHKNNKSWMESEFRVYSSANNCTFEYVSQPFLMDLEGKQGNFKNLREFVFKNIDGYFKIYSKHTPINLVRDLPQGFSALEPLVDLPIGINITRFQTLLALHRSYLTPGDSSSGWTAGAAAYYVGYLQPRTFLLKYNENGTITDAVDCALDPLSETKCTLKSFTVEKGIYQTSNFRVQPTESIVRFPNITNLCPFGEVFNATRFASVYAWNRKRISNCVADYSVLYNSASFSTFKCYGVSPTKLNDLCFTNVYADSFVIRGDEVRQIAPGQTGKIADYNYKLPDDFTGCVIAWNSNNLDSKVGGNYNYLYRLFRKSNLKPFERDISTEIYQAGSTPCNGVEGFNCYFPLQSYGFQPTNGVGYQPYRVVVLSFELLHAPATVCGPKKSTNLVKNKCVNFNFNGLTGTGVLTESNKKFLPFQQFGRDIADTTDAVRDPQTLEILDITPCSFGGVSVITPGTNTSNQVAVLYQDVNCTEVPVAIHADQLTPTWRVYSTGSNVFQTRAGCLIGAEHVNNSYECDIPIGAGICASYQTQTNSPRRARSVASQSIIAYTMSLGAENSVAYSNNSIAICTNFTISVTTEILPVSMTKTSVDCTMYICGDSTECSNLLLQYGSFCTQLNRALTGIAVEQDKNTQEVFAQVKQIYKTPPIKDCGGFNFSQILPDPSKPSKRSFIEDLLFNKVTLADAGFIKQYGDCLGDIAARDLICAQKFNGLTVLPPLLTDEMIAQYTSALLAGTITSGWTFGAGAALQIPFAMQMAYRFNGIGVTQNVLYENQKLIANQFNSAIGKIQDSLSSTASALGKLQDVVNQNAQALNTLVKQLSSNFGAISSVLNDILSRLDKVEAEVQIDRLITGRLQSLQTYVTQQLIRAAEIRASANLAATKMSECVLGQSKRVDFCGKGYHLMSFPQSAPHGVVFLHVTYVCAQEKNFTTAPAICHDGKAHFPREGVFVSNGTHWFVTQRNFYEPQIITTDNTFVSGNCDVVIGIVNNTVYDPLQPELDSFKEELDKYFKNHTSPDVDLGDISGINASVVNIQKEIDRLNEVAKNLNESLIDLQELGKYEQYIKGGGSGGGQIYEGKLTAEGLRFGIVASRFNHALVDRLVEGAIDAIVRHGGREEDITLVRVPGSWEIPVAAGELARKEDIDAVIAIGVLIRGATPHFDYIASEVSKGLADLSLELRKPITFGVITADTLEQAIERAGTKHGNKGWEAALSAIEMANLFKSLR

SEQ ID NO: 4107 - protein, 1371 aa, Artificial Sequence
  SARS-CoV-2/Tianmen/HBCDC-HB-07/2020__EPI_ISL_412983 spike protein (1-1211)(P715C_P1069C) LumSynth construct
MFVFLVLLPLVSSQCVNLTTRTQLPPAYTNSFTRGVYYPDKVFRSSVLHSTQDLFLPFFSNVTWFHAIHVSGTNGTKRFDNPVLPFNDGVYFASTEKSNIIRGWIFGTTLDSKTQSLLIVNNATNVVIKVCEFQFCNDPFLGVYYHKNNKSWMESEFRVYSSANNCTFEYVSQPFLMDLEGKQGNFKNLREFVFKNIDGYFKIYSKHTPINLVRDLPQGFSALEPLVDLPIGINITRFQTLLALHRSYLTPGDSSSGWTAGAAAYYVGYLQPRTFLLKYNENGTITDAVDCALDPLSETKCTLKSFTVEKGIYQTSNFRVQPTESIVRFPNITNLCPFGEVFNATRFASVYAWNRKRISNCVADYSVLYNSASFSTFKCYGVSPTKLNDLCFTNVYADSFVIRGDEVRQIAPGQTGKIADYNYKLPDDFTGCVIAWNSNNLDSKVGGNYNYLYRLFRKSNLKPFERDISTEIYQAGSTPCNGVEGFNCYFPLQSYGFQPTNGVGYQPYRVVVLSFELLHAPATVCGPKKSTNLVKNKCVNFNFNGLTGTGVLTESNKKFLPFQQFGRDIADTTDAVRDPQTLEILDITPCSFGGVSVITPGTNTSNQVAVLYQDLNCTEVPVAIHADQLTPTWRVYSTGSNVFQTRAGCLIGAEHVNNSYECDIPIGAGICASYQTQTNSPRRARSVASQSIIAYTMSLGAENSVAYSNNSIAICTNFTISVTTEILPVSMTKTSVDCTMYICGDSTECSNLLLQYGSFCTQLNRALTGIAVEQDKNTQEVFAQVKQIYKTPPIKDFGGFNFSQILPDPSKPSKRSFIEDLLFNKVTLADAGFIKQYGDCLGDIAARDLICAQKFNGLTVLPPLLTDEMIAQYTSALLAGTITSGWTFGAGAALQIPFAMQMAYRFNGIGVTQNVLYENQKLIANQFNSAIGKIQDSLSSTASALGKLQDVVNQNAQALNTLVKQLSSNFGAISSVLNDILSRLDKVEAEVQIDRLITGRLQSLQTYVTQQLIRAAEIRASANLAATKMSECVLGQSKRVDFCGKGYHLMSFPQSAPHGVVFLHVTYVCAQEKNFTTAPAICHDGKAHFPREGVFVSNGTHWFVTQRNFYEPQIITTDNTFVSGNCDVVIGIVNNTVYDPLQPELDSFKEELDKYFKNHTSPDVDLGDISGINASVVNIQKEIDRLNEVAKNLNESLIDLQELGKYEQYIKGGGSGGGQIYEGKLTAEGLRFGIVASRFNHALVDRLVEGAIDAIVRHGGREEDITLVRVPGSWEIPVAAGELARKEDIDAVIAIGVLIRGATPHFDYIASEVSKGLADLSLELRKPITFGVITADTLEQAIERAGTKHGNKGWEAALSAIEMANLFKSLR

SEQ ID NO: 4108 - protein, 1371 aa, Artificial Sequence
  SARS-CoV-2/Hong Kong/case42_VM20002493/2020__EPI_ISL_414527 spike protein (1-1211)(P715C_P1069C) LumSynth construct
MFVFLVLLPLVSSQCVNLTTRTQLPPAYTNSFTRGVYYPDKVFRSSVLHSTQDLFLPFFSNVTWFHAIHVSGTNGTKRFDNPVLPFNDGVYFASTEKSNIIRGWIFGTTLDSKTQSLLIVNNATNVVIKVCEFQFCNDPFLGVYYHKNNKSWMESEFRVYSSANNCTFEYVSQPFLMDLEGKQGNFKNLREFVFKNIDGYFKIYSKHTPINLVRDLPQGFSALEPLVDLPIGINITRFQTLLALHRSYLTPGDSSSGWTAGAAAYYVGYLQPRTFLLKYNENGTITDAVDCALDPLSETKCTLKSFTVEKGIYQTSNFRVQPTESIVRFPNITNLCPFGEVFNATRFASVYAWNRKRISNCVADYSVLYNSASFSTFKCYGVSPTKLNDLCFTNVYADSFVIRGDEVRQIAPGQTGKIADYNYKLPDDFTGCVIAWNSNNLDSKVGGNYNYLYRLFRKSNLKPFERDISTEIYQAGSTPCNGVEGFNCYFPLQSYGFQPTNGVGYQPYRVVVLSFELLHAPATVCGPKKSTNLVKNKCVNFNFNGLTGTGVLTESNKKFLPFQQFGRDIADTTDAVRDPQTLEILDITPCSFGGVSVITPGTNTSNQVAVLYQDVNCTEVPVAIHADQLTPTWRVYSTGSNVFQTRAGCLIGAEHVNNSYECDIPIGAGICASYQTQTNSPRRARSVASQSIIAYTMSLGAENSVAYSNNSIAICTNFAISVTTEILPVSMTKTSVDCTMYICGDSTECSNLLLQYGSFCTQLNRALTGIAVEQDKNTQEVFAQVKQIYKTPPIKDFGGFNFSQILPDPSKPSKRSFIEDLLFNKVTLADAGFIKQYGDCLGDIAARDLICAQKFNGLTVLPPLLTDEMIAQYTSALLAGTITSGWTFGAGAALQIPFAMQMAYRFNGIGVTQNVLYENQKLIANQFNSAIGKIQDSLSSTASALGKLQDVVNQNAQALNTLVKQLSSNFGAISSVLNDILSRLDKVEAEVQIDRLITGRLQSLQTYVTQQLIRAAEIRASANLAATKMSECVLGQSKRVDFCGKGYHLMSFPQSAPHGVVFLHVTYVCAQEKNFTTAPAICHDGKAHFPREGVFVSNGTHWFVTQRNFYEPQIITTDNTFVSGNCDVVIGIVNNTVYDPLQPELDSFKEELDKYFKNHTSPDVDLGDISGINASVVNIQKEIDRLNEVAKNLNESLIDLQELGKYEQYIKGGGSGGGQIYEGKLTAEGLRFGIVASRFNHALVDRLVEGAIDAIVRHGGREEDITLVRVPGSWEIPVAAGELARKEDIDAVIAIGVLIRGATPHFDYIASEVSKGLADLSLELRKPITFGVITADTLEQAIERAGTKHGNKGWEAALSAIEMANLFKSLR

SEQ ID NO: 4109 - protein, 1371 aa, Artificial Sequence
  SARS-CoV-2/USA/CruiseA-23/2020__EPI_ISL_414482 spike protein (1-1211)(P715C_P1069C) LumSynth construct
MFVFLVLLPLVSSQCVNLTTRTQLPPAYTNSFTRGVYYPDKVFRSSVLHSTQDLFLPFFSNVTWFHAIHVSGTNGTKRFDNPVLPFNDGVYFASTEKSNIIRGWIFGTTLDSKTQSLLIVNNATNVVIKVCEFQFCNDPFLGVYYHKNNKSWMESEFRVYSSANNCTFEYVSQPFLMDLEVKQGNFKNLREFVFKNIDGYFKIYSKHTPINLVRDLPQGFSALEPLVDLPIGINITRFQTLLALHRSYLTPGDSSSGWTAGAAAYYVGYLQPRTFLLKYNENGTITDAVDCALDPLSETKCTLKSFTVEKGIYQTSNFRVQPTESIVRFPNITNLCPFGEVFNATRFASVYAWNRKRISNCVADYSVLYNSASFSTFKCYGVSPTKLNDLCFTNVYADSFVIRGDEVRQIAPGQTGKIADYNYKLPDDFTGCVIAWNSNNLDSKVGGNYNYLYRLFRKSNLKPFERDISTEIYQAGSTPCNGVEGFNCYFPLQSYGFQPTNGVGYQPYRVVVLSFELLHAPATVCGPKKSTNLVKNKCVNFNFNGLTGTGVLTESNKKFLPFQQFGRDIADTTDAVRDPQTLEILDITPCSFGGVSVITPGTNTSNQVAVLYQDVNCTEVPVAIHADQLTPTWRVYSTGSNVFQTRAGCLIGAEHVNNSYECDIPIGAGICASYQTQTNSPRRARSVASQSIIAYTMSLGAENSVAYSNNSIAICTNFTISVTTEILPVSMTKTSVDCTMYICGDSTECSNLLLQYGSFCTQLNRALTGIAVEQDKNTQEVFAQVKQIYKTPPIKDFGGFNFSQILPDPSKPSKRSFIEDLLFNKVTLADAGFIKQYGDCLGDIAARDLICAQKFNGLTVLPPLLTDEMIAQYTSALLAGTITSGWTFGAGAALQIPFAMQMAYRFNGIGVTQNVLYENQKLIANQFNSAIGKIQDSLSSTASALGKLQDVVNQNAQALNTLVKQLSSNFGAISSVLNDILSRLDKVEAEVQIDRLITGRLQSLQTYVTQQLIRAAEIRASANLAATKMSECVLGQSKRVDFCGKGYHLMSFPQSAPHGVVFLHVTYVCAQEKNFTTAPAICHDGKAHFPREGVFVSNGTHWFVTQRNFYEPQIITTDNTFVSGNCDVVIGIVNNTVYDPLQPELDSFKEELDKYFKNHTSPDVDLGDISGINASVVNIQKEIDRLNEVAKNLNESLIDLQELGKYEQYIKGGGSGGGQIYEGKLTAEGLRFGIVASRFNHALVDRLVEGAIDAIVRHGGREEDITLVRVPGSWEIPVAAGELARKEDIDAVIAIGVLIRGATPHFDYIASEVSKGLADLSLELRKPITFGVITADTLEQAIERAGTKHGNKGWEAALSAIEMANLFKSLR

SEQ ID NO: 4110 - protein, 1371 aa, Artificial Sequence
  SARS-CoV-2/Hong Kong/case85_VM20002868/2020__EPI_ISL_414519 spike protein (1-1211)(P715C_P1069C) LumSynth construct
MFVFLVLVPLVSSQCVNLTTRTQLPPAYTNSFTRGVYYPDKVFRSSVLHSTQDLFLPFFSNVTWFHAIHVSGTNGTKRFDNPVLPFNDGVYFASTEKSNIIRGWIFGTTLDSKTQSLLIVNNATNVVIKVCEFQFCNDPFLGVYYHKNNKSWMESEFRVYSSANNCTFEYVSQPFLMDLEGKQGNFKNLREFVFKNIDGYFKIYSKHTPINLVRDLPQGFSALEPLVDLPIGINITRFQTLLALHRSYLTPGDSSSGWTAGAAAYYVGYLQPRTFLLKYNENGTITDAVDCALDPLSETKCTLKSFTVEKGIYQTSNFRVQPTESIVRFPNITNLCPFGEVFNATRFASVYAWNRKRISNCVADYSVLYNSASFSTFKCYGVSPTKLNDLCFTNVYADSFVIRGDEVRQIAPGQTGKIADYNYKLPDDFTGCVIAWNSNNLDSKVGGNYNYLYRLFRKSNLKPFERDISTEIYQAGSTPCNGVEGFNCYFPLQSYGFQPTNGVGYQPYRVVVLSFELLHAPATVCGPKKSTNLVKNKCVNFNFNGLTGTGVLTESNKKFLPFQQFGRDIADTTDAVRDPQTLEILDITPCSFGGVSVITPGTNTSNQVAVLYQDVNCTEVPVAIHADQLTPTWRVYSTGSNVFQTRAGCLIGAEHVNNSYECDIPIGAGICASYQTQTNSPRRARSVASQSIIAYTMSLGAENSVAYSNNSIAICTNFTISVTTEILPVSMTKTSVDCTMYICGDSTECSNLLLQYGSFCTQLNRALTGIAVEQDKNTQEVFAQVKQIYKTPPIKDFGGFNFSQILPDPSKPSKRSFIEDLLFNKVTLADAGFIKQYGDCLGDIAARDLICAQKFNGLTVLPPLLTDEMIAQYTSALLAGTITSGWTFGAGAALQIPFAMQMAYRFNGIGVTQNVLYENQKLIANQFNSAIGKIQDSLSSTASALGKLQDVVNQNAQALNTLVKQLSSNFGAISSVLNDILSRLDKVEAEVQIDRLITGRLQSLQTYVTQQLIRAAEIRASANLAATKMSECVLGQSKRVDFCGKGYHLMSFPQSAPHGVVFLHVTYVCAQEKNFTTAPAICHDGKAHFPREGVFVSNGTHWFVTQRNFYEPQIITTDNTFVSGNCDVVIGIVNNTVYDPLQPELDSFKEELDKYFKNHTSPDVDLGDISGINASVVNIQKEIDRLNEVAKNLNESLIDLQELGKYEQYIKGGGSGGGQIYEGKLTAEGLRFGIVASRFNHALVDRLVEGAIDAIVRHGGREEDITLVRVPGSWEIPVAAGELARKEDIDAVIAIGVLIRGATPHFDYIASEVSKGLADLSLELRKPITFGVITADTLEQAIERAGTKHGNKGWEAALSAIEMANLFKSLR

SEQ ID NO: 4111 - protein, 1371 aa, Artificial Sequence; identical to SEQ ID NO: 4101
  SARS-CoV-2/England/200990660/2020__EPI_ISL_414523 spike protein (1-1211)(P715C_P1069C) LumSynth construct

SEQ ID NO: 4112 - protein, 1371 aa, Artificial Sequence
  SARS-CoV-2/Australia/NSW09/2020__EPI_ISL_413595 spike protein (1-1211)(P715C_P1069C) LumSynth construct
MFVFLVLLPLVSSQCVNLTTRTQLPPAYTNSFTRGVYYPDKVFRSSVLHSTQDLFLPFFSNVTWFHAIHVSGTNGTKRFDNPVLPFNDGVYFASTEKSNIIRGWIFGTTLDSKTQSLLIVNNATNVVIKVCEFQFCNDPFLGVYYHKNNKSWMESEFRVYSSANNCTFEYVSQPFLMDLEGKQGNFKNLREFVFKNIDGYFKIYSKHTPINLVRDLPQGFSALEPLVDLPIGINITRFQTLLALHRSYLTPGDSSSGWTAGAAAYYVGYLQPRTFLLKYNENGTITDAVDCALDPLSETKCTLKSFTVEKGIYQTSNFRVQPTESIVRFPNITNLCPFGEVFNATRFASVYAWNRKRISNCVADYSVLYNSASFSTFKCYGVSPTKLNDLCFTNVYADSFVIRGDEVRQIAPGQTGKIADYNYKLPDDFTGCVIAWNSNNLDSKVGGNYNYLYRLFRKSNLKPFERDISTEIYQAGSTPCNGVEGFNCYFPLQSYGFQPTNGVGYQPYRVVVLSFELLHAPATVCGPKKSTNLVKNKCVNFNFNGLTGTGVLTESNKKFLPFQQFGRDIADTTDAVRDPQTLEILDITPCSFGGVSVITPGTNTSNQVAVLYQDVNCTEVPVAIHADQLTPTWRVYSTGSNVFQTRAGCLIGAEHVNNSYECDIPIGAGICASYQTQTNSPRRARSVASQSIIAYTMSLGAENSVAYSNNSIAICTNFTISVTTEILPVSMTKTSVDCTMYICGDSTECSNLLLQYGSFCTQLNRALTGIAVEQDKNTQEVFAQVKQIYKTPPIKDFGGFNFSQILPDPSKPSKRSFIEDLLFNKVTLADAGFIKQYGDCLGDIAARDLICAQKFNGLTVLPPLLTDEMIAQYTSALLAGTITSGWTFGAGAALQIPFAMQMAYRFNGIGVTQNVLYENQKLIANQFNSAIGKIQDSLSFTASALGKLQDVVNQNAQALNTLVKQLSSNFGAISSVLNDILSRLDKVEAEVQIDRLITGRLQSLQTYVTQQLIRAAEIRASANLAATKMSECVLGQSKRVDFCGKGYHLMSFPQSAPHGVVFLHVTYVCAQEKNFTTAPAICHDGKAHFPREGVFVSNGTHWFVTQRNFYEPQIITTDNTFVSGNCDVVIGIVNNTVYDPLQPELDSFKEELDKYFKNHTSPDVDLGDISGINASVVNIQKEIDRLNEVAKNLNESLIDLQELGKYEQYIKGGGSGGGQIYEGKLTAEGLRFGIVASRFNHALVDRLVEGAIDAIVRHGGREEDITLVRVPGSWEIPVAAGELARKEDIDAVIAIGVLIRGATPHFDYIASEVSKGLADLSLELRKPITFGVITADTLEQAIERAGTKHGNKGWEAALSAIEMANLFKSLR

SEQ ID NO: 4113 - protein, 1371 aa, Artificial Sequence; identical to SEQ ID NO: 4093
  SARS-CoV-2/Australia/NSW10/2020__EPI_ISL_413596 spike protein (1-1211)(P715C_P1069C) LumSynth construct

SEQ ID NO: 4114 - protein, 1371 aa, Artificial Sequence
  SARS-CoV-2/Switzerland/1000477797/2020__EPI_ISL_413023 spike protein (1-1211)(P715C_P1069C) LumSynth construct
MFVFLVLLPLVSSQCVNLTTRTQLPPAYTNSFTRGVYYPDKVFRSSVLHSTQDLFLPFFSNVTWFHAIHVSGTNGTKRFDNPVLPFNDGVYFASTEKSNIIRGWIFGTTLDSKTQSLLIVNNATNVVIKVCEFQFCNDPFLGVYYHKNNKSWMESEFRVYSSANNCTFEYVSQPFLMDLEGKQGNFKNLREFVFKNIDGYFNIYSKHTPINLVRDLPQGFSALEPLVDLPIGINITRFQTLLALHRSYLTPGDSSSGWTAGAAAYYVGYLQPRTFLLKYNENGTITDAVDCALDPLSETKCTLKSFTVEKGIYQTSNFRVQPTESIVRFPNITNLCPFGEVFNATRFASVYAWNRKRISNCVADYSVLYNSASFSTFKCYGVSPTKLNDLCFTNVYADSFVIRGDEVRQIAPGQTGKIADYNYKLPDDFTGCVIAWNSNNLDSKVGGNYNYLYRLFRKSNLKPFERDISTEIYQAGSTPCNGVEGFNCYFPLQSYGFQPTNGVGYQPYRVVVLSFELLHAPATVCGPKKSTNLVKNKCVNFNFNGLTGTGVLTESNKKFLPFQQFGRDIADTTDAVRDPQTLEILDITPCSFGGVSVITPGTNTSNQVAVLYQGVNCTEVPVAIHADQLTPTWRVYSTGSNVFQTRAGCLIGAEHVNNSYECDIPIGAGICASYQTQTNSPRRARSVASQSIIAYTMSLGAENSVAYSNNSIAICTNFTISVTTEILPVSMTKTSVDCTMYICGDSTECSNLLLQYGSFCTQLNRALTGIAVEQDKNTQEVFAQVKQIYKTPPIKDFGGFNFSQILPDPSKPSKRSFIEDLLFNKVTLADAGFIKQYGDCLGDIAARDLICAQKFNGLTVLPPLLTDEMIAQYTSALLAGTITSGWTFGAGAALQIPFAMQMAYRFNGIGVTQNVLYENQKLIANQFNSAIGKIQDSLSSTASALGKLQDVVNQNAQALNTLVKQLSSNFGAISSVLNDILSRLDKVEAEVQIDRLITGRLQSLQTYVTQQLIRAAEIRASANLAATKMSECVLGQSKRVDFCGKGYHLMSFPQSAPHGVVFLHVTYVCAQEKNFTTAPAICHDGKAHFPREGVFVSNGTHWFVTQRNFYEPQIITTDNTFVSGNCDVVIGIVNNTVYDPLQPELDSFKEELDKYFKNHTSPDVDLGDISGINASVVNIQKEIDRLNEVAKNLNESLIDLQELGKYEQYIKGGGSGGGQIYEGKLTAEGLRFGIVASRFNHALVDRLVEGAIDAIVRHGGREEDITLVRVPGSWEIPVAAGELARKEDIDAVIAIGVLIRGATPHFDYIASEVSKGLADLSLELRKPITFGVITADTLEQAIERAGTKHGNKGWEAALSAIEMANLFKSLR

SEQ ID NO: 4115 - protein, 1371 aa, Artificial Sequence
  SARS-CoV-2/Belgium/BA-02291/2020__EPI_ISL_415159 spike protein (1-1211)(P715C_P1069C) LumSynth construct
MFVFLVLLPLVSSQCVNLTTRTQLPPAYTNSFTRGVYYPDKVFRSSVLHSTQDLFLPFFSNVTWFHAIHVSGTNGTKRFDNPVLPFNDGVYFASTEKSNIIRGWIFGTTLDSKTQSLLIVNNATNVVIKVCEFQFCNDPFLGVYYHKNNKSWMESEFRVYSSANNCTFEYVSQPFLMDLEGKQGNFKNLREFVFKNIDGYFKIYSKHTPINLVRDLPQGFSALEPLVDLPIGINITRFQTLLALHRSYLTPGDSSSGWTAGAAAYYVGYLQPRTFLLKYNENGTITDAVDCALDPLSETKCTLKSFTVEKGIYQTSNFRVQPTESIVRFPNITNLCPFGEVFNATRFASVYAWNRKRISNCVADYSVLYNSASFSTFKCYGVSPTKLNDLCFTNVYADSFVIRGDEVRQIAPGQTGKIADYNYKLPDDFTGCVIAWNSNNLDSKVGGNYNYLYRLFRRSNLKPFERDISTEIYQAGSTPCNGVEGFNCYFPLQSYGFQPTNGVGYQPYRVVVLSFELLPAPATVCGPKKSTNLVKNKCVNFNFNGLTGTGVLTESNKKFLPFQQFGRDIADTTDAVRDPQTLEILDITPCSFGGVSVITPGTNTSNQVAVLYQGVNCTEVPVAIHADQLTPTWRVYSTGSNVFQTRAGCLIGAEHVNNSYECDIPIGAGICASYQTQTNSPRRARSVASQSIIAYTMSLGAENSVAYSNNSIAICTNFTISVTTEILPVSMTKTSVDCTMYICGDSTECSNLLLQYGSFCTQLNRALTGIAVEQDKNTQEVFAQVKQIYKTPPIKDFGGFNFSQILPDPSKPSKRSFIEDLLFNKVTLADAGFIKQYGDCLGDIAARDLICAQKFNGLTVLPPLLTDEMIAQYTSALLAGTITSGWTFGAGAALQIPFAMQMAYRFNGIGVTQNVLYENQKLIANQFNSAIGKIQDSLSSAAPALGKLQDVVNQNAQALNTLVKQLSSNFGAISSVLNDILSRLDKVEAEVQIDRLITGRLQSLQTYVTQQLIRAAEIRASANLAATKMSECVLGQSKRVDFCGKGYHLMSFPQSAPHGVVFLHVTYVCAQEKNFTTAPAICHDGKAHFPREGVFVSNGTHWFVTQRNFYEPQIITTDNTFVSGNCDVVIGIVNNTVYDPLQPELDSFKEELDKYFKNHTSPDVDLGDISGINASVVNIQKEIDRLNEVAKNLNESLIDLQELGKYEQYIKGGGSGGGQIYEGKLTAEGLRFGIVASRFNHALVDRLVEGAIDAIVRHGGREEDITLVRVPGSWEIPVAAGELARKEDIDAVIAIGVLIRGATPHFDYIASEVSKGLADLSLELRKPITFGVITADTLEQAIERAGTKHGNKGWEAALSAIEMANLFKSLR

SEQ ID NO: 4116 - protein, 1371 aa, Artificial Sequence
  SARS-CoV-2/USA/WA8-UW5/2020__EPI_ISL_413486 spike protein (1-1211)(P715C_P1069C) LumSynth construct
MFVFLVLLPLVSSQCVNLTTRTQLPPAYTNSFTRGVYYPDKVFRSSVLHSTQDLFLPFFSNVTWFHAIHVSGTNGTKRFDNPVLPFNDGVYFASTEKSNIIRGWIFGTTLDSKTQSLLIVNNATNVVIKVCEFQFCNDPFLGVYYHKNNKSWMESEFRVYSSANNCTFEYVSQPFLMDLEGKQGNFKNLREFVFKNIDGYFKIYSKHTPINLVRDLPQGFSALEPLVDLPIGINITRFQTLLALHRSYLTPGDSSSGWTAGAAAYYVGYLQPRTFLLKYNENGTITDAVDCALDPLSETKCTLKSFTVEKGIYQTSNFRVQPTESIVRFPNITNLCPFGEVFNATRFASVYAWNRKRISNCVADYSVLYNSASFSTFKCYGVSPTKLNDLCFTNVYADSFVIRGDEVRQIAPGQTGKIADYNYKLPDDFTGCVIAWNSNNLDSKVGGNYNYLYRLFRKSNLKPFERDISTEIYQAGSTPCNGVEGFNCYFPLQSYGFQPTNGVGYQPYRVVVLSFELLHAPATVCGPKKSTNLVKNKCVNFNFNGLTGTGVLTESNKKFLPFQQFGRDIADTTDAVRDPQTLEILDITPCSFGGVSVITPGTNTSNQVAVLYQDVNCTEVPVAIHADQLTPTWRVYSTGSNVFQTRAGCLIGAEYVNNSYECDIPIGAGICASYQTQTNSPRRARSVASQSIIAYTMSLGAENSVAYSNNSIAICTNFTISVTTEILPVSMTKTSVDCTMYICGDSTECSNLLLQYGSFCTQLNRALTGIAVEQDKNTQEVFAQVKQIYKTPPIKDFGGFNFSQILPDPSKPSKRSFIEDLLFNKVTLADAGFIKQYGDCLGDIAARDLICAQKFNGLTVLPPLLTDEMIAQYTSALLAGTITSGWTFGAGAALQIPFAMQMAYRFNGIGVTQNVLYENQKLIANQFNSAIGKIQDSLSSTASALGKLQDVVNQNAQALNTLVKQLSSNFGAISSVLNDILSRLDKVEAEVQIDRLITGRLQSLQTYVTQQLIRAAEIRASANLAATKMSECVLGQSKRVDFCGKGYHLMSFPQSAPHGVVFLHVTYVCAQEKNFTTAPAICHDGKAHFPREGVFVSNGTHWFVTQRNFYEPQIITTDNTFVSGNCDVVIGIVNNTVYDPLQPELDSFKEELDKYFKNHTSPDVDLGDISGINASVVNIQKEIDRLNEVAKNLNESLIDLQELGKYEQYIKGGGSGGGQIYEGKLTAEGLRFGIVASRFNHALVDRLVEGAIDAIVRHGGREEDITLVRVPGSWEIPVAAGELARKEDIDAVIAIGVLIRGATPHFDYIASEVSKGLADLSLELRKPITFGVITADTLEQAIERAGTKHGNKGWEAALSAIEMANLFKSLR

SEQ ID NO: 4117 - protein, 1371 aa, Artificial Sequence
  SARS-CoV-2/England/20102000506/2020__EPI_ISL_415147 spike protein (1-1211)(P715C_P1069C) LumSynth construct
MFVFLVLLPLVSSQCVNLTTRTQLPPAYTNSFTRGVYYPDKVFRSSVLHSTQDLFLPFFSNVTWFHAIHVSGTNGTKRFDNPVLPFNDGVYFASTEKSNIIRGWIFGTTLDSKTQSLLIVNNATNVVIKVCEFQFCNDPFLGVYYHKNNKSWMESEFRVYSSANNCTFEYVSQPFLMDLEGKQGNFKNLREFVFKNIDGYFKIYSKHTPINLVRDLPQGFSALEPLVDLPIGINITRFQTLLALHRSYLTPGDSSSGWTAGAAAYYVGYLQPRTFLLKYNENGTITDAVDCALDPLSETKCTLKSFTVEKGIYQTSNFRVQPTESIVRFPNITNLCPFGEVFNATRFASVYAWNRKRISNCVADYSVLYNSASFSTFKCYGVSPTKLNDLCFTNVYADSFVIRGDEVRQIAPGQTGKIADYNYKLPDDFTGCVIAWNSNNLDSKVGGNYNYLYRLFRKSNLKPFERDISTEIYQAGSTPCNGVEGFNCYFPLQSYGFQPTNGVGYQPYRVVVLSFELLHAPATVCGPKKSTNLVKNKCVNFNFNGLTGTGVLTESNKKFLPFQQFGRDIADTTDAVRDPQTLEILDITPCSFGGVSVITPGTNTSNQVAVLYQGVNCTEVPVAIHADQLTPTWRVYSTGSNVFQTRAGCLIGAEHVNNSYECDIPIGAGICASYQTQTNSPRRARSVASQSIIAYTMSLGAENSVAYSNNSIAICTNFTISVTTEILPVSMTKTSVDCTMYICGDSTECSNLLLQYGSFCTQLNRALTGIAVEQDKNTQEVFAQVKQIYKTPPIKDFGGFNFSQILPDPSKPSKRSFIEDLLFNKVTLADAGFIKQYGYCLGDIAARDLICAQKFNGLTVLPPLLTDEMIAQYTSALLAGTITSGWTFGAGAALQIPFAMQMAYRFNGIGVTQNVLYENQKLIANQFNSAIGKIQDSLSSTASALGKLQDVVNQNAQALNTLVKQLSSNFGAISSVLNDILSRLDKVEAEVQIDRLITGRLQSLQTYVTQQLIRAAEIRASANLAATKMSECVLGQSKRVDFCGKGYHLMSFPQSAPHGVVFLHVTYVCAQEKNFTTAPAICHDGKAHFPREGVFVSNGTHWFVTQRNFYEPQIITTDNTFVSGNCDVVIGIVNNTVYDPLQPELDSFKEELDKYFKNHTSPDVDLGDISGINASVVNIQKEIDRLNEVAKNLNESLIDLQELGKYEQYIKGGGSGGGQIYEGKLTAEGLRFGIVASRFNHALVDRLVEGAIDAIVRHGGREEDITLVRVPGSWEIPVAAGELARKEDIDAVIAIGVLIRGATPHFDYIASEVSKGLADLSLELRKPITFGVITADTLEQAIERAGTKHGNKGWEAALSAIEMANLFKSLR

SEQ ID NO: 4118 - protein, 1371 aa, Artificial Sequence
  SARS-CoV-2/Belgium/VAG-03013/2020__EPI_ISL_415155 spike protein (1-1211)(P715C_P1069C) LumSynth construct
MFVFLVLLPLVSSQCVNLTTRTQLPPAYTNSFTRGVYYPDKVFRSSVLHSTQDLFLPFFSNVTWFHAIHVSGTNGTKRFDNPVLPFNDGVYFASTEKSNIIRGWIFGTTLDSKTQSLLIVNNATNVVIKVCEFQFCNDPFLGVYYHKNNKSWMESEFRVYSSANNCTFEYVSQPFLMDLEGKQGNFKNLREFVFKNIDGYFKIYSKHTPINLVRDLPQGFSALEPLVDLPIGINITRFQTLLALHRSYLTPGDSSSGWTAGAAAYYVGYLQPRTFLLKYNENGTITDAVDCALDPLSETKCTLKSFTVEKGIYQTSNFRVQPTESIVRFPNITNLCPFGEVFNATRFASVYAWNRKRISNCVADYSVLYNSASFSTFKCYGVSPTKLNDLCFTNVYADSFVIRGDEVRQIAPGQTGKIADYNYKLPDDFTGCVIAWNSNNLDSKVGGNYNYLYRLFRKSNLKPFERDISTEIYQAGSTPCNGVEGFNCYFPLQSYGFQPTNGVGYQPYRVVVLSFELLHAPATVCGPKKSTNLVKNKCVNFNFNGLTGTGVLTESNKKFLPFQQFGRDIADTTDAVRDPQTLEILDITPCSFGGVSVITPGTNTSNQVAVLYQGVNCTEVPVAIHADQLTPTWRVYSTGSNVFQTRAGCLIGAEHVNNSYECDIPIGAGICASYQTQTNSPRRARSVASQSIIAYTMSLGAENSVAYSNNSIAICTNFTISVTTEILPVSMTKTSVDCTMYICGDSTECSNLLLQYGSFCTQLNRALTGIAVEQDKNTQEVFAQVKQIYKTPPIKDFGGFNFSQILPDPSKPSKRSFIEDLLFNKVTLADAGFIKQYGDCLGDIAARDLICAQKFNGLTVLPPLLTDEMIAQYTSALLAGTITSGWTFGAGAALQIPFAMQMAYRFNGIGVTQNVLYENQKLIANQFNSAIGKIQDSLSSTATALGKLQDVVNQNAQALNTLVKQLSSNFGAISSVLNDILSRLDKVEAEVQIDRLITGRLQSLQTYVTQQLIRAAEIRASANLAATKMSECVLGQSKRVDFCGKGYHLMSFPQSAPHGVVFLHVTYVCAQEKNFTTAPAICHDGKAHFPREGVFVSNGTHWFVTQRNFYEPQIITTDNTFVSGNCDVVIGIVNNTVYDPLQPELDSFKEELDKYFKNHTSPDVDLGDISGINASVVNIQKEIDRLNEVAKNLNESLIDLQELGKYEQYIKGGGSGGGQIYEGKLTAEGLRFGIVASRFNHALVDRLVEGAIDAIVRHGGREEDITLVRVPGSWEIPVAAGELARKEDIDAVIAIGVLIRGATPHFDYIASEVSKGLADLSLELRKPITFGVITADTLEQAIERAGTKHGNKGWEAALSAIEMANLFKSLR

SEQ ID NO: 4119 - protein, 1371 aa, Artificial Sequence
  SARS-CoV-2/Belgium/BC-03016/2020__EPI_ISL_415157 spike protein (1-1211)(P715C_P1069C) LumSynth construct
MFVFLVLLPLVSSQCVNLTTRTQLPPAYTNSFTRGVYYPDKVFRSSVLHSTQDLFLPFFSNVTWFHAIHVSGTNGTKRFDNPVLPFNDGVYFASTEKSNIIRGWIFGTTLDSKTQSLLIVNNATNVVIKVCEFQFCNDPFLGVYYHKNNKSWMESEFRVYSSANNCTFEYVSQPFLMDLEGKQGNFKNLREFVFKNIDGYFKIYSKHTPINLVRDLPQGFSALEPLVDLPIGINITRFQTLLALHRSYLTPGDSSSGWTAGAAAYYVGYLQPRTFLLKYNENGTITDAVDCALDPLSETKCTLKSFTVEKGIYQTSNFRVQPTESIVRFPNITNLCPFGEVFNATRFASVYAWNRKRISNCVADYSVLYNSASFSTFKCYGVSPTKLNDLCFTNVYADSFVIRGDEVRQIAPGQTGKIADYNYKLPDDFTGCVIAWNSNNLDSKVGGNYNYLYRLFRKSNLKPFERDISTEIYQAGSTPCNGVEGFNCYFPLQSYGFQPTNGVGYQPYRVVVLSFELLHAPATVCGPKKSTNLVKNKCVNFNFNGLTGTGVLTESNKKFLPFQQFGRDIADTTDAVRDPQTLEILDITPCSFGGVSVITPGTNTSNQVAVLYQGVNCTEVPVAIHADQLTPTWRVYSTGSNVFQTRAGCLIGAEHVNNSYECDIPIGAGICASYQTQTNSPRRARSVASQSIIAYTMSLGAENSVAYSNNSIAICTNFTISVTTEILPVSMTKTSVDCTMYICGDSTECSNLLLQYGSFCTQLNRALTGIAVEQDKNTQEVFAQVKQIYKTPPIKDFGGFNFSQILPDPSKPSKRSFIEDLLFNKVTLADAGFIKQYGDCLGDIAARDLICAQKFNGLTVLPPLLTDEMIAQYTSALLAGTITSGWTFGAGAALQIPFAMQMAYRFNGIGVTQNVLYENQKLIANQFNSAIGKIQDSLSSTAPALGKLQDVVNQNAQALNTLVKQLSSNFGAISSVLNDILSRLDKVEAEVQIDRLITGRLQSLQTYVTQQLIRAAEIRASANLAATKMSECVLGQSKRVDFCGKGYHLMSFPQSAPHGVVFLHVTYVCAQEKNFTTAPAICHDGKAHFPREGVFVSNGTHWFVTQRNFYEPQIITTDNTFVSGNCDVVIGIVNNTVYDPLQPELDSFKEELDKYFKNHTSPDVDLGDISGINASVVNIQKEIDRLNEVAKNLNESLIDLQELGKYEQYIKGGGSGGGQIYEGKLTAEGLRFGIVASRFNHALVDRLVEGAIDAIVRHGGREEDITLVRVPGSWEIPVAAGELARKEDIDAVIAIGVLIRGATPHFDYIASEVSKGLADLSLELRKPITFGVITADTLEQAIERAGTKHGNKGWEAALSAIEMANLFKSLR

SEQ ID NO: 4120 - protein, 1371 aa, Artificial Sequence
  SARS-CoV-2/Germany/BavPat3/2020__EPI_ISL_414521 spike protein (1-1211)(P715C_P1069C) LumSynth construct
MFVFLVLLPLVSSQCVNLTTRTQLPPAYTNSFTRGVYYPDKVFRSSVLHSTQDLFLPFFSNVTWFHAIHVSGTNGTKRFDNPVLPFNDGVYFASTEKSNIIRGWIFGTTLDSKTQSLLIVNNATNVVIKVCEFQFCNDPFLGVYYHKNNKSWMESEFRVYSSANNCTFEYVSQPFLMDLEGKQGNFKNLREFVFKNIDGYFKIYSKHTPINLVRDLPQGFSALEPLVDLPIGINITRFQTLLALHRSYLTPGDSSSGWTAGAAAYYVGYLQPRTFLLKYNENGTITDAVDCALDPLSETKCTLKSFTVEKGIYQTSNFRVQPTESIVRFPNITNLCPFGEVFNATRFASVYAWNRKRISNCVADYSVLYNSASFSTFKCYGVSPTKLNDLCFTNVYADSFVIRGDEVRQIAPGQTGKIADYNYKLPDDFTGCVIAWNSNNLDSKVGGNYNYLYRLFRKSNLKPFERDISTEIYQAGSTPCNGVEGFNCYFPLQSYGFQPTNGVGYQPYRVVVLSFELLHAPATVCGPKKSTNLVKNKCVNFNFNGLTGTGVLTESNKKFLPFQQFGRDIADTTDAVRDPQTLEILDITPCSFGGVSVITPGTNTSNQVAVLYQDVNCTEVPVAIHADQLTPTWRVYSTGSNVFQTRAGCLIGAEHVNNSYECDIPIGAGICASYQTQTNSPRRARSVASQSIIAYTMSLGAENSVAYSNNSIAICTNFTISVTTEILPVSMTKTSVDCTMYICGDSTECSNLLLQYGSFCTQLNRALTGIAVEQDKNTQQVFAQVKQIYKTPPIKDFGGFNFSQILPDPSKPSKRSFIEDLLFNKVTLADAGFIKQYGDCLGDIAARDLICAQKFNGLTVLPPLLTDEMIAQYTSALLAGTITSGWTFGAGAALQIPFAMQMAYRFNGIGVTQNVLYENQKLIANQFNSAIGKIQDSLSSTASALGKLQDVVNQNAQALNTLVKQLSSNFGAISSVLNDILSRLDKVEAEVQIDRLITGRLQSLQTYVTQQLIRAAEIRASANLAATKMSECVLGQSKRVDFCGKGYHLMSFPQSAPHGVVFLHVTYVCAQEKNFTTAPAICHDGKAHFPREGVFVSNGTHWFVTQRNFYEPQIITTDNTFVSGNCDVVIGIVNNTVYDPLQPELDSFKEELDKYFKNHTSPDVDLGDISGINASVVNIQKEIDRLNEVAKNLNESLIDLQELGKYEQYIKGGGSGGGQIYEGKLTAEGLRFGIVASRFNHALVDRLVEGAIDAIVRHGGREEDITLVRVPGSWEIPVAAGELARKEDIDAVIAIGVLIRGATPHFDYIASEVSKGLADLSLELRKPITFGVITADTLEQAIERAGTKHGNKGWEAALSAIEMANLFKSLR

SEQ ID NO: 4121 - protein, 1371 aa, Artificial Sequence
  SARS-CoV-2/France/HF1805/2020__EPI_ISL_414628 spike protein (1-1211)(P715C_P1069C) LumSynth construct
MFVFLVLLPLVSSQCVNLTTRTQLPPAYTNSFTRGVYYPDKVFRSSVLHSTQDLFLPFFSNVTWFHAIHVSGTNGTKRFDNPVLPFNDGVYFASTEKSNIIRGWIFGTTLDSKTQSLLIVNNATNVVIKVCEFQFCNDPFLGVYYHKNNKSWMESEFRVYSSANNCTFEYVSQPFLMDLEGKQGNFKNLREFVFKNIDGYFKIYSKHTPINLVRDLPQGFSALEPLVDLPIGINITRFQTLLALHRSYLTPGDSSSGWTAGAAAYYVGYLQPRTFLLKYNENGTITDAVDCALDPLSETKCTLKSFTVEKGIYQTSNFRVQPTESIVRFPNITNLCPFGEVFNATRFASVYAWNRKRISNCVADYSVLYNSASFSTFKCYGVSPTKLNDLCFTNVYADSFVIRGDEVRQIAPGQTGKIADYNYKLPDDFTGCVIAWNSNNLDSKVGGNYNYLYRLFRKSNLKPFERDISTEIYQAGSTPCNGVEGFNCYFPLQSYGFQPTNGVGYQPYRVVVLSFELLHAPATVCGPKKSTNLVKNKCVNFNFNGLTGTGVLTESNKKFLPFQQFGRDIADTTDAVRDPQTLEILDITPCSFGGVSVITPGTNTSNQVAVLYQGVNCTEVPVAIHADQLTPTWRVYSTGSNVFQTRAGCLIGAEHVNNSYECDIPIGAGICASYQTQTNSPRRARSVASQSIIAYTMSLGAENSVAYSNNSIAICTNFTISVTTEILPVSMTKTSVDCTMYICGDSTECSNLLLQYGSFCTQLNRALTGIAVEQDKNTQEVFAQVKQIYKTPPIKDFGGFNFSQILPDPSKPSKRSFIEDLLFNKVTLADAGFIKQYGDCLGDIAARDLICAQKFNGLTVLPPLLTDEMIAQYTSALLAGTITSGWTFGAGAALQIPFAMQMAYRFNGIGVTQNVLYENQKLIANQFNSAIGKIQDSLSSTASALGKLQDVVNQNAQALNTLVKQLSSNFGAISSVLNDILSRLDKVEAEVQIDRLITGRLQSLQTYVTQQLIRAAEIRASANLAATKMSECVLGQSKRVDFCGKGYHLMSFPQSAPHGVVFLHVTYVCAQEKNFTTAPAICHDGKAHFPREGVFVSNGTHWFVTQRNFYEPQIITTDNTFVSGNCDVVIGVVNNTVYDPLQPELDSFKEELDKYFKNHTSPDVDLGDISGINASVVNIQKEIDRLNEVAKNLNESLIDLQELGKYEQYIKGGGSGGGQIYEGKLTAEGLRFGIVASRFNHALVDRLVEGAIDAIVRHGGREEDITLVRVPGSWEIPVAAGELARKEDIDAVIAIGVLIRGATPHFDYIASEVSKGLADLSLELRKPITFGVITADTLEQAIERAGTKHGNKGWEAALSAIEMANLFKSLR

SEQ ID NO: 4122 - protein, 1371 aa, Artificial Sequence
  SARS-CoV-2/Netherlands/ZuidHolland_9/2020__EPI_ISL_414445 spike protein (1-1211)(P715C_P1069C) LumSynth construct
MFVFLVLLPLVSSQCVNLTTRTQLPPAYTNSFTRGVYYPDKVFRSSVLHSTQDLFLPFFSNVTWFHAIHVSGTNGTKRFDNPVLPFNDGVYFASTEKSNIIRGWIFGTTLDSKTQSLLIVNNATNVVIKVCEFQFCNDPFLGVYYHKNNKSWMESEFRVYSSANNCTFEYVSQPFLMDLEGKQGNFKNLREFVFKNIDGYFKIYSKHTPINLVRDLPQGFSALEPLVDLPIGINITRFQTLLALHRSYLTPGDSSSGWTAGAAAYYVGYLQPRTFLLKYNENGTITDAVDCALDPLSETKCTLKSFTVEKGIYQTSNFRVQPTESIVRFPNITNLCPFGEVFNATRFASVYAWNRKRISNCVADYSVLYNSASFSTFKCYGVSPTKLNDLCFTNVYADSFVIRGDEVRQIAPGQTGKIADYNYKLPDDFTGCVIAWNSNNLDSKVGGNYNYLYRLFRKSNLKPFERDISTEIYQAGSTPCNGVEGFNCYFPLQSYGFQPTNGVGYQPYRVVVLSFELLHAPATVCGPKKSTNLVKNKCVNFNFNGLTGTGVLTESNKKFLPFQQFGRDIADTTDAVRDPQTLEILDITPCSFGGVSVITPGTNTSNQVAVLYQGVNCTEVPVAIHADQLTPTWRVYSTGSNVFQTRAGCLIGAEHVNNSYECDIPIGAGICASYQTQTNSPRRARSVASQSIIAYTMSLGAENSVAYSNNSIAICTNFTISVTTEILPVSMTKTSVDCTMYICGDSTECSNLLLQYGSFCTQLNRALTGIAVEQDKNTQEVFAQVKQIYKTPPIKDFGGFNFSQILPDPSKPSKRSFIEDLLFNKVTLADAGFIKQYGDCLGDIAARDLICVQKFNGLTVLPPLLTDEMIAQYTSALLAGTITSGWTFGAGAALQIPFAMQMAYRFNGIGVTQNVLYENQKLIANQFNSAIGKIQDSLSSTASALGKLQDVVNQNAQALNTLVKQLSSNFGAISSVLNDILSRLDKVEAEVQIDRLITGRLQSLQTYVTQQLIRAAEIRASANLAATKMSECVLGQSKRVDFCGKGYHLMSFPQSAPHGVVFLHVTYVCAQEKNFTTAPAICHDGKAHFPREGVFVSNGTHWFVTQRNFYEPQIITTDNTFVSGNCDVVIGIVNNTVYDPLQPELDSFKEELDKYFKNHTSPDVDLGDISGINASVVNIQKEIDRLNEVAKNLNESLIDLQELGKYEQYIKGGGSGGGQIYEGKLTAEGLRFGIVASRFNHALVDRLVEGAIDAIVRHGGREEDITLVRVPGSWEIPVAAGELARKEDIDAVIAIGVLIRGATPHFDYIASEVSKGLADLSLELRKPITFGVITADTLEQAIERAGTKHGNKGWEAALSAIEMANLFKSLR

SEQ ID NO: 4123 - protein, 1371 aa, Artificial Sequence
  SARS-CoV-2/Finland/FIN03032020A/2020__EPI_ISL_413602 spike protein (1-1211)(P715C_P1069C) LumSynth construct
MFVFLVLLPLVSSQCVNLTTRTQLPPAYTNSFTRGVYYPDKVFRSSVLHSTQDLFLPFFSNVTWFHAIHVSGTNGTKRFDNPVLPFNDGVYFASTEKSNIIRGWIFGTTLDSKTQSLLIVNNATNVVIKVCEFQFCNDPFLGVYYHKNNKSWMESEFRVYSSANNCTFEYVSQPFLMDLEGKQGNFKNLREFVFKNIDGYFKIYSKHTPINLVRDLPQGFSALEPLVDLPIGINITRFQTLLALHRSYLTPGDSSSGWTAGAAAYYVGYLQPRTFLLKYNENGTITDAVDCALDPLSETKCTLKSFTVEKGIYQTSNFRVQPTESIVRFPNITNLCPFGEVFNATRFASVYAWNRKRISNCVADYSVLYNSASFSTFKCYGVSPTKLNDLCFTNVYADSFVIRGDEVRQIAPGQTGKIADYNYKLPDDFTGCVISWNSNNLDSKVGGNYNYLYRLFRKSNLKPFERDISTEIYQAGSTPCNGVEGFNCYFPLQSYGFQPTNGVGYQPYRVVVLSFELLHAPATVCGPKKSTNLVKNKCVNFNFNGLTGTGVLTESNKKFLPFQQFGRDIADTTDAVRDPQTLEILDITPCSFGGVSVITPGTNTSNQVAVLYQGVNCTEVPVAIHADQLTPTWRVYSTGSNVFQTRAGCLIGAEHVNNSYECDIPIGAGICASYQTQTNSPRRARSVASQSIIAYTMSLGAENSVAYSNNSIAICTNFTISVTTEILPVSMTKTSVDCTMYICGDSTECSNLLLQYGSFCTQLNRALTGIAVEQDKNTQEVFAQVKQIYKTPPIKDFGGFNFSQILPDPSKPSKRSFIEDLLFNKVTLADAGFIKQYGDCLGDIAARDLICAQKFNGLTVLPPLLTDEMIAQYTSALLAGTITSGWTFGAGAALQIPFAMQMAYRFNGIGVTQNVLYENQKLIANQFNSAIGKIQDSLSSTASALGKLQDVVNQNAQALNTLVKQLSSNFGAISSVLNDILSRLDKVEAEVQIDRLITGRLQSLQTYVTQQLIRAAEIRASANLAATKMSECVLGQSKRVDFCGKGYHLMSFPQSAPHGVVFLHVTYVCAQEKNFTTAPAICHDGKAHFPREGVFVSNGTHWFVTQRNFYEPQIITTDNTFVSGNCDVVIGIVNNTVYDPLQPELDSFKEELDKYFKNHTSPDVDLGDISGINASVVNIQKEIDRLNEVAKNLNESLIDLQELGKYEQYIKGGGSGGGQIYEGKLTAEGLRFGIVASRFNHALVDRLVEGAIDAIVRHGGREEDITLVRVPGSWEIPVAAGELARKEDIDAVIAIGVLIRGATPHFDYIASEVSKGLADLSLELRKPITFGVITADTLEQAIERAGTKHGNKGWEAALSAIEMANLFKSLR

SEQ ID NO: 4124 - protein, 1371 aa, Artificial Sequence
  SARS-CoV-2/France/GE1977/2020__EPI_ISL_414632 spike protein (1-1211)(P715C_P1069C) LumSynth construct
MFVFLVLLPLVSSQCVNLTTRTQLPPAYTNSFTRGVYYPDKVFRSSVLHSTQDLFLPFFSNVTWFHAIHVSGTNGTKRFDNPVLPFNDGVYFASTEKSNIIRGWIFGTTLDSKTQSLLIVNNATNVVIKVCEFQFCNDPFLGVYYHKNNKSWMESEFRVYSSANNCTFEYVSQPFLMDLEGKQGNFKNLREFVFKNIDGYFKIYSKHTPINLVRDLPQGFSALEPLVDLPIGINITRFQTLLALHRSYLTPGDSSSGWTAGAAAYYVGYLQPRTFLLKYNENGTITDAVDCALDPLSETKCTLKSFTVEKGIYQTSNFRVQPTESIVRFPNITNLCPFGEVFNATRFASVYAWNRKRISNCVADYSVLYNSASFSTFKCYGVSPTKLNDLCFTNVYADSFVIRGDEVRQIAPGQTGKIADYNYKLPDDFTGCVIAWNSNNLDSKVGGNYNYLYRLFRKSNLKPFERDISTEIYQAGSTPCNGVEGFNCYFPLQSYGFQPTNGVGYQPYRVVVLSFELLHAPATVCGPKKSTNLVKNKCVNFNFNGLTGTGVLTESNKKFLPFQQFGRDIADTTDAVRDPQTLEILDITPCSFGGVSVITPGTNTSNQVAVLYQGVNCTEVPVAIHADQLTPTWRVYSTGSNVFQTRAGCLIGAEHVNNSYECDIPIGAGICASYQTQTNSPRRARSVASQSIIAYTMSLGAENSVAYSNNSIAICTNFTISVTTEILPVSMTKTSVDCTMYICGDSTECSNLLLQYGSFCTQLNRALTGIAVEQDKNTQEVFAQVKQIYKTPPIKDFGGFNFSQILPDPSKPSKRSFIEDLLFNKVTLADAGFIKQYGDCLGDIAARDLICAQKFNGLTVLPPLLTDEMIAQYTSALLAGTITSGWTFGAGAALQIPFAMQMAYRFNGIGVTQNVLYENQKLIANQFNSAIGKIQDSLFSTASALGKLQDVVNQNAQALNTLVKQLSSNFGAISSVLNDILSRLDKVEAEVQIDRLITGRLQSLQTYVTQQLIRAAEIRASANLAATKMSECVLGQSKRVDFCGKGYHLMSFPQSAPHGVVFLHVTYVCAQEKNFTTAPAICHDGKAHFPREGVFVSNGTHWFVTQRNFYEPQIITTDNTFVSGNCDVVIGIVNNTVYDPLQPELDSFKEELDKYFKNHTSPDVDLGDISGINASVVNIQKEIDRLNEVAKNLNESLIDLQELGKYEQYIKGGGSGGGQIYEGKLTAEGLRFGIVASRFNHALVDRLVEGAIDAIVRHGGREEDITLVRVPGSWEIPVAAGELARKEDIDAVIAIGVLIRGATPHFDYIASEVSKGLADLSLELRKPITFGVITADTLEQAIERAGTKHGNKGWEAALSAIEMANLFKSLR

SEQ ID NO: 4125 - protein, 1371 aa, Artificial Sequence
  SARS-CoV-2/Finland/FIN-313/2020__EPI_ISL_414641 spike protein (1-1211)(P715C_P1069C) LumSynth construct
MFVFLVLLPLVSSQCVNLTTRTQLPPAYTNSFTRGVYYPDKVFRSSVLHSTQDLFLPFFSNVTWFHAIHVSGTNGTKRFDNPVLPFNDGVYFASTEKSNIIRGWIFGTTLDSKTQSLLIVNNATNVVIKVCEFQFCNDPFLGVYYHKNNKSWMESEFRVYSSANNCTFEYVSQPFLMDLEGKQGNFKNLREFVFKNIDGYFKIYSKHTPINLVRDLPQGFSALEPLVDLPIGINITRFKTLLALHRSYLTPGDSSSGWTAGAAAYYVGYLQPRTFLLKYNENGTITDAVDCALDPLSETKCTLKSFTVEKGIYQTSNFRVQPTESIVRFPNITNLCPFGEVFNATRFASVYAWNRKRISNCVADYSVLYNSASFSTFKCYGVSPTKLNDLCFTNVYADSFVIRGDEVRQIAPGQTGKIADYNYKLPDDFTGCVIAWNSNNLDSKVGGNYNYLYRLFRKSNLKPFERDISTEIYQAGSTPCNGVEGFNCYFPLQSYGFQPTNGVGYQPYRVVVLSFELLHAPATVCGPKKSTNLVKNKCVNFNFNGLTGTGVLTESNKKFLPFQQFGRDIADTTDAVRDPQTLEILDITPCSFGGVSVITPGTNTSNQVAVLYQGVNCTEVPVAIHADQLTPTWRVYSTGSNVFQTRAGCLIGAEHVNNSYECDIPIGAGICASYQTQTNSPRRARSVASQSIIAYTMSLGAENSVAYSNNSIAICTNFTISVTTEILPVSMTKTSVDCTMYICGDSTECSNLLLQYGSFCTQLNRALTGIAVEQDKNTQEVFAQVKQIYKTPPIKDFGGFNFSQILPDPSKPSKRSFIEDLLFNKVTLADAGFIKQYGDCLGDIAARDLICAQKFNGLTVLPPLLTDEMIAQYTSALLAGTITSGWTFGAGAALQIPFAMQMAYRFNGIGVTQNVLYENQKLIANQFNSAIGKIQDSLSSTASALGKLQDVVNQNAQALNTLVKQLSSNFGAISSVLNDILSRLDKVEAEVQIDRLITGRLQSLQTYVTQQLIRAAEIRASANLAATKMSECVLGQSKRVDFCGKGYHLMSFPQSAPHGVVFLHVTYVCAQEKNFTTAPAICHDGKAHFPREGVFVSNGTHWFVTQRNFYEPQIITTDNTFVSGNCDVVIGIVNNTVYDPLQPELDSFKEELDKYFKNHTSPDVDLGDISGINASVVNIQKEIDRLNEVAKNLNESLIDLQELGKYEQYIKGGGSGGGQIYEGKLTAEGLRFGIVASRFNHALVDRLVEGAIDAIVRHGGREEDITLVRVPGSWEIPVAAGELARKEDIDAVIAIGVLIRGATPHFDYIASEVSKGLADLSLELRKPITFGVITADTLEQAIERAGTKHGNKGWEAALSAIEMANLFKSLR

SEQ ID NO: 4126 - protein, 1371 aa, Artificial Sequence
  SARS-CoV-2/Netherlands/ZuidHolland_2/2020__EPI_ISL_414556 spike protein (1-1211)(P715C_P1069C) LumSynth construct
MFVFLVLLPLVSSQCVNLTTRTQLPPAYTNSFTRGVYYPDKVFRSSVLHSTQDLFLPFFSNVTWFHAIHVSGTNGTKRFDNPVLPFNDGVYFASTEKSNIIRGWIFGTTLDSKTQSLLIVNNATNVVIKVCEFQFCNDPFLGVYYHKNNKSWMESEFRVYSSANNCTFEYVSQPFLMDLEGKQGNFKNLREFVFKNIDGYFKIYSKHTPINLVRDLPQGFSALEPLVDLPIGINITRFQTLLALHRSYLTPGDSSSGWTAGAAAYYVGYLQPRTFLLKYNENGTITDAVDCALDPLSETKCTLKSFTVEKGIYQTSNFRVQPTESIVRFPNITNLCPFGEVFNATRFASVYAWNRKRISNCVADYSVLYNSASFSTFKCYGVSPTKLNDLCFTNVYADSFVIRGDEVRQIAPGQTGKIADYNYKLPDDFTGCVIAWNSNNLDSKVGGNYNYLYRLFRKSNLKPFERDISTEIYQAGSTPCNGVEGFNCYFPLQSYGFQPTNGVGYQPYRVVVLSFELLHAPATVCGPKKSTNLVKNKCVNFNFNGLTGTGVLTESNKKFLPFQQFGRDIADTTDAVRDPQTLEILDITPCSFGGVSVITPGTNTSNQVAVLYQGVNCTEVPVAIHADQLTPTWRVYSTGSNVFQTRAGCLIGAEHVNNSYECDIPIGAGICASYQTQTNSPRRARSVASQSIIAYTMSLGAENSVAYSNNSIAICTNFTISVTTEILPVSMTKTSVDCTMYICGDSTECSNLLLQYGSFCTQLNRALTGIALEQDKNTQEVFAQVKQIYKTPPIKDFGGFNFSQILPDPSKPSKRSFIEDLLFNKVTLADAGFIKQYGDCLGDIAARDLICAQKFNGLTVLPPLLTDEMIAQYTSALLAGTITSGWTFGAGAALQIPFAMQMAYRFNGIGVTQNVLYENQKLIANQFNSAIGKIQDSLSSTASALGKLQDVVNQNAQALNTLVKQLSSNFGAISSVLNDILSRLDKVEAEVQIDRLITGRLQSLQTYVTQQLIRAAEIRASANLAATKMSECVLGQSKRVDFCGKGYHLMSFPQSAPHGVVFLHVTYVCAQEKNFTTAPAICHDGKAHFPREGVFVSNGTHWFVTQRNFYEPQIITTDNTFVSGNCDVVIGIVNNTVYDPLQPELDSFKEELDKYFKNHTSPDVDLGDISGINASVVNIQKEIDRLNEVAKNLNESLIDLQELGKYEQYIKGGGSGGGQIYEGKLTAEGLRFGIVASRFNHALVDRLVEGAIDAIVRHGGREEDITLVRVPGSWEIPVAAGELARKEDIDAVIAIGVLIRGATPHFDYIASEVSKGLADLSLELRKPITFGVITADTLEQAIERAGTKHGNKGWEAALSAIEMANLFKSLR

SEQ ID NO: 4127 - protein, 1371 aa, Artificial Sequence
  SARS-CoV-2/USA/WA-UW31/2020__EPI_ISL_414618 spike protein (1-1211)(P715C_P1069C) LumSynth construct
MFVFLVLLPLVSSQCVNLTTRTQLPPAYTNSFTRGVYYPDKVFRSSVLHSTQDLFLPFFSNVTWFHAIHVSGTNGTKRFDNPVLPFNDGVYFASTEKSNIIRGWIFGTTLDSKTQSLLIVNNATNVVIKVCEFQFCNDPFLGVYYHKNNKSWMESEFRVYSSANNCTFEYVSQPFLMDLEGKQGNFKNLREFVFKNIDGYFKIYSKHTPINLVRDLPQGFSALEPLVDLPIGINITRFQTLLALHRSYLTPGDSSSGWTAGAAAYYVGYLQPRTFLLKYNENGTITDAVDCALDPLSETKCTLKSFTVEKGIYQTSNFRVQPTESIVRFPNITNLCPFGEVFNATRFASVYAWNRKRISNCVADYSVLYNSASFSTFKCYGVSPTKLNDLCFTNVYADSFVIRGDEVRQIAPGQTGKIADYNYKLPDDFTGCVIAWNSNNLDSKVGGNYNYLYRLFRKSNLKPFERDISTEIYQAGSTPCNGAEGFNCYFPLQSYGFQPTNGVGYQPYRVVVLSFELLHAPATVCGPKKSTNLVKNKCVNFNFNGLTGTGVLTESNKKFLPFQQFGRDIADTTDAVRDPQTLEILDITPCSFGGVSVITPGTNTSNQVAVLYQDVNCTEVPVAIHADQLTPTWRVYSTGSNVFQTRAGCLIGAEHVNNSYECDIPIGAGICASYQTQTNSPRRARSVASQSIIAYTMSLGAENSVAYSNNSIAICTNFTISVTTEILPVSMTKTSVDCTMYICGDSTECSNLLLQYGSFCTQLNRALTGIAVEQDKNTQEVFAQVKQIYKTPPIKDFGGFNFSQILPDPSKPSKRSFIEDLLFNKVTLADAGFIKQYGDCLGDIAARDLICAQKFNGLTVLPPLLTDEMIAQYTSALLAGTITSGWTFGAGAALQIPFAMQMAYRFNGIGVTQNVLYENQKLIANQFNSAIGKIQDSLSSTASALGKLQDVVNQNAQALNTLVKQLSSNFGAISSVLNDILSRLDKVEAEVQIDRLITGRLQSLQTYVTQQLIRAAEIRASANLAATKMSECVLGQSKRVDFCGKGYHLMSFPQSAPHGVVFLHVTYVCAQEKNFTTAPAICHDGKAHFPREGVFVSNGTHWFVTQRNFYEPQIITTDNTFVSGNCDVVIGIVNNTVYDPLQPELDSFKEELDKYFKNHTSPDVDLGDISGINASVVNIQKEIDRLNEVAKNLNESLIDLQELGKYEQYIKGGGSGGGQIYEGKLTAEGLRFGIVASRFNHALVDRLVEGAIDAIVRHGGREEDITLVRVPGSWEIPVAAGELARKEDIDAVIAIGVLIRGATPHFDYIASEVSKGLADLSLELRKPITFGVITADTLEQAIERAGTKHGNKGWEAALSAIEMANLFKSLR

SEQ ID NO: 4128 - protein, 1371 aa, Artificial Sequence
  SARS-CoV-2/South Korea/SNU01/2020__EPI_ISL_411929 spike protein (1-1211)(P715C_P1069C) LumSynth construct
MFVFLVLLPLVSSQCVNLTTRTQLPPAYTNSFTRGVYYPDKVFRSSVLHSTQDLFLPFFSNVTWFHAIHVSGTNGTKRFDNPVLPFNDGVYFASTEKSNIIRGWIFGTTLDSKTQSLLIVNNATNVVIKVCEFQFCNDPFLGVYYHKNNKSWMESEFRVYSSANNCTFEYVSQPFLMDLEGKQGNFKNLREFVFKNIDGYFKIYSKHTPINLVRDLPQGFWALEPLVDLPIGINITRFQTLLALHRSYLTPGDSSSGWTAGAAAYYVGYLQPRTFLLKYNENGTITDAVDCALDPLSETKCTLKSFTVEKGIYQTSNFRVQPTESIVRFPNITNLCPFGEVFNATRFASVYAWNRKRISNCVADYSVLYNSASFSTFKCYGVSPTKLNDLCFTNVYADSFVIRGDEVRQIAPGQTGKIADYNYKLPDDFTGCVIAWNSNNLDSKVGGNYNYLYRLFRKSNLKPFERDISTEIYQAGSTPCNGVEGFNCYFPLQSYGFQPTNGVGYQPYRVVVLSFELLHAPATVCGPKKSTNLVKNKCVNFNFNGLTGTGVLTESNKKFLPFQQFGRDIADTTDAVRDPQTLEILDITPCSFGGVSVITPGTNTSNQVAVLYQDVNCTEVPVAIHADQLTPTWRVYSTGSNVFQTRAGCLIGAEHVNNSYECDIPIGAGICASYQTQTNSPRRARSVASQSIIAYTMSLGAENSVAYSNNSIAICTNFTISVTTEILPVSMTKTSVDCTMYICGDSTECSNLLLQYGSFCTQLNRALTGIAVEQDKNTQEVFAQVKQIYKTPPIKDFGGFNFSQILPDPSKPSKRSFIEDLLFNKVTLADAGFIKQYGDCLGDIAARDLICAQKFNGLTVLPPLLTDEMIAQYTSALLAGTITSGWTFGAGAALQIPFAMQMAYRFNGIGVTQNVLYENQKLIANQFNSAIGKIQDSLSSTASALGKLQDVVNQNAQALNTLVKQLSSNFGAISSVLNDILSRLDKVEAEVQIDRLITGRLQSLQTYVTQQLIRAAEIRASANLAATKMSECVLGQSKRVDFCGKGYHLMSFPQSAPHGVVFLHVTYVCAQEKNFTTAPAICHDGKAHFPREGVFVSNGTHWFVTQRNFYEPQIITTDNTFVSGNCDVVIGIVNNTVYDPLQPELDSFKEELDKYFKNHTSPDVDLGDISGINASVVNIQKEIDRLNEVAKNLNESLIDLQELGKYEQYIKGGGSGGGQIYEGKLTAEGLRFGIVASRFNHALVDRLVEGAIDAIVRHGGREEDITLVRVPGSWEIPVAAGELARKEDIDAVIAIGVLIRGATPHFDYIASEVSKGLADLSLELRKPITFGVITADTLEQAIERAGTKHGNKGWEAALSAIEMANLFKSLR

SEQ ID NO: 4129 - protein, 1371 aa, Artificial Sequence
  SARS-CoV-2/China/WF0004/2020__EPI_ISL_413694 spike protein (1-1211)(P715C_P1069C) LumSynth construct
MFVFLVLLPLVSSQCVNLTTRTQLPPAYTNSFTRGVYYPDKVFRSSVLHSTQDLFLPFFSNVTWFHAIHVSGTNGTKRFDNPVLPFNDGVYFASTEKSNIIRGWIFGTTLDSKTQSLLIVNNATNVVIKVCEFQFCNDPFLGVYYHKNNKSWTESEFRVYSSANNCTFEYVSQPFLMDLEGKQGNFKNLREFVFKNIDGYFKIYSKHTPINLVRDLPQGFSALEPLVDLPIGINITRFQTLLALHRSYLTPGDSSSGWTAGAAAYYVGYLQPRTFLLKYNENGTITDAVDCALDPLSETKCTLKSFTVEKGIYQTSNFRVQPTESIVRFPNITNLCPFGEVFNATRFASVYAWNRKRISNCVADYSVLYNSASFSTFKCYGVSPTKLNDLCFTNVYADSFVIRGDEVRQIAPGQTGKIADYNYKLPDDFTGCVIAWNSNNLDSKVGGNYNYLYRLFRKSNLKPFERDISTEIYQAGSTPCNGVEGFNCYFPLQSYGFQPTNGVGYQPYRVVVLSFELLHAPATVCGPKKSTNLVKNKCVNFNFNGLTGTGVLTESNKKFLPFQQFGRDIADTTDAVRDPQTLEILDITPCSFGGVSVITPGTNTSNQVAVLYQDVNCTEVPVAIHADQLTPTWRVYSTGSNVFQTRAGCLIGAEHVNNSYECDIPIGAGICASYQTQTNSPRRARSVASQSIIAYTMSLGAENSVAYSNNSIAICTNFTISVTTEILPVSMTKTSVDCTMYICGDSTECSNLLLQYGSFCTQLNRALTGIAVEQDKNTQEVFAQVKQIYKTPPIKDFGGFNFSQILPDPSKPSKRSFIEDLLFNKVTLADAGFIKQYGDCLGDIAARDLICAQKFNGLTVLPPLLTDEMIAQYTSALLAGTITSGWTFGAGAALQIPFAMQMAYRFNGIGVTQNVLYENQKLIANQFNSAIGKIQDSLSSTASALGKLQDVVNQNAQALNTLVKQLSSNFGAISSVLNDILSRLDKVEAEVQIDRLITGRLQSLQTYVTQQLIRAAEIRASANLAATKMSECVLGQSKRFDFCGKGYHLMSFPQSAPHGVVFLHVTYVCAQEKNFTTAPAICHDGKAHFPREGVFVSNGTHWFVTQRNFYEPQIITTDNTFVSGNCDVVIGIVNNTVYDPLQPELDSFKEELDKYFKNHTSPDVDLGDISGINASVVNIQKEIDRLNEVAKNLNESLIDLQELGKYEQYIKGGGSGGGQIYEGKLTAEGLRFGIVASRFNHALVDRLVEGAIDAIVRHGGREEDITLVRVPGSWEIPVAAGELARKEDIDAVIAIGVLIRGATPHFDYIASEVSKGLADLSLELRKPITFGVITADTLEQAIERAGTKHGNKGWEAALSAIEMANLFKSLR

SEQ ID NO: 4130 - protein, 1371 aa, Artificial Sequence
  SARS-CoV-2/China/WF0028/2020__EPI_ISL_413791 spike protein (1-1211)(P715C_P1069C) LumSynth construct
MFVFLVLLPLVSSQCVNLTTRTQLPPAYTNSFTRGVYYPDKVFRSSVLHSTQDLFLPFFSNVTWFHAIHVSGTNGTKRFDNPVLPFNDGVYFASTEKSNIIRGWIFGTTLDSKTQSLLIVNNATNVVIKVCEFQFCNDPFLGVYYHKNNKSWMESEFRVYSSANNCTFEYVSQPFLMDLEGKQGNFKNLREFVFKNIDGYFKIYSKHTPINLVRDLPQGFSALEPLVDLPIGINITRFQTLLALHRSYLTPGDSSSGWTAGAAAYYVGYLQPRTFLLKYNENGTITDAVDCALDPLSETKCTLKSFTVEKGIYQTSNFRVQPTESIVRFPNITNLCPFGEVFNATRFASVYAWNRKRISNCVADYSVLYNSASFSTFKCYGVSPTKLNDLCFTNVYADSFVIRGDEVRQIAPGQTGKIADYNYKLPDDFTGCVIAWNSNNLDSKVGGNYNYLYRLFRKSNLKPFERDISTEIYQAGSTPCNGVEGFNCYFPLQSYGFQPTNGVGYQPYRVVVLSFELLHAPATVCGPKKSTNLVKNKCVNFNFNGLTGTGVLTESNKKFLPFQQFGRDIADTTDAVRDPQTLEILDITPCSFGGVSVITPGTNTSNQVAVLYQDVNCTEVPVAIHADQLTPTWRVYSTGSNVFQTRAGCLIGAEHVNNSYECDIPIGAGICASYQTQTNSPRRARSVASQSIIAYTMSLGAENSVAYSNNSIAICTNFTISVTTEILPVSMTKTSVDCTMYICGDSTECSNLLLQYGSFCTQLNRALTGIAVEQDKNTQEVFAQVKQIYKTPPIKDFGGFNFSQILPDPSKPSKRSFIEDLLFNKVTLADAGFIKQYGDCLGDIAARDLICAQKFNGLTVLPPLLTDEMIAQYTSALLAGTITSGWTFGAGAALQIPFAMQMAYRFNGIGVTQNVLYENQKLIANQFNSAIGKIQDSLSSTASALGKLQDVVNQNAQALNTLVKQLSSNFGAISSVLNDILSRLDKVEAEVQIDRLITGRLQSLQTYVTQQLIRAAEIRASANLAATKMSECVLGQSKRVDFCGKGYHLMSFPQSAPHGVVFLHVTYVCAQEKNFTTAPAICHDGKAHFPREGVFVSNGTHWFVTQRNFYEPQIITTDNTFVSGNCDVVIGIVNNTVYDPLQPELESFKEELDKYFKNHTSPDVDLGDISGINASVVNIQKEIDRLNEVAKNLNESLIDLQELGKYEQYIKGGGSGGGQIYEGKLTAEGLRFGIVASRFNHALVDRLVEGAIDAIVRHGGREEDITLVRVPGSWEIPVAAGELARKEDIDAVIAIGVLIRGATPHFDYIASEVSKGLADLSLELRKPITFGVITADTLEQAIERAGTKHGNKGWEAALSAIEMANLFKSLR

SEQ ID NO: 4131 - protein, 1371 aa, Artificial Sequence
  SARS-CoV-2/2019-nCoV/USA-CruiseA-18/2020__MT159716.1 spike protein (1-1211)(P715C_P1069C) LumSynth construct
MFVFLVLLPLVSSQCVNLTTRTQLPPAYTNSFTRGVYYPDKVFRSSVLHSTQDLFLPFFSNVTWFHAIHVSGTNGTKRFDNPVLPFNDGVYFASTEKSNIIRGWIFGTTLDSKTQSLLIVNNATNVVIKVCEFQFCNDPFLGVYYHKNNKSWMESELRVYSSANNCTFEYVSQPFLMDLEGKQGNFKNLREFVFKNIDGYFKIYSKHTPINLVRDLPQGFSALEPLVDLPIGINITRFQTLLALHRSYLTPGDSSSGWTAGAAAYYVGYLQPRTFLLKYNENGTITDAVDCALDPLSETKCTLKSFTVEKGIYQTSNFRVQPTESIVRFPNITNLCPFGEVFNATRFASVYAWNRKRISNCVADYSVLYNSASFSTFKCYGVSPTKLNDLCFTNVYADSFVIRGDEVRQIAPGQTGKIADYNYKLPDDFTGCVIAWNSNNLDSKVGGNYNYLYRLFRKSNLKPFERDISTEIYQAGSTPCNGVEGFNCYFPLQSYGFQPTNGVGYQPYRVVVLSFELLHAPATVCGPKKSTNLVKNKCVNFNFNGLTGTGVLTESNKKFLPFQQFGRDIADTTDAVRDPQTLEILDITPCSFGGVSVITPGTNTSNQVAVLYQDVNCTEVPVAIHADQLTPTWRVYSTGSNVFQTRAGCLIGAEHVNNSYECDIPIGAGICASYQTQTNSPRRARSVASQSIIAYTMSLGAENSVAYSNNSIAICTNFTISVTTEILPVSMTKTSVDCTMYICGDSTECSNLLLQYGSFCTQLNRALTGIAVEQDKNTQEVFAQVKQIYKTPPIKDFGGFNFSQILPDPSKPSKRSFIEDLLFNKVTLADAGFIKQYGDCLGDIAARDLICAQKFNGLTVLPPLLTDEMIAQYTSALLAGTITSGWTFGAGAALQIPFAMQMAYRFNGIGVTQNVLYENQKLIANQFNSAIGKIQDSLSSTASALGKLQDVVNQNAQALNTLVKQLSSNFGAISSVLNDILSRLDKVEAEVQIDRLITGRLQSLQTYVTQQLIRAAEIRASANLAATKMSECVLGQSKRVDFCGKGYHLMSFPQSAPHGVVFLHVTYVCAQEKNFTTAPAICHDGKAHFPREGVFVSNGTHWFVTQRNFYEPQIITTDNTFVSGNCDVVIGIVNNTVYDPLQPELDSFKEELDKYFKNHTSPDVDLGDISGINASVVNIQKEIDRLNEVAKNLNESLIDLQELGKYEQYIKGGGSGGGQIYEGKLTAEGLRFGIVASRFNHALVDRLVEGAIDAIVRHGGREEDITLVRVPGSWEIPVAAGELARKEDIDAVIAIGVLIRGATPHFDYIASEVSKGLADLSLELRKPITFGVITADTLEQAIERAGTKHGNKGWEAALSAIEMANLFKSLR

SEQ ID NO: 4132 - protein, 1371 aa, Artificial Sequence
  SARS-CoV-2/SARS-CoV-2/Yunnan-01/human/2020/CHN__MT049951.1 spike protein (1-1211)(P715C_P1069C) LumSynth construct
MFVFLVLLPLVSSQCVNLTTRTQLPPANTNSFTRGVYYPDKVFRSSVLHSTQDLFLPFFSNVTWFHAIHVSGTNGTKRFDNPVLPFNDGVYFASTEKSNIIRGWIFGTTLDSKTQSLLIVNNATNVVIKVCEFQFCNDPFLGVYYHKNNKSWMESEFRVYSSANNCTFEYVSQPFLMDLEGKQGNFKNLREFVFKNIDGYFKIYSKHTPINLVRDLPQGFSALEPLVDLPIGINITRFQTLLALHRSYLTPGDSSSGWTAGAAAYYVGYLQPRTFLLKYNENGTITDAVDCALDPLSETKCTLKSFTVEKGIYQTSNFRVQPTESIVRFPNITNLCPFGEVFNATRFASVYAWNRKRISNCVADYSVLYNSASFSTFKCYGVSPTKLNDLCFTNVYADSFVIRGDEVRQIAPGQTGKIADYNYKLPDDFTGCVIAWNSNNLDSKVGGNYNYLYRLFRKSNLKPFERDISTEIYQAGSTPCNGVEGFNCYFPLQSYGFQPTNGVGYQPYRVVVLSFELLHAPATVCGPKKSTNLVKNKCVNFNFNGLTGTGVLTESNKKFLPFQQFGRDIADTTDAVRDPQTLEILDITPCSFGGVSVITPGTNTSNQVAVLYQDVNCTEVPVAIHADQLTPTWRVYSTGSNVFQTRAGCLIGAEHVNNSYECDIPIGAGICASYQTQTNSPRRARSVASQSIIAYTMSLGAENSVAYSNNSIAICTNFTISVTTEILPVSMTKTSVDCTMYICGDSTECSNLLLQYGSFCTQLNRALTGIAVEQDKNTQEVFAQVKQIYKTPPIKDFGGFNFSQILPDPSKPSKRSFIEDLLFNKVTLADAGFIKQYGDCLGDIAARDLICAQKFNGLTVLPPLLTDEMIAQYTSALLAGTITSGWTFGAGAALQIPFAMQMAYRFNGIGVTQNVLYENQKLIANQFNSAIGKIQDSLSSTASALGKLQDVVNQNAQALNTLVKQLSSNFGAISSVLNDILSRLDKVEAEVQIDRLITGRLQSLQTYVTQQLIRAAEIRASANLAATKMSECVLGQSKRVDFCGKGYHLMSFPQSAPHGVVFLHVTYVCAQEKNFTTAPAICHDGKAHFPREGVFVSNGTHWFVTQRNFYEPQIITTDNTFVSGNCDVVIGIVNNTVYDPLQPELDSFKEELDKYFKNHTSPDVDLGDISGINASVVNIQKEIDRLNEVAKNLNESLIDLQELGKYEQYIKGGGSGGGQIYEGKLTAEGLRFGIVASRFNHALVDRLVEGAIDAIVRHGGREEDITLVRVPGSWEIPVAAGELARKEDIDAVIAIGVLIRGATPHFDYIASEVSKGLADLSLELRKPITFGVITADTLEQAIERAGTKHGNKGWEAALSAIEMANLFKSLR

SEQ ID NO: 4133 - protein, 1371 aa, Artificial Sequence
  SARS-CoV-2/USA/WA-UW292/2020__EPI_ISL_418077 spike protein (1-1211)(P715C_P1069C) LumSynth construct
MFVFLVLLPLVSSQCVNLTTRTQLPPAYTNSFTRGVYYPDKVFRSSVLHSTQDLFLPFFSNVTWFHAIHVSGTNGTKRFDNPVLPFNDGVYFASTEKSNIIRGWIFGTTLDSKTQSLLIVNNATNVVIKVCEFQFCNDPFLGVYYHKNNKSWMESEFRVYSSANNCTFEYVSQPFLMDLEGKQGNFKNLREFVFKNIDGYFKIYSKHTPINLVRDLPQGFSALEPLVDLPIGINITRFQTLLALHRSYLTPGDSSSGWTAGAAAYYVGYLQPRTFLLKYNENGTITDAVDCALDPLSETKCTLKSFTVEKGIYQTSNFRVQPTESIVRFPNITNLCPFGEVFNATRFASVYAWNRKRISNCVADYSVLYNSASFSTFKCYGVSPTKLNDLCFTNVYADSFVIRGDEVRQIAPGQTGKIADYNYKLPDDFTGCVIAWNSNNLDSKVGGNYNYLYRLFRKSNLKPFERDISTEIYQASSTPCNGVEGFNCYFPLQSYGFQPTNGVGYQPYRVVVLSFELLHAPATVCGPKKSTNLVKNKCVNFNFNGLTGTGVLTESNKKFLPFQQFGRDIADTTDAVRDPQTLEILDITPCSFGGVSVITPGTNTSNQVAVLYQDVNCTEVPVAIHADQLTPTWRVYSTGSNVFQTRAGCLIGAEHVNNSYECDIPIGAGICASYQTQTNSPRRARSVASQSIIAYTMSLGAENSVAYSNNSIAICTNFTISVTTEILPVSMTKTSVDCTMYICGDSTECSNLLLQYGSFCTQLNRALTGIAVEQDKNTQEVFAQVKQIYKTPPIKDFGGFNFSQILPDPSKPSKRSFIEDLLFNKVTLADAGFIKQYGDCLGDIAARDLICAQKFNGLTVLPPLLTDEMIAQYTSALLAGTITSGWTFGAGAALQIPFAMQMAYRFNGIGVTQNVLYENQKLIANQFNSAIGKIQDSLSSTASALGKLQDVVNQNAQALNTLVKQLSSNFGAISSVLNDILSRLDKVEAEVQIDRLITGRLQSLQTYVTQQLIRAAEIRASANLAATKMSECVLGQSKRVDFCGKGYHLMSFPQSAPHGVVFLHVTYVCAQEKNFTTAPAICHDGKAHFPREGVFVSNGTHWFVTQRNFYEPQIITTDNTFVSGNCDVVIGIVNNTVYDPLQPELDSFKEELDKYFKNHTSPDVDLGDISGINASVVNIQKEIDRLNEVAKNLNESLIDLQELGKYEQYIKGGGSGGGQIYEGKLTAEGLRFGIVASRFNHALVDRLVEGAIDAIVRHGGREEDITLVRVPGSWEIPVAAGELARKEDIDAVIAIGVLIRGATPHFDYIASEVSKGLADLSLELRKPITFGVITADTLEQAIERAGTKHGNKGWEAALSAIEMANLFKSLR

SEQ ID NO: 4134 - protein, 1371 aa, Artificial Sequence
  SARS-CoV-2/Iceland/192/2020__EPI_ISL_417819 spike protein (1-1211)(P715C_P1069C) LumSynth construct
MFVFFVLLPLVSSQCVNLTTRTQLPPAYTNSFTRGVYYPDKVFRSSVLHSTQDLFLPFFSNVTWFHAIHVSGTNGTKRFDNPVLPFNDGVYFASTEKSNIIRGWIFGTTLDSKTQSLLIVNNATNVVIKVCEFQFCNDPFLGVYYHKNNKSWMESEFRVYSSANNCTFEYVSQPFLMDLEGKQGNFKNLREFVFKNIDGYFKIYSKHTPINLVRDLPQGFSALEPLVDLPIGINITRFQTLLALHRSYLTPGDSSSGWTAGAAAYYVGYLQPRTFLLKYNENGTITDAVDCALDPLSETKCTLKSFTVEKGIYQTSNFRVQPTESIVRFPNITNLCPFGEVFNATRFASVYAWNRKRISNCVADYSVLYNSASFSTFKCYGVSPTKLNDLCFTNVYADSFVIRGDEVRQIAPGQTGKIADYNYKLPDDFTGCVIAWNSNNLDSKVGGNYNYLYRLFRKSNLKPFERDISTEIYQAGSTPCNGVEGFNCYFPLQSYGFQPTNGVGYQPYRVVVLSFELLHAPATVCGPKKSTNLVKNKCVNFNFNGLTGTGVLTESNKKFLPFQQFGRDIADTTDAVRDPQTLEILDITPCSFGGVSVITPGTNTSNQVAVLYQGVNCTEVPVAIHADQLTPTWRVYSTGSNVFQTRAGCLIGAEHVNNSYECDIPIGAGICASYQTQTNSPRRARSVASQSIIAYTMSLGAENSVAYSNNSIAICTNFTISVTTEILPVSMTKTSVDCTMYICGDSTECSNLLLQYGSFCTQLNRALTGIAVEQDKNTQEVFAQVKQIYKTPPIKDFGGFNFSQILPDPSKPSKRSFIEDLLFNKVTLADAGFIKQYGDCLGDIAARDLICAQKFNGLTVLPPLLTDEMIAQYTSALLAGTITSGWTFGAGAALQIPFAMQMAYRFNGIGVTQNVLYENQKLIANQFNSAIGKIQDSLSSTASALGKLQDVVNQNAQALNTLVKQLSSNFGAISSVLNDILSRLDKVEAEVQIDRLITGRLQSLQTYVTQQLIRAAEIRASANLAATKMSECVLGQSKRVDFCGKGYHLMSFPQSAPHGVVFLHVTYVCAQEKNFTTAPAICHDGKAHFPREGVFVSNGTHWFVTQRNFYEPQIITTDNTFVSGNCDVVIGIVNNTVYDPLQPELDSFKEELDKYFKNHTSPDVDLGDISGINASVVNIQKEIDRLNEVAKNLNESLIDLQELGKYEQYIKGGGSGGGQIYEGKLTAEGLRFGIVASRFNHALVDRLVEGAIDAIVRHGGREEDITLVRVPGSWEIPVAAGELARKEDIDAVIAIGVLIRGATPHFDYIASEVSKGLADLSLELRKPITFGVITADTLEQAIERAGTKHGNKGWEAALSAIEMANLFKSLR

SEQ ID NO: 4135 - protein, 1371 aa, Artificial Sequence
  SARS-CoV-2/Belgium/ULG-6939/2020__EPI_ISL_417020 spike protein (1-1211)(P715C_P1069C) LumSynth construct
MFVFLVLLPLVSSQCVNLTTRTQLPPAYTNSFTRGVYYPDKVFRSSVLHSTQDLFLPFFSNVTWFHAIHVSGTNGTKRFDNPVLPFNDGVYFASTEKSNIIRGWIFGTTLDSKTQSLLIVNNATNVVIKVCEFQFCNDPFLGVYYHKNNKSWMESEFRVYSSANNCTFEYVSQPFLMDLEGKQGNFKNLREFVFKNIDGYFKIYSKHTPINLVRDLPQGFSALEPLVDLPIGINITRFQTLLALHRSYLTPGDSSSGWTAGAAAYYVGYLQPRTFLLKYNENGTITDAVDCALDPLSETKCTLKSFTVEKGIYQTSNFRVQPTESIVRFPNITNLCPFGEVFNATRFASVYAWNRKRISNCVADYSVLYNSASFSTFKCYGVSPTKLNDLCFTNVYADSFVIRGDEVRQIAPGQTGKIADYNYKLPDDFTGCVIAWNSNNLDSKVGGNYNYLYRLFRKSNLKPFERDISTEIYQAGSTPCNGVEGFNCYFPLQSYGFQPTNGVGYQPYRVVVLSFELLHAPATVCGPKKSTNLVKNKCVNFNFNGLTGTGVLTESNKKFLPFQQFGRDIADTTDAVRDPQTLEILDITPCSFGGVSVITPGTNTSNQVAVLYQGVNCTEVPVAIHADQLTPTWRVYSTGSNVFQTRAGCLIGAEHVNNSYECDIPIGAGICASYQTQTNSPRRARSVASQSIIAYTMSLGAENSVVYSNNSIAICTNFTISVTTEILPVSMTKTSVDCTMYICGDSTECSNLLLQYGSFCTQLNRALTGIAVEQDKNTQEVFAQVKQIYKTPPIKDFGGFNFSQILPDPSKPSKRSFIEDLLFNKVTLADAGFIKQYGDCLGDIAARDLICAQKFNGLTVLPPLLTDEMIAQYTSALLAGTITSGWTFGAGAALQIPFAMQMAYRFNGIGVTQNVLYENQKLIANQFNSAIGKIQDSLSSTASALGKLQDVVNQNAQALNTLVKQLSSNFGAISSVLNDILSRLDKVEAEVQIDRLITGRLQSLQTYVTQQLIRAAEIRASANLAATKMSECVLGQSKRVDFCGKGYHLMSFPQSAPHGVVFLHVTYVCAQEKNFTTAPAICHDGKAHFPREGVFVSNGTHWFVTQRNFYEPQIITTDNTFVSGNCDVVIGIVNNTVYDPLQPELDSFKEELDKYFKNHTSPDVDLGDISGINASVVNIQKEIDRLNEVAKNLNESLIDLQELGKYEQYIKGGGSGGGQIYEGKLTAEGLRFGIVASRFNHALVDRLVEGAIDAIVRHGGREEDITLVRVPGSWEIPVAAGELARKEDIDAVIAIGVLIRGATPHFDYIASEVSKGLADLSLELRKPITFGVITADTLEQAIERAGTKHGNKGWEAALSAIEMANLFKSLR

SEQ ID NO: 4136 - protein, 1371 aa, Artificial Sequence
  SARS-CoV-2/France/HF2496/2020__EPI_ISL_418231 spike protein (1-1211)(P715C_P1069C) LumSynth construct
MFVFLVLLPLVSSQCVNLTTRTQLPPAYTNSFTRGVYYPDKVFRSSVLHSTQDLFLPFFSNVTWFHAIHVSGTNGTKRFDNPVLPFNDGVYFASTEKSNIIRGWIFGTTLDSKTQSLLIVNNATNVVIKVCEFQFCNDPFLGVYYHKNNKSWMESEFRVYSSANNCTFEYVSQPFLMDLEGKQGNFKNLREFVFKNIDGYFKIYSKHTPINLVRDLPQGFSALEPLVDLPIGINITRFQTLLALHRSYLTPGDSSSGWTAGAAAYYVGYLQPRTFLLKYNENGTITDAVDCALDPLSETKCTLKSFTVEKGIYQTSNFRVQPTESIVRFPNITNLCPFGEVFNATRFASVYAWNRKRISNCVADYSVLYNSASFSTFKCYGVSPTKLNDLCFTNVYADSFVIRGDEVRQIAPGQTGKIADYNYKLPDDFTGCVIAWNSNNLDSKVGGNYNYLYRLFRKSNLKPFERDISTEIYQAGSTPCNGVEGFNCYFPLQSYGFQPTNGVGYQPYRVVVLSFELLHAPATVCGPKKSTNLVKNKCVNFNFNGLTGTGVLTESNKKFLPFQQFGRDIADTTDAVRDPQTLEILDITPCSFGGVSVITPGTNTSNQVAVLYQGVNCTEVPVAIHADQLTPTWRVYSTGSNVFQTRAGCLIGAEHVNNSYECDIPIGAGICASYQTQTNSPRRARSVASQSIIAYTMSLGAENSVAYSNNSIAICTNFTISVTTEILPVSMTKTSVDCTMYICGDSTECSNLLLQYGSFCTQLNRALTGIAVEQDKNTQEVFAQVKQIYKTPPIKDFGGFNFSQILPDPSKPSKRSFIEDLLFNKVTLADAGFIKQYGDCLGDIVARDLICAQKFNGLTVLPPLLTDEMIAQYTSALLAGTITSGWTFGAGAALQIPFAMQMAYRFNGIGVTQNVLYENQKLIANQFNSAIGKIQDSLSSTASALGKLQDVVNQNAQALNTLVKQLSSNFGAISSVLNDILSRLDKVEAEVQIDRLITGRLQSLQTYVTQQLIRAAEIRASANLAATKMSECVLGQSKRVDFCGKGYHLMSFPQSAPHGVVFLHVTYVCAQEKNFTTAPAICHDGKAHFPREGVFVSNGTHWFVTQRNFYEPQIITTDNTFVSGNCDVVIGIVNNTVYDPLQPELDSFKEELDKYFKNHTSPDVDLGDISGINASVVNIQKEIDRLNEVAKNLNESLIDLQELGKYEQYIKGGGSGGGQIYEGKLTAEGLRFGIVASRFNHALVDRLVEGAIDAIVRHGGREEDITLVRVPGSWEIPVAAGELARKEDIDAVIAIGVLIRGATPHFDYIASEVSKGLADLSLELRKPITFGVITADTLEQAIERAGTKHGNKGWEAALSAIEMANLFKSLR

SEQ ID NO: 4137 - protein, 1371 aa, Artificial Sequence
  SARS-CoV-2/USA/WA-UW291/2020__EPI_ISL_418076 spike protein (1-1211)(P715C_P1069C) LumSynth construct
MFVFLVLLPLVSSQCVNLTTRTQLPPAYTNSFTRGVYYPDKVFRSSVLHSTQDLFLPFFSNVTWFHAIHVSGTNGTKRFDNPVLPFNDGVYFASTEKSNIIRGWIFGTTLDSKTQSLLIVNNATNVVIKVCEFQFCNDPFLGVYYHKNNKSWMESEFRVYSSANNCTFEYVSQPFLMDLEGKQGNFKNLREFVFKNIDGYFKIYSKHTPINLVRDLPQGFSALEPLVDLPIGINITRFQTLLALHRSYLTPGDSSSGWTAGAAAYYVGYLQPRTFLLKYNENGTITDAVDCALDPLSETKCTLKSFTVEKGIYQTSNFRVQPTESIVRFPNITNLCPFGEVFNATRFASVYAWNRKRISNCVADYSVLYNSASFSTFKCYGVSPTKLNDLCFTNVYADSFVIRGDEVRQIAPGQTGKIADYNYKLPDDFTGCVIAWNSNNLDSKVGGNYNYLYRLFRKSNLKPFERDISTEIYQAGSTPCNGVEGFNCYFPLQSYGFQPTNGVGYQPYRVVVLSFELLHAPATVCGPKKSTNLVKNKCVNFNFNGLTGTGVLTESNKKFLPFQQFGRDIADTTDAVRDPQTLEILDITPCSFGGVSVITPGTNTSNQVAVLYQGVNCTEVPVAIHADQLTPTWRVYSTGSNVFQTRAGCLIGAEHVNNSYECDIPIGAGICASYQTQTNSPRRARSVASQSIIAYTMSLGAENSVAYSNNSIAICTNFTISVTTEILPVSMTKTSVDCTMYICGDSTECSNLLLQYGSFCTQLNRALTGIAVEQDKNTQEVFAQVKQIYKTPPIKDFGGFNFSQILPDPSKPSKRSFIEDLLFNKVTLADAGFIKQYGDCLGDIAARDLICAQKFNGLTVLPPLLTDEMIAQYTSALLAGTITSGWTFGAGAALQIPFAMQMAYRFNGIGVTQNVLYENQKLIANQFNSAIGKIQYSLSSTASALGKLQDVVNQNAQALNTLVKQLSSNFGAISSVLNDILSRLDKVEAEVQIDRLITGRLQSLQTYVTQQLIRAAEIRASANLAATKMSECVLGQSKRVDFCGKGYHLMSFPQSAPHGVVFLHVTYVCAQEKNFTTAPAICHDGKAHFPREGVFVSNGTHWFVTQRNFYEPQIITTDNTFVSGNCDVVIGIVNNTVYDPLQPELDSFKEELDKYFKNHTSPDVDLGDISGINASVVNIQKEIDRLNEVAKNLNESLIDLQELGKYEQYIKGGGSGGGQIYEGKLTAEGLRFGIVASRFNHALVDRLVEGAIDAIVRHGGREEDITLVRVPGSWEIPVAAGELARKEDIDAVIAIGVLIRGATPHFDYIASEVSKGLADLSLELRKPITFGVITADTLEQAIERAGTKHGNKGWEAALSAIEMANLFKSLR

SEQ ID NO: 4138 - protein, 1371 aa, Artificial Sequence; identical to SEQ ID NO: 4101
  SARS-CoV-2/Portugal/PT0034/2020__EPI_ISL_418019 spike protein (1-1211)(P715C_P1069C) LumSynth construct

SEQ ID NO: 4139 - protein, 1371 aa, Artificial Sequence
  SARS-CoV-2/Iceland/202/2020__EPI_ISL_417750 spike protein (1-1211)(P715C_P1069C) LumSynth construct
MFVFLVLLPLVSSQCVNLTTRTQLPPAYTNSFTRGVYYPDKVFRSSVLHSTQDLFLPFFSNVTWFHAIHVSGTNGTKRFDNPVLPFNDGVYFASTEKSNIIRGWIFGTTLDSKTQSLLIVNNATNVVIKVCEFQFCNDPFLGVYYHKNNKSWMESEFRVYSSANNCTFEYVSQPFLMDLEGKQGNFKNLREFVFKNIDGYFKIYSKHTPINLVRDLPQGFSALEPLVDLPIGINITRFQTLLALHRSYLTPGDSSSGWTAGAAAYYVGYLQPRTFLLKYNENGTITDAVDCALDPLSETKCTLKSFTVEKGIYQTSNFRVQPTESIVRFPNITNLCPFGEVFNATRFASVYAWNRKRISNCVADYSVLYNSASFSTFKCYGVSPTKLNDLCFTNVYADSFVIRGDEVRQIAPGQTGKIADYNYKLPDDFTGCVIAWNSNNLDSKVGGNYNYLYRLFRKSNLKPFERDISTEIYQAGSTPCNGVEGFNCYFPLQSYGFQPTNGVGYQPYRVVVLSFELLHAPATVCGPKKSTNLVKNKCVNFNFNGLTGTGVLTESNKKFLPFQQFGRDIADTTDAVRDPQTLEILDITPCSFGGVSVITPGTNTSNQVAVLYQDVNCTEVPVAIHADQLTPTWRVYSTGSNVFQTRAGCLIGAEHVNNSYECDIPIGAGICASYQTQTNSPRRARSVASQSIIAYTMSLGAENSVAYSNNSIAICTNFTISVTTEILPVSMTKTSVDCTMYICGDSTECSNLLLQYGSFCTQLNRALTGIAVEQDKNTQEVFAQVKQIYKTPPIKDFGGFNFSQILPDPSKPSKRSFIEDLLFNKVTLADAGFIKQYGDCLGDIAARDLICAQKFNGLTVLPPLLTDEMIAQYTSALLAGTITSGWTFGAGAALQIPFAMQMAYRFNGIGVTQNVLYENQKLIANQFNSAIGKIQDSLSSTASALGKLQDVVNQNAQALNTLVKQLSSNFGAISSVLNDILSRLDKVEAEVQIDRLITGRLQSLQTYVTQQLIRAAEIRASANLAATKMSECVLGQSKRVDFCGKGYHLMSFPQSAPHGVVFLHVTYVCAQEKNFTTAPAICHDGKAHFPREGVFVSNGTHWFVTQRNFYEPQIITTDNTFVSGNCDVVIGIVNNTVYDPLQPELDSFKEELDKYFKNHTSPDVDLGDIPGINASVVNIQKEIDRLNEVAKNLNESLIDLQELGKYEQYIKGGGSGGGQIYEGKLTAEGLRFGIVASRFNHALVDRLVEGAIDAIVRHGGREEDITLVRVPGSWEIPVAAGELARKEDIDAVIAIGVLIRGATPHFDYIASEVSKGLADLSLELRKPITFGVITADTLEQAIERAGTKHGNKGWEAALSAIEMANLFKSLR

SEQ ID NO: 4140 - protein, 1371 aa, Artificial Sequence
  SARS-CoV-2/USA/WA-UW261/2020__EPI_ISL_418046 spike protein (1-1211)(P715C_P1069C) LumSynth construct
MFVFLVLLPLVSSQCVNLTTRTQLPPAYTNSFTRGVYYPDKVFRSSVLHSTQDLFLPFFSNVTWFHAIHVSGTNGTKRFDNPVLPFNDGVYFASTEKSNIIRGWIFGTTLDSKTQSLLIVNNATNVVIKVCEFQFCNDPFLGVYYHKNNKSWMESEFRVYSSANNCTFEYVSQPFLMDLEGKQGNFKNLREFVFKNIDGYFKIYSKHTPINLVRDLPQGFSALEPLVDLPIGINITRFQTLLALHRSYLTPGDSSSGWTAGAAAYYVGYLQPRTFLLKYNENGTITDAVDCALDPLSETKCTLKSFTVEKGIYQTSNFRVQPTESIVRFPNITNLCPFGEVFNATRFTSVYAWNRKRISNCVADYSVLYNSASFSTFKCYGVSPTKLNDLCFTNVYADSFVIRGDEVRQIAPGQTGKIADYNYKLPDDFTGCVIAWNSNNLDSKVGGNYNYLYRLFRKSNLKPFERDISTEIYQAGSTPCNGVEGFNCYFPLQSYGFQPTNGVGYQPYRVVVLSFELLHAPATVCGPKKSTNLVKNKCVNFNFNGLTGTGVLTESNKKFLPFQQFGRDIADTTDAVRDPQTLEILDITPCSFGGVSVITPGTNTSNQVAVLYQDVNCTEVPVAIHADQLTPTWRVYSTGSNVFQTRAGCLIGAEHVNNSYECDIPIGAGICASYQTQTNSPRRARSVASQSIIAYTMSLGAENSVAYSNNSIAICTNFTISVTTEILPVSMTKTSVDCTMYICGDSTECSNLLLQYGSFCTQLNRALTGIAVEQDKNTQEVFAQVKQIYKTPPIKDFGGFNFSQILPDPSKPSKRSFIEDLLFNKVTLADAGFIKQYGDCLGDIAARDLICAQKFNGLTVLPPLLTDEMIAQYTSALLAGTITSGWTFGAGAALQIPFAMQMAYRFNGIGVTQNVLYENQKLIANQFNSAIGKIQDSLSSTASALGKLQDVVNQNAQALNTLVKQLSSNFGAISSVLNDILSRLDKVEAEVQIDRLITGRLQSLQTYVTQQLIRAAEIRASANLAATKMSECVLGQSKRVDFCGKGYHLMSFPQSAPHGVVFLHVTYVCAQEKNFTTAPAICHDGKAHFPREGVFVSNGTHWFVTQRNFYEPQIITTDNTFVSGNCDVVIGIVNNTVYDPLQPELDSFKEELDKYFKNHTSPDVDLGDISGINASVVNIQKEIDRLNEVAKNLNESLIDLQELGKYEQYIKGGGSGGGQIYEGKLTAEGLRFGIVASRFNHALVDRLVEGAIDAIVRHGGREEDITLVRVPGSWEIPVAAGELARKEDIDAVIAIGVLIRGATPHFDYIASEVSKGLADLSLELRKPITFGVITADTLEQAIERAGTKHGNKGWEAALSAIEMANLFKSLR

SEQ ID NO: 4141 - protein, 1371 aa, Artificial Sequence
  SARS-CoV-2/Portugal/PT0035/2020__EPI_ISL_418020 spike protein (1-1211)(P715C_P1069C) LumSynth construct
MFVFLVLLPLVSSQCVNLTTRTQLPPAYTNSFTRGVYYPDKVFRSSVLHSTQDLFLPFFSNVTWFHAIHVSGTNGTKRFDNPVLPFNDGVYFASTEKSNIIRGWIFGTTLDSKTQSLLIVNNATNVVIKVCEFQFCNDPFLGVYYHKNNKSWMESEFRVYSSANNCTFEYVSQPFLMDLEGKQGNFKNLREFVFKNIDGYFKIYSKHTPINLVRDLPQGFSALEPLVDLPIGINITRFQTLLALHRSYLTPGDSSSGWTAGAAAYYVGYLQPRTFLLKYNENGTITDAVDCALDPLSETKCTLKSFTVEKGIYQTSNFRVQPTESIVRFPNITNLCPFGEVFNATRFASVYAWNRKRISNCVADYSVLYNSASFSTFKCYGVSPTKLNDLCFTNVYADSFVIRGDEVRQIAPGQTGKIADYNYKLPDDFTGCVIAWNSNNLDSKVGGNYNYLYRLFRKSNLKPFERDISTEIYQAGSTPCNGVEGFNCYFPLQSYGFQPTNGVGYQPYRVVVLSFELLHAPATVCGPKKSTNLVKNKCVNFNFNGLTGTGVLTESNKKFLPFQQFGRDIADTTDAVRDPQTLEILDITPCSFGGVSVITPGTNTSNQVAVLYQDVNCTEVPVAIHADQLTPTWRVYSTGSNVFQTRAGCLIGAEHVNNSYECDIPIGAGICASYQTQTNSPRRARSVASQSIIAYTMSLGAENSVAYSNNSIAICTNFTISVTTEILPVSMTKTSVDCTMYICGDSTECSNLLLQYGSFCTQLNRALTGIAVEQDKNTQEVFAQVKQIYKTPPIKDFGGFNFSQILPDPSKPSKRSFIEDLLFNKVTLADAGFIKQYGDCLGDISARDLICAQKFNGLTVLPPLLTDEMIAQYTSALLAGTITSGWTFGAGAALQIPFAMQMAYRFNGIGVTQNVLYENQKLIANQFNSAIGKIQDSLSSTASALGKLQDVVNQNAQALNTLVKQLSSNFGAISSVLNDILSRLDKVEAEVQIDRLITGRLQSLQTYVTQQLIRAAEIRASANLAATKMSECVLGQSKRVDFCGKGYHLMSFPQSAPHGVVFLHVTYVCAQEKNFTTAPAICHDGKAHFPREGVFVSNGTHWFVTQRNFYEPQIITTDNTFVSGNCDVVIGIVNNTVYDPLQPELDSFKEELDKYFKNHTSPDVDLGDISGINASVVNIQKEIDRLNEVAKNLNESLIDLQELGKYEQYIKGGGSGGGQIYEGKLTAEGLRFGIVASRFNHALVDRLVEGAIDAIVRHGGREEDITLVRVPGSWEIPVAAGELARKEDIDAVIAIGVLIRGATPHFDYIASEVSKGLADLSLELRKPITFGVITADTLEQAIERAGTKHGNKGWEAALSAIEMANLFKSLR

SEQ ID NO: 4142 - protein, 1371 aa, Artificial Sequence
  SARS-CoV-2/USA/NY-NYUMC7/2020__EPI_ISL_418192 spike protein (1-1211)(P715C_P1069C) LumSynth construct
MFVFLVLLPLVSSQCVNLTTRTQLPPAYTNSFTRGVYYPDKVFRSSVLHSTQDLFLPFFSNVTWFHAIHVSGTNGTKRFDNPVLPFNDGVYFASTEKSNIIRGWIFGTTLDSKTQSLLIVNNATNVVIKVCEFQFCNDPFLGVYHHKNNKSWMESEFRVYSSANNCTFEYVSQPFLMDLEGKQGNFKNLREFVFKNIDGYFKIYSKHTPINLVRDLPQGFSALEPLVDLPIGINITRFQTLLALHRSYLTPGDSSSGWTAGAAAYYVGYLQPRTFLLKYNENGTITDAVDCALDPLSETKCTLKSFTVEKGIYQTSNFRVQPTESIVRFPNITNLCPFGEVFNATRFASVYAWNRKRISNCVADYSVLYNSASFSTFKCYGVSPTKLNDLCFTNVYADSFVIRGDEVRQIAPGQTGKIADYNYKLPDDFTGCVIAWNSNNLDSKVGGNYNYLYRLFRKSNLKPFERDISTEIYQAGSTPCNGVEGFNCYFPLQSYGFQPTNGVGYQPYRVVVLSFELLHAPATVCGPKKSTNLVKNKCVNFNFNGLTGTGVLTESNKKFLPFQQFGRDIADTTDAVRDPQTLEILDITPCSFGGVSVITPGTNTSNQVAVLYQGVNCTEVPVAIHADQLTPTWRVYSTGSNVFQTRAGCLIGAEHVNNSYECDIPIGAGICASYQTQTNSPRRARSVASQSIIAYTMSLGAENSVAYSNNSIAICTNFTISVTTEILPVSMTKTSVDCTMYICGDSTECSNLLLQYGSFCTQLNRALTGIAVEQDKNTQEVFAQVKQIYKTPPIKDFGGFNFSQILPDPSKPSKRSFIEDLLFNKVTLADAGFIKQYGDCLGDIAARDLICAQKFNGLTVLPPLLTDEMIAQYTSALLAGTITSGWTFGAGAALQIPFAMQMAYRFNGIGVTQNVLYENQKLIANQFNSAIGKIQDSLSSTASALGKLQDVVNQNAQALNTLVKQLSSNFGAISSVLNDILSRLDKVEAEVQIDRLITGRLQSLQTYVTQQLIRAAEIRASANLAATKMSECVLGQSKRVDFCGKGYHLMSFPQSAPHGVVFLHVTYVCAQEKNFTTAPAICHDGKAHFPREGVFVSNGTHWFVTQRNFYEPQIITTDNTFVSGNCDVVIGIVNNTVYDPLQPELDSFKEELDKYFKNHTSPDVDLGDISGINASVVNIQKEIDRLNEVAKNLNESLIDLQELGKYEQYIKGGGSGGGQIYEGKLTAEGLRFGIVASRFNHALVDRLVEGAIDAIVRHGGREEDITLVRVPGSWEIPVAAGELARKEDIDAVIAIGVLIRGATPHFDYIASEVSKGLADLSLELRKPITFGVITADTLEQAIERAGTKHGNKGWEAALSAIEMANLFKSLR

SEQ ID NO: 4143 - protein, 1371 aa, Artificial Sequence
  SARS-CoV-2/Iceland/189/2020__EPI_ISL_417709 spike protein (1-1211)(P715C_P1069C) LumSynth construct
MFVFLVLLPLVSSQCVNLTTRTQLPPAYTNSFTRGVYYPDKVFRSSVLHSTQDLFLPFFSNVTWFHAIHVSGTNGTKRFDNPVLPFNDGVYFASTEKSNIIRGWIFGTTLDSKTQSLLIVNNATNVVIKVCEFQFCNDPFLGVYYHKNNKSWMESEFRVYSSANNCTFEYVSQPFLMDLEGKQGNFKNLREFVFKNIDGYFKIYSKHTPINLVRDLPQGFSALEPLVDLPIGINITRFQTLLALHRSYLTPGDSSSGWTAGAAAYYVGYLQPRTFLLKYNENGTITDAVDCALDPLSETKCTLKSFTVEKGIYQTSNFRVQPTESIVRFPNITNLCPFGEVFNATRFASVYAWNRKRISNCVADYSVLYNSASFSTFKCYGVSPTKLNDLCFTNVYADSFVIRGDEVRQIAPGQTGKIADYNYKLPDDFTGCVIAWNSNNLDSKVGGNYNYLYRLFRKSNLKPFERDISTEIYQAGSTPCNGVEGFNCYFPLQSYGFQPTNGVGYQPYRVVVLSFELLHAPATVCGPKKSTNLVKNKCVNFNFNGLTGTGVLTESNKKFLPFQQFGRDIADTTDAVRDPQTLEILDITPCSFGGVSVITPGTNTSNQVAVLYQGVNCTEVPVAIHADQLTPTWRVYSTGSNVFQTRAGCLIGAEHVNNSYECDIPIGAGICASYQTQTNSPRRARSVASQSIIAYTMSLGAENSVAYSNNSIAICTNFTISVTTEILPVSMTKTSVDCTMYICGDSTECSNLLLQYGSFCTQLNRALTGIAVEQDKNTQEVFAQVKQIYKTPPIKDFGGFNFSQILPDPSKPSKRSFIEDLLFNKVTLADAGFTKQYGDCLGDIAARDLICAQKFNGLTVLPPLLTDEMIAQYTSALLAGTITSGWTFGAGAALQIPFAMQMAYRFNGIGVTQNVLYENQKLIANQFNSAIGKIQDSLSSTASALGKLQDVVNQNAQALNTLVKQLSSNFGAISSVLNDILSRLDKVEAEVQIDRLITGRLQSLQTYVTQQLIRAAEIRASANLAATKMSECVLGQSKRVDFCGKGYHLMSFPQSAPHGVVFLHVTYVCAQEKNFTTAPAICHDGKAHFPREGVFVSNGTHWFVTQRNFYEPQIITTDNTFVSGNCDVVIGIVNNTVYDPLQPELDSFKEELDKYFKNHTSPDVDLGDISGINASVVNIQKEIDRLNEVAKNLNESLIDLQELGKYEQYIKGGGSGGGQIYEGKLTAEGLRFGIVASRFNHALVDRLVEGAIDAIVRHGGREEDITLVRVPGSWEIPVAAGELARKEDIDAVIAIGVLIRGATPHFDYIASEVSKGLADLSLELRKPITFGVITADTLEQAIERAGTKHGNKGWEAALSAIEMANLFKSLR

SEQ ID NO: 4144 - protein, 1371 aa, Artificial Sequence
  SARS-CoV-2/Australia/NSW56/2020__EPI_ISL_417408 spike protein (1-1211)(P715C_P1069C) LumSynth construct
MFVFLVLLPLVSSQCVNLTTRTQLPPAYTNSFTRGVYYPDKVFRSSVLHSTQDLFLPFFSNVTWFHAIHVSGTNGTKRFDNPVLPFNDGVYFASTEKSNIIRGWIFGTTLDSKTQSLLIVNNATNVVIKVCEFQFCNDPFLGVYYHKNNKSWMESEFRVYSSANNCTFEYVSQPFLMDLEGKQGNFKNLREFVFKNIDGYFKIYSKHTPINLVRDLPQGFSALEPLVDLPIGINITRFQTLLALHRSYLTPGDSSSGWTAGAAAYYVGYLQPRTFLLKYNENGTITDAVDCALDPLSETKCTLKSFTVEKGIYQTSNFRVQPTESIVRFPNITNLCPFGEVFNATRFASVYAWNRKRISNCVADYSVLYNSASFSTFKCYGVSPTKLNDLCFTNVYADSFVIRGDEVRQIAPGQTGKIADYNYKLPDDFTGCVIAWNSNNLDSKVGGNYNYLYRLFRKSNLKPFERDISTEIYQAGSTPCNGVEGFNCYFPLQSYGFQPTNGVGYQPYRVVVLSFELLHAPATVCGPKKSTNLVKNKCVNFNFNGLTGTGVLTESNKKFLPFQQFGRDIADTTDAVRDPQTLEILDITPCSFGGVSVITPGTNTSNQVAVLYQDVNCTEVPVAIHADQLTPTWRVYSTGSNVFQTRAGCLIGAEHVNNSYECDIPIGAGICASYQTQTNSPRRARSVASQSIIAYTMSLGAENSVAYSNNSIAICTNFTISVTTEILPVSMTKTSVDCTMYICGDSTECSNLLLQYGSFCTQLNRALTGIAVEQDKNTQEVFAQVKQIYKTPPIKDFGGFNFSQILPDSSKPSKRSFIEDLLFNKVTLADAGFIKQYGDCLGDIAARDLICAQKFNGLTVLPPLLTDEMIAQYTSALLAGTITSGWTFGAGAALQIPFAMQMAYRFNGIGVTQNVLYENQKLIANQFNSAIGKIQDSLSSTASALGKLQDVVNQNAQALNTLVKQLSSNFGAISSVLNDILSRLDKVEAEVQIDRLITGRLQSLQTYVTQQLIRAAEIRASANLAATKMSECVLGQSKRVDFCGKGYHLMSFPQSAPHGVVFLHVTYVCAQEKNFTTAPAICHDGKAHFPREGVFVSNGTHWFVTQRNFYEPQIITTDNTFVSGNCDVVIGIVNNTVYDPLQPELDSFKEELDKYFKNHTSPDVDLGDISGINASVVNIQKEIDRLNEVAKNLNESLIDLQELGKYEQYIKGGGSGGGQIYEGKLTAEGLRFGIVASRFNHALVDRLVEGAIDAIVRHGGREEDITLVRVPGSWEIPVAAGELARKEDIDAVIAIGVLIRGATPHFDYIASEVSKGLADLSLELRKPITFGVITADTLEQAIERAGTKHGNKGWEAALSAIEMANLFKSLR

SEQ ID NO: 4145 - protein, 1371 aa, Artificial Sequence
  SARS-CoV-2/Iceland/280/2020__EPI_ISL_417608 spike protein (1-1211)(P715C_P1069C) LumSynth construct
MFVFLVLLPLVSSQCVNLTTRTQLPPAYTNSFTRGVYYPDKVFRSSVLHSTQDLFLPFFSNVTWFHAIHVSGTNGTKRFDNPVLPFNDGVYFASTEKSNIIRGWIFGTTLDSKTQSLLIVNNATNVVIKVCEFQFCNDPFLGVYYHKNNKSWMESEFRVYSSANNCTFEYVSQPFLMDLEGKQGNFKNLREFVFKNIDGYFKIYSKHTPINLVRDLPQGFSALEPLVDLPIGINITRFQTLLALHRSYLTPGDSSSGWTAGAAAYYVGYLQPRTFLLKYNENGTITDAVDCALDPLSETKCTLKSFTVEKGIYQTSNFRVQPTESIVRFPNITNLCPFGEVFNATRFASVYAWNRKRISNCVADYSVLYNSASFSTFKCYGVSPTKLNDLCFTNVYADSFVIRGDEVRQIAPGQTGKIADYNYKLPDDFTGCVIAWNSNNLDSKVGGNYNYLYRLFRKSNLKPFERDISTEIYQAGSTPCNGVEGFNCYFPLQSYGFQPTNGVGYQPYRVVVLSFELLHAPATVCGPKKSTNLVKNKCVNFNFNGLTGTGVLTESNKKFLPFQQFGRDIADTTDAVRDPQTLEILDITPCSFGGVSVITPGTNTSNQVAVLYQGVNCTEVPVAIHADQLTPTWRVYSTGSNVFQTRAGCLIGAEHVNNSYECDIPIGAGICASYHTQTNSPRRARSVASQSIIAYTMSLGAENSVAYSNNSIAICTNFTISVTTEILPVSMTKTSVDCTMYICGDSTECSNLLLQYGSFCTQLNRALTGIAVEQDKNTQEVFAQVKQIYKTPPIKDFGGFNFSQILPDPSKPSKRSFIEDLLFNKVTLADAGFIKQYGDCLGDIAARDLICAQKFNGLTVLPPLLTDEMIAQYTSALLAGTITSGWTFGAGAALQIPFAMQMAYRFNGIGVTQNVLYENQKLIANQFNSAIGKIQDSLSSTASALGKLQDVVNQNAQALNTLVKQLSSNFGAISSVLNDILSRLDKVEAEVQIDRLITGRLQSLQTYVTQQLIRAAEIRASANLAATKMSECVLGQSKRVDFCGKGYHLMSFPQSAPHGVVFLHVTYVCAQEKNFTTAPAICHDGKAHFPREGVFVSNGTHWFVTQRNFYEPQIITTDNTFVSGNCDVVIGIVNNTVYDPLQPELDSFKEELDKYFKNHTSPDVDLGDISGINASVVNIQKEIDRLNEVAKNLNESLIDLQELGKYEQYIKGGGSGGGQIYEGKLTAEGLRFGIVASRFNHALVDRLVEGAIDAIVRHGGREEDITLVRVPGSWEIPVAAGELARKEDIDAVIAIGVLIRGATPHFDYIASEVSKGLADLSLELRKPITFGVITADTLEQAIERAGTKHGNKGWEAALSAIEMANLFKSLR

SEQ ID NO: 4146 - protein, 1371 aa, Artificial Sequence; identical to SEQ ID NO: 4101
  SARS-CoV-2/Iceland/247/2020__EPI_ISL_417575 spike protein (1-1211)(P715C_P1069C) LumSynth construct

SEQ ID NO: 4147 - protein, 1371 aa, Artificial Sequence
  SARS-CoV-2/Iceland/238/2020__EPI_ISL_417566 spike protein (1-1211)(P715C_P1069C) LumSynth construct
MFVFLVLLPLVSSQCVNLTTRTQLPPAYTNSFTRGVYYPDKVFRSSVLHSTQDLFLPFFSNVTWFHAIHVSGTNGTKRFDNPVLPFNDGVYFASTEKSNIIRGWIFGTTLDSKTQSLLIVNNATNVVIKVCEFQFCNDPFLGVYYHKNNKSWMESEFRVYSSANNCTFEYVSQPFLMDLEGKQGNFKNLREFVFKNIDGYFKIYSKHTPINLVRDLPQGFSALEPLVDLPIGINITRFQTLLALHRSYLTPGDSSSGWTAGAAAYYVGYLQPRTFLLKYNENGTITDAVDCALDPLSETKCTLKSFTVEKGIYQTSNFRVQPTESIVRFPNITNLCPFGEVFNATRFASVYAWNRKRISNCVADYSVLYNSASFSTFKCYGVSPTKLNDLCFTNVYADSFVIRGDEVRQIAPGQTGKIADYNYKLPDDFTGCVIAWNSNNLDSKVGGNYNYLYRLFRKSNLKPFERDISTEIYQAGSTPCNGVEGFNCYFPLQSYGFQPTNGVGYQPYRVVVLSFELLHAPATVCGPKKSTNLVKNKCVNFNFNGLTGTGVLTESNKKFLPFQQFGRDIADTTDAVRDPQTLEILDITPCSFGGVSVITPGTNTSNQVAVLYQGVNCTEVPVAIHADQLTPTWRVYSTGSNVFQTRAGCLIGAEHVNNSYECDIPIGAGICASYQTQTNSPRRARSVASQSIIAYTMSLGAENSVAYSNNSIAICTNFTISVTTEILPVSMTKTSVDCTMYICGDSTECSNLLLQYGSFCTQLNRALTGIAVEQDKNTQEVFAQVKQIYKTPPIKDFGGFNFSQILPDPSKPSKRSFIEDLLFNKVTLADVGFIKQYGDCLGDIAARDLICAQKFNGLTVLPPLLTDEMIAQYTSALLAGTITSGWTFGAGAALQIPFAMQMAYRFNGIGVTQNVLYENQKLIANQFNSAIGKIQDSLSSTASALGKLQDVVNQNAQALNTLVKQLSSNFGAISSVLNDILSRLDKVEAEVQIDRLITGRLQSLQTYVTQQLIRAAEIRASANLAATKMSECVLGQSKRVDFCGKGYHLMSFPQSAPHGVVFLHVTYVCAQEKNFTTAPAICHDGKAHFPREGVFVSNGTHWFVTQRNFYEPQIITTDNTFVSGNCDVVIGIVNNTVYDPLQPELDSFKEELDKYFKNHTSPDVDLGDISGINASVVNIQKEIDRLNEVAKNLNESLIDLQELGKYEQYIKGGGSGGGQIYEGKLTAEGLRFGIVASRFNHALVDRLVEGAIDAIVRHGGREEDITLVRVPGSWEIPVAAGELARKEDIDAVIAIGVLIRGATPHFDYIASEVSKGLADLSLELRKPITFGVITADTLEQAIERAGTKHGNKGWEAALSAIEMANLFKSLR

SEQ ID NO: 4148 - protein, 1371 aa, Artificial Sequence
  SARS-CoV-2/Greece/16/2020__EPI_ISL_418265 spike protein (1-1211)(P715C_P1069C) LumSynth construct
MFVFLVLLPLVSSQCVNLTTRTQLPPAYTNSFTRGVYYPDKVFRSSVLHSTQDLFLPFFSNVTWFHAIHVSGTNGTKRFDNPVLPFNDGVYFASTEKSNIIRGWIFGTTLDSKTQSLLIVNNATNVVIKVCEFQFCNDPFLGVYYHKNNKSWMESEFRVYSSANNCTFEYVSQPFLMDLEGKQGNFKNLREFVFKNVDGYFKIYSKHTPINLVRDLPQGFSALEPLVDLPIGINITRFQTLLALHRSYLTPGDSSSGWTAGAAAYYVGYLQPRTFLLKYNENGTITDAVDCALDPLSETKCTLKSFTVEKGIYQTSNFRVQPTESIVRFPNITNLCPFGEVFNATRFASVYAWNRKRISNCVADYSVLYNSASFSTFKCYGVSPTKLNDLCFTNVYADSFVIRGDEVRQIAPGQTGKIADYNYKLPDDFTGCVIAWNSNNLDSKVGGNYNYLYRLFRKSNLKPFERDISTEIYQAGSTPCNGVEGFNCYFPLQSYGFQPTNGVGYQPYRVVVLSFELLHAPATVCGPKKSTNLVKNKCVNFNFNGLTGTGVLTESNKKFLPFQQFGRDIADTTDAVRDPQTLEILDITPCSFGGVSVITPGTNTSNQVAVLYQDVNCTEVPVAIHADQLTPTWRVYSTGSNVFQTRAGCLIGAEHVNNSYECDIPIGAGICASYQTQTNSPRRARSVASQSIIAYTMSLGAENSVAYSNNSIAICTNFTISVTTEILPVSMTKTSVDCTMYICGDSTECSNLLLQYGSFCTQLNRALTGIAVEQDKNTQEVFAQVKQIYKTPPIKDFGGFNFSQILPDPSKPSKRSFIEDLLFNKVTLADAGFIKQYGDCLGDIAARDLICAQKFNGLTVLPPLLTDEMIAQYTSALLAGTITSGWTFGAGAALQIPFAMQMAYRFNGIGVTQNVLYENQKLIANQFNSAIGKIQDSLSSTASALGKLQDVVNQNAQALNTLVKQLSSNFGAISSVLNDILSRLDKVEAEVQIDRLITGRLQSLQTYVTQQLIRAAEIRASANLAATKMSECVLGQSKRVDFCGKGYHLMSFPQSAPHGVVFLHVTYVCAQEKNFTTAPAICHDGKAHFPREGVFVSNGTHWFVTQRNFYEPQIITTDNTFVSGNCDVVIGIVNNTVYDPLQPELDSFKEELDKYFKNHTSPDVDLGDISGINASVVNIQKEIDRLNEVAKNLNESLIDLQELGKYEQYIKGGGSGGGQIYEGKLTAEGLRFGIVASRFNHALVDRLVEGAIDAIVRHGGREEDITLVRVPGSWEIPVAAGELARKEDIDAVIAIGVLIRGATPHFDYIASEVSKGLADLSLELRKPITFGVITADTLEQAIERAGTKHGNKGWEAALSAIEMANLFKSLR

SEQ ID NO: 4149 - protein, 1371 aa, Artificial Sequence
  SARS-CoV-2/Iceland/319/2020__EPI_ISL_417648 spike protein (1-1211)(P715C_P1069C) LumSynth construct
MFVFLVLLPLVSSQCVNLTTRTQLPPAYTNSFTRGVYYPDKVFRSSVLHSTQDLFLPFFSNVTWFHAIHVSGTNGTKRFDNPVLPFNDGVYFASTEKSNIIRGWIFGTTLDSKTQSLLIVNNATNVVIKVCEFQFCNDPFLGVYYHKNNKSWMESEFRVYSSANNCTFEYVSQPFLIDLEGKQGNFKNLREFVFKNIDGYFKIYSKHTPINLVRDLPQGFSALEPLVDLPIGINITRFQTLLALHRSYLTPGDSSSGWTAGAAAYYVGYLQPRTFLLKYNENGTITDAVDCALDPLSETKCTLKSFTVEKGIYQTSNFRVQPTESIVRFPNITNLCPFGEVFNATRFASVYAWNRKRISNCVADYSVLYNSASFSTFKCYGVSPTKLNDLCFTNVYADSFVIRGDEVRQIAPGQTGKIADYNYKLPDDFTGCVIAWNSNNLDSKVGGNYNYLYRLFRKSNLKPFERDISTEIYQAGSTPCNGVEGFNCYFPLQSYGFQPTNGVGYQPYRVVVLSFELLHAPATVCGPKKSTNLVKNKCVNFNFNGLTGTGVLTESNKKFLPFQQFGRDIADTTDAVRDPQTLEILDITPCSFGGVSVITPGTNTSNQVAVLYQGVNCTEVPVAIHADQLTPTWRVYSTGSNVFQTRAGCLIGAEHVNNSYECDIPIGAGICASYQTQTNSPRRARSVASQSIIAYTMSLGAENSVAYSNNSIAICTNFTISVTTEILPVSMTKTSVDCTMYICGDSTECSNLLLQYGSFCTQLNRALTGIAVEQDKNTQEVFAQVKQIYKTPPIKDFGGFNFSQILPDPSKPSKRSFIEDLLFNKVTLADAGFIKQYGDCLGDIAARDLICAQKFNGLTVLPPLLTDEMIAQYTSALLAGTITSGWTFGAGAALQIPFAMQMAYRFNGIGVTQNVLYENQKLIANQFNSAIGKIQDSLSSTASALGKLQDVVNQNAQALNTLVKQLSSNFGAISSVLNDILSRLDKVEAEVQIDRLITGRLQSLQTYVTQQLIRAAEIRASANLAATKMSECVLGQSKRVDFCGKGYHLMSFPQSAPHGVVFLHVTYVCAQEKNFTTAPAICHDGKAHFPREGVFVSNGTHWFVTQRNFYEPQIITTDNTFVSGNCDVVIGIVNNTVYDPLQPELDSFKEELDKYFKNHTSPDVDLGDISGINASVVNIQKEIDRLNEVAKNLNESLIDLQELGKYEQYIKGGGSGGGQIYEGKLTAEGLRFGIVASRFNHALVDRLVEGAIDAIVRHGGREEDITLVRVPGSWEIPVAAGELARKEDIDAVIAIGVLIRGATPHFDYIASEVSKGLADLSLELRKPITFGVITADTLEQAIERAGTKHGNKGWEAALSAIEMANLFKSLR

SEQ ID NO: 4150 - protein, 1371 aa, Artificial Sequence
  SARS-CoV-2/Congo/94/2020__EPI_ISL_417947 spike protein (1-1211)(P715C_P1069C) LumSynth construct
MFVFLVLLPLVSSQCVNLTTRTQLPPAYTNSFTRGVYYPDKVFRSSVLHSTQDLFLPFFSNVTWFHAIHVSGTNGTKRFDNPVLPFNDGVYFASTEKSNIIRGWIFGTTLDSKTQSLLIVNNATNVVIKVCEFQFCNDPFLGVYYHKNNKSWMESEFRVYSSANNCTFEYVSQPFLMDLEGKQGNFKNLREFVFKNIDGYFKIYSKHTPINLVRDLPQGFSALEPLVDLPIGINITRFQTLLALHRSYLTPGDSSSGWTAGAAAYYVGYLQPRTFLLKYNENGTITDAVDCALDPLSETKCTLKSFTVEKGIYQTSNFRVQPTESIVRFPNITNLCPFGEVFNATRFASVYAWNRKRISNCVADYSVLYNSASFSTFKCYGVSPTKLNDLCFTNVYADSFVIRGDEVRQIAPGQTGKIADYNYKLPDDFTGCVIAWNSNNLDSKVGGNYNYLYRLFRKSNLKPFERDISTEIYQAGSTPCNGVEGFNCYFPLQSYGFQPTNGVGYQPYRVVVLSFELLHAPATVCGPKKSTNLVKNKCVNFNFNGLTGTGVLTESNKKFLPFQQFGRDIADTTDAVRDPQTLEILDITPCSFGGVSVITPGTNTSNQVAVLYQGVNCTEVPVAIHADQLTPTWRVYSTGSNVFQTRAGCLIGAEHVNNSYECDIPIGAGICASYQTQTNSPRRARSVASQSIIAYTMSLGAENSVAYSNNSIAICTNFTISVTTEILPVSMTKTSVDCTMYICGDSTECSNLLLQYGSFCTQLNRALTGIAVEQDKNTQEVFAQVKQIYKTPPIKDFGGFNFSQILPDPSKPSKRSFIEDILFNKVTLADAGFIKQYGDCLGDIAARDLICAQKFNGLTVLPPLLTDEMIAQYTSALLAGTITSGWTFGAGAALQIPFAMQMAYRFNGIGVTQNVLYENQKLIANQFNSAIGKIQDSLSSTASALGKLQDVVNQNAQALNTLVKQLSSNFGAISSVLNDILSRLDKVEAEVQIDRLITGRLQSLQTYVTQQLIRAAEIRASANLAATKMSECVLGQSKRVDFCGKGYHLMSFPQSAPHGVVFLHVTYVCAQEKNFTTAPAICHDGKAHFPREGVFVSNGTHWFVTQRNFYEPQIITTDNTFVSGNCDVVIGIVNNTVYDPLQPELDSFKEELDKYFKNHTSPDVDLGDISGINASVVNIQKEIDRLNEVAKNLNESLIDLQELGKYEQYIKGGGSGGGQIYEGKLTAEGLRFGIVASRFNHALVDRLVEGAIDAIVRHGGREEDITLVRVPGSWEIPVAAGELARKEDIDAVIAIGVLIRGATPHFDYIASEVSKGLADLSLELRKPITFGVITADTLEQAIERAGTKHGNKGWEAALSAIEMANLFKSLR

SEQ ID NO: 4151 - protein, 1371 aa, Artificial Sequence
  SARS-CoV-2/Congo/158/2020__EPI_ISL_417950 spike protein (1-1211)(P715C_P1069C) LumSynth construct
MFVFLVLLPLVSSQCVNLTTRTQLPPAYTNSFTRGVYYPDKVFRSSVLHSTQDLFLPFFSNVTWFHAIHVSGTNGTKRFDNPVLPFNDGVYFASTEKSNIIRGWIFGTTLDSKTQSLLIVNNATNVVIKVCEFQFCNDPFLGVYYHKNNKSWMESEFRVYSSANNCTFEYVSQPFLMDLEGKQGNFKNLREFVFKNIDGYFKIYSKHTPINLVRDLPQGFSALEPLVDLPIGINITRFQTLLALHRSYLTPGDSSSGWTAGAAAYYVGYLQPRTFLLKYNENGTITDAVDCALDPLSETKCTLKSFTVEKGIYQTSNFRVQPTESIVRFPNITNLCPFGEVFNATRFASVYAWNRKRISNCVADYSVLYNSASFSTFKCYGVSPTKLNDLCFTNVYADSFVIRGDEVRQIAPGQTGKIADYNYKLPDDFTGCVIAWNSNNLDSKVGGNYNYLYRLFRKSNLKPFERDISTEIYQAGSTPCNGVEGFNCYFPLQSYGFQPTNGVGYQPYRVVVLSFELLHAPATVCGPKKSTNLVKNKCVNFNFNGLTGTGVLTESNKKFLPFQQFGRDIADTTDAVRDPQTLEILDITPCSFGGVSVITPGTNTSNQVAVLYQDVNCTEVPVAIHADQLTPTWRVYSTGSNVFQTRAGCLIGAEHVNNSYECDIPIGAGICASYQTQTNSPRRARSVASQSIIAYTMSLGAENSVAYSNNSIAICTNFTISVTTEILPVSMTKTSVDCTMYICGDSTECSNLLLQYGSFCTQLNRALTGIAVEQDKNTQEVFAQVKQIYKTPPIKDFGGFNFSQILPDPSKPSKRSFIEDLLFNKVTLADAGFIKQYGDCLGDIAARDLICAQKFNGLTVLPPLLTDEMIAQYTSALLAGTITSGWTFGAGAALQIPFAMQMAYRFNGIGVTQNVLYENQKLIANQFNSAIGKIQDSLSSTASALGKLQDVVNQNAQALNTLVKQLSSNFGAISSVLNDILSRLDKVEAEVQIDRLITGRLQSLQTYVTQQLIRAAEIRASANLAATKMSECVLGQSKRVDFCGKGYHLMSFPQSAPHGVVFLHVTYVCAQEKNFTTAPAICHDGKAHFPREGVFVSNGTHWFVTQRNFYEPQIITTDNTFLSGNCDVVIGIVNNTVYDPLQPELDSFKEELDKYFKNHTSPDVDLGDISGINASVVNIQKEIDRLNEVAKNLNESLIDLQELGKYEQYIKGGGSGGGQIYEGKLTAEGLRFGIVASRFNHALVDRLVEGAIDAIVRHGGREEDITLVRVPGSWEIPVAAGELARKEDIDAVIAIGVLIRGATPHFDYIASEVSKGLADLSLELRKPITFGVITADTLEQAIERAGTKHGNKGWEAALSAIEMANLFKSLR

SEQ ID NO: 4152 - protein, 1371 aa, Artificial Sequence
  SARS-CoV-2/USA/UT-00034/2020__EPI_ISL_417977 spike protein (1-1211)(P715C_P1069C) LumSynth construct
MFVFLVLLPLVSSQCVNLTTRTQLPPAYTNSFTRGVYYPDKVFRSSVLHSTQDLFLPFFSNVTWFHAIHVSGTNGTKRFDNPVLPFNDGVYFASTEKSNIIRGWIFGTTLDSKTQSLLIVNNATNVVIKVCEFQFCNDPFLGVYYYKNNKSWMESEFRVYSSANNCTFEYVSQPFLMDLEGKQGNFKNLREFVFKNIDGYFKIYSKHTPINLVRDLPQGFSALEPLVDLPIGINITRFQTLLALHRSYLTPGDSSSGWTAGAAAYYVGYLQPRTFLLKYNENGTITDAVDCALDPLSETKCTLKSFTVEKGIYQTSNFRVQPTESIVRFPNITNLCPFGEVFNATRFASVYAWNRKRISNCVADYSVLYNSASFSTFKCYGVSPTKLNDLCFTNVYADSFVIRGDEVRQIAPGQTGKIADYNYKLPDDFTGCVIAWNSNNLDSKVGGNYNYLYRLFRKSNLKPFERDISTEIYQAGSTPCNGVEGFNCYFPLQSYGFQPTNGVGYQPYRVVVLSFELLHAPATVCGPKKSTNLVKNKCVNFNFNGLTGTGVLTESNKKFLPFQQFGRDIADTTDAVRDPQTLEILDITPCSFGGVSVITPGTNTSNQVAVLYQGVNCTEVPVAIHADQLTPTWRVYSTGSNVFQTRAGCLIGAEHVNNSYECDIPIGAGICASYQTQTNSPRRARSVASQSIIAYTMSLGAENSVAYSNNSIAICTNFTISVTTEILPVSMTKTSVDCTMYICGDSTECSNLLLQYGSFCTQLNRALTGIAVEQDKNTQEVFAQVKQIYKTPPIKDFGGFNFSQILPDPSKPSKRSFIEDLLFNKVTLADAGFIKQYGDCLGDIAARDLICAQKFNGLTVLPPLLTDEMIAQYTSALLAGTITSGWTFGAGAALQIPFAMQMAYRFNGIGVTQNVLYENQKLIANQFNSAIGKIQDSLSSTASALGKLQDVVNQNAQALNTLVKQLSSNFGAISSVLNDILSRLDKVEAEVQIDRLITGRLQSLQTYVTQQLIRAAEIRASANLAATKMSECVLGQSKRVDFCGKGYHLMSFPQSAPHGVVFLHVTYVCAQEKNFTTAPAICHDGKAHFPREGVFVSNGTHWFVTQRNFYEPQIITTDNTFVSGNCDVVIGIVNNTVYDPLQPELDSFKEELDKYFKNHTSPDVDLGDISGINASVVNIQKEIDRLNEVAKNLNESLIDLQELGKYEQYIKGGGSGGGQIYEGKLTAEGLRFGIVASRFNHALVDRLVEGAIDAIVRHGGREEDITLVRVPGSWEIPVAAGELARKEDIDAVIAIGVLIRGATPHFDYIASEVSKGLADLSLELRKPITFGVITADTLEQAIERAGTKHGNKGWEAALSAIEMANLFKSLR

SEQ ID NO: 4153 - protein, 1371 aa, Artificial Sequence
  SARS-CoV-2/USA/UT-00033/2020__EPI_ISL_417976 spike protein (1-1211)(P715C_P1069C) LumSynth construct
MFVFLVLLPLVSSQCVNLTTRTQLPPAYTNSFTRGVYYPDKVFRSSVLHSTQDLFLPFFSNVTWFHAIHVSGTNGTKRFDNPVLPFNDGVYFASTEKSNIIRGWIFGTTLDSKTQSLLIVNNATNVVIKVCEFQFCNDPFLGVYYHKNNKSWMESEFRVYSSANNCTFEYVSQPFLMDLEGKQGNFKNLREFVFKNIDGYFKIYSKHTPINLVRDLPQGFSALEPLVDLPIGINITRFQTLLALHRSYLTPGDSSSGLTAGAAAYYVGYLQPRTFLLKYNENGTITDAVDCALDPLSETKCTLKSFTVEKGIYQTSNFRVQPTESIVRFPNITNLCPFGEVFNATRFASVYAWNRKRISNCVADYSVLYNSASFSTFKCYGVSPTKLNDLCFTNVYADSFVIRGDEVRQIAPGQTGKIADYNYKLPDDFTGCVIAWNSNNLDSKVGGNYNYLYRLFRKSNLKPFERDISTEIYQAGSTPCNGVEGFNCYFPLQSYGFQPTNGVGYQPYRVVVLSFELLHAPATVCGPKKSTNLVKNKCVNFNFNGLTGTGVLTESNKKFLPFQQFGRDIADTTDAVRDPQTLEILDITPCSFGGVSVITPGTNTSNQVAVLYQGVNCTEVPVAIHADQLTPTWRVYSTGSNVFQTRAGCLIGAEHVNNSYECDIPIGAGICASYQTQTNSPRRARSVASQSIIAYTMSLGAENSVAYSNNSIAICTNFTISVTTEILPVSMTKTSVDCTMYICGDSTECSNLLLQYGSFCTQLNRALTGIAVEQDKNTQEVFAQVKQIYKTPPIKDFGGFNFSQILPDPSKPSKRSFIEDLLFNKVTLADAGFIKQYGDCLGDIAARDLICAQKFNGLTVLPPLLTDEMIAQYTSALLAGTITSGWTFGAGAALQIPFAMQMAYRFNGIGVTQNVLYENQKLIANQFNSAIGKIQDSLSSTASALGKLQDVVNQNAQALNTLVKQLSSNFGAISSVLNDILSRLDKVEAEVQIDRLITGRLQSLQTYVTQQLIRAAEIRASANLAATKMSECVLGQSKRVDFCGKGYHLMSFPQSAPHGVVFLHVTYVCAQEKNFTTAPAICHDGKAHFPREGVFVSNGTHWFVTQRNFYEPQIITTDNTFVSGNCDVVIGIVNNTVYDPLQPELDSFKEELDKYFKNHTSPDVDLGDISGINASVVNIQKEIDRLNEVAKNLNESLIDLQELGKYEQYIKGGGSGGGQIYEGKLTAEGLRFGIVASRFNHALVDRLVEGAIDAIVRHGGREEDITLVRVPGSWEIPVAAGELARKEDIDAVIAIGVLIRGATPHFDYIASEVSKGLADLSLELRKPITFGVITADTLEQAIERAGTKHGNKGWEAALSAIEMANLFKSLR

SEQ ID NO: 4154 - protein, 1371 aa, Artificial Sequence
  SARS-CoV-2/USA/WI-13/2020__EPI_ISL_417516 spike protein (1-1211)(P715C_P1069C) LumSynth construct
MFVFLVLLPLVSSQCVNLTTRTQLPPAYTNSFTRGVYYPDKVFRSSVLHSTQDLFLPFFSNVTWFHAIHVSGTNGTKRFDNPVLPFNDGVYFASTEKSNIIRGWIFGTTLDSKTQSLLIVNNATNVVIKVCEFQFCNDPFLGVYYHKNNKSWMESEFRVYSSANNCTFEYVSQPFLMDLEGKQGNFKNLREFVFKNIDGYFKIYSKHTPINLVRDLPQGFSALEPLVDLPIGINITRFQTLLALHRSYLTPGDSSSGWTAGAAAYYVGYLQPRTFLLKYNENGTITDAVDCALDPLSETKCTLKSFTVEKGIYQTSNFRVLPTESIVRFPNITNLCPFGEVFNATRFASVYAWNRKRISNCVADYSVLYNSASFSTFKCYGVSPTKLNDLCFTNVYADSFVIRGDEVRQIAPGQTGKIADYNYKLPDDFTGCVIAWNSNNLDSKVGGNYNYLYRLFRKSNLKPFERDISTEIYQAGSTPCNGVEGFNCYFPLQSYGFQPTNGVGYQPYRVVVLSFELLHAPATVCGPKKSTNLVKNKCVNFNFNGLTGTGVLTESNKKFLPFQQFGRDIADTTDAVRDPQTLEILDITPCSFGGVSVITPGTNTSNQVAVLYQGVNCTEVPVAIHADQLTPTWRVYSTGSNVFQTRAGCLIGAEHVNNSYECDIPIGAGICASYQTQTNSPRRARSVASQSIIAYTMSLGAENSVAYSNNSIAICTNFTISVTTEILPVSMTKTSVDCTMYICGDSTECSNLLLQYGSFCTQLNRALTGIAVEQDKNTQEVFAQVKQIYKTPPIKDFGGFNFSQILPDPSKPSKRSFIEDLLFNKVTLADAGFIKQYGDCLGDIAARDLICAQKFNGLTVLPPLLTDEMIAQYTSALLAGTITSGWTFGAGAALQIPFAMQMAYRFNGIGVTQNVLYENQKLIANQFNSAIGKIQDSLSSTASALGKLQDVVNQNAQALNTLVKQLSSNFGAISSVLNDILSRLDKVEAEVQIDRLITGRLQSLQTYVTQQLIRAAEIRASANLAATKMSECVLGQSKRVDFCGKGYHLMSFPQSAPHGVVFLHVTYVCAQEKNFTTAPAICHDGKAHFPREGVFVSNGTHWFVTQRNFYEPQIITTDNTFVSGNCDVVIGIVNNTVYDPLQPELDSFKEELDKYFKNHTSPDVDLGDISGINASVVNIQKEIDRLNEVAKNLNESLIDLQELGKYEQYIKGGGSGGGQIYEGKLTAEGLRFGIVASRFNHALVDRLVEGAIDAIVRHGGREEDITLVRVPGSWEIPVAAGELARKEDIDAVIAIGVLIRGATPHFDYIASEVSKGLADLSLELRKPITFGVITADTLEQAIERAGTKHGNKGWEAALSAIEMANLFKSLR

SEQ ID NO: 4155 - protein, 1370 aa, Artificial Sequence
  SARS-CoV-2/India/1-27/2020__EPI_ISL_413522 spike protein (1-1210)(P714C_P1068C) LumSynth construct
MFVFLVLLPLVSSQCVNLTTRTQLPPAYTNSFTRGVYYPDKVFRSSVLHSTQDLFLPFFSNVTWFHAIHVSGTNGTKRFDNPVLPFNDGVYFASTEKSNIIRGWIFGTTLDSKTQSLLIVNNATNVVIKVCEFQFCNDPFLGVYHKNNKSWMESEFRVYSSANNCTFEYVSQPFLMDLEGKQGNFKNLREFVFKNIDGYFKIYSKHTPINLVRDLPQGFSALEPLVDLPIGINITRFQTLLALHRSYLTPGDSSSGWTAGAAAYYVGYLQPRTFLLKYNENGTITDAVDCALDPLSETKCTLKSFTVEKGIYQTSNFRVQPTESIVRFPNITNLCPFGEVFNATRFASVYAWNRKRISNCVADYSVLYNSASFSTFKCYGVSPTKLNDLCFTNVYADSFVIRGDEVIQIAPGQTGKIADYNYKLPDDFTGCVIAWNSNNLDSKVGGNYNYLYRLFRKSNLKPFERDISTEIYQAGSTPCNGVEGFNCYFPLQSYGFQPTNGVGYQPYRVVVLSFELLHAPATVCGPKKSTNLVKNKCVNFNFNGLTGTGVLTESNKKFLPFQQFGRDIADTTDAVRDPQTLEILDITPCSFGGVSVITPGTNTSNQVAVLYQDVNCTEVPVAIHADQLTPTWRVYSTGSNVFQTRAGCLIGAEHVNNSYECDIPIGAGICASYQTQTNSPRRARSVASQSIIAYTMSLGAENSVAYSNNSIAICTNFTISVTTEILPVSMTKTSVDCTMYICGDSTECSNLLLQYGSFCTQLNRALTGIAVEQDKNTQEVFAQVKQIYKTPPIKDFGGFNFSQILPDPSKPSKRSFIEDLLFNKVTLADAGFIKQYGDCLGDIAARDLICAQKFNGLTVLPPLLTDEMIAQYTSALLAGTITSGWTFGAGAALQIPFAMQMAYRFNGIGVTQNVLYENQKLIANQFNSAIGKIQDSLSSTASALGKLQDVVNQNAQALNTLVKQLSSNFGAISSVLNDILSRLDKVEAEVQIDRLITGRLQSLQTYVTQQLIRAAEIRASANLAATKMSECVLGQSKRVDFCGKGYHLMSFPQSAPHGVVFLHVTYVCAQEKNFTTAPAICHDGKAHFPREGVFVSNGTHWFVTQRNFYEPQIITTDNTFVSGNCDVVIGIVNNTVYDPLQPELDSFKEELDKYFKNHTSPDVDLGDISGINASVVNIQKEIDRLNEVAKNLNESLIDLQELGKYEQYIKGGGSGGGQIYEGKLTAEGLRFGIVASRFNHALVDRLVEGAIDAIVRHGGREEDITLVRVPGSWEIPVAAGELARKEDIDAVIAIGVLIRGATPHFDYIASEVSKGLADLSLELRKPITFGVITADTLEQAIERAGTKHGNKGWEAALSAIEMANLFKSLR

SEQ ID NO: 4156 - protein, 1365 aa, Artificial Sequence
  SARS-CoV-2/pangolin/Guangxi/P4L/2017__EPI_ISL_410538 spike protein (1-1205)(P709C_P1063C) LumSynth construct
MFVFLFVLPLVSSQCVNLTTRTGIPPGYTNSSTRGVYYPDKVFRSSILHLTQDLFLPFFSNVTWFNTINYQGGFKKFDNPVLPFNDGVYFASTEKSNIIRGWIFGTTLDARTQSLLIVNNATNVVIKVCEFQFCTDPFLGVYYHNNNKTWVENEFRVYSSANNCTFEYISQPFLMDLEGKQGNFKNLREFVFKNVDGYFKIYSKHTPIDLVRDLPRGFAALEPLVDLPIGINITRFQTLLALHRSYLTPGNLESGWTTGAAAYYVGYLQQRTFLLSYNQNGTITDAVDCSLDPLSETKCTLKSLTVEKGIYQTSNFRVQPTISIVRFPNITNLCPFGEVFNASKFASVYAWNRKRISNCVADYSVLYNSTSFSTFKCYGVSPTKLNDLCFTNVYADSFVVKGDEVRQIAPGQTGVIADYNYKLPDDFTGCVIAWNSVKQDALTGGNYGYLYRLFRKSKLKPFERDISTEIYQAGSTPCNGQVGLNCYYPLERYGFHPTTGVNYQPFRVVVLSFELLNGPATVCGPKLSTTLVKDKCVNFNFNGLTGTGVLTTSKKQFLPFQQFGRDISDTTDAVRDPQTLEILDITPCSFGGVSVITPGTNTSNQVAVLYQDVNCTEVPMAIHAEQLTPAWRVYSAGANVFQTRAGCLVGAEHVNNSYECDIPVGAGICASYHSMSSLRSVNQRSIIAYTMSLGAENSVAYSNNSIAICTNFTISVTTEILPVSMTKTSVDCTMYICGDSIECSNLLLQYGSFCTQLNRALTGIAVEQDKNTQEVFAQVKQIYKTPPIKDFGGFNFSQILPDPSKPSKRSFIEDLLFNKVTLADAGFIKQYGDCLGDIAARDLICAQKFNGLTVLPPLLTDEMIAQYTSALLAGTITSGWTFGAGAALQIPFAMQMAYRFNGIGVTQNVLYENQKLIANQFNSAIGKIQDSLSSTASALGKLQDVVNQNAQALNTLVKQLSSNFGAISSVLNDILSRLDKVEAEVQIDRLITGRLQSLQTYVTQQLIRAAEIRASANLAATKMSECVLGQSKRVDFCGKGYHLMSFPQSAPHGVVFLHVTYVCAQEKNFTTAPAICHEGKAHFPREGVFVSNGTHWFITQRNFYEPQIITTDNTFVSGSCDVVIGIVNNTVYDPLQPELDSFKEELDKYFKNHTSPDVDLGDISGINASVVNIQKEIDRLNEVAKNLNESPIDLQELGKYEQYIKGGGSGGGQIYEGKLTAEGLRFGIVASRFNHALVDRLVEGAIDAIVRHGGREEDITLVRVPGSWEIPVAAGELARKEDIDAVIAIGVLIRGATPHFDYIASEVSKGLADLSLELRKPITFGVITADTLEQAIERAGTKHGNKGWEAALSAIEMANLFKSLR

SEQ ID NO: 4157 - protein, 1365 aa, Artificial Sequence
  SARS-CoV-2/pangolin/Guangxi/P5L/2017__EPI_ISL_410540 spike protein (1-1205)(P709C_P1063C) LumSynth construct
MFVFLFVLPLVSSQCVNLTTRTGIPPGYTNSSTRGVYYPDKVFRSSILHLTQDLFLPFFSNVTWFNTINYQGGFKKFDNPVLPFNDGVYFASTEKSNIIRGWIFGTTLDARTQSLLIVNNATNVVIKVCEFQFCTDPFLGVYYHNNNKTWVENEFRVYSSANNCTFEYISQPFLMDLEGKQGNFKNLREFVFKNVDGYFKIYSKHTPIDLVRDLPRGFAALEPLVDLPIGINITRFQTLLALHRSYLTPGKLESGWTTGAAAYYVGYLQQRTFLLSYNQNGTITDAVDCSLDPLSETKCTLKSLTVEKGIYQTSNFRVQPTISIVRFPNITNLCPFGEVFNASKFASVYAWNRKRISNCVADYSVLYNSTSFSTFKCYGVSPTKLNDLCFTNVYADSFVVKGDEVRQIAPGQTGVIADYNYKLPDDFTGCVIAWNSVKQDALTGGNYGYLYRLFRKSKLKPFERDISTEIYQAGSTPCNGQVGLNCYYPLERYGFHPTTGVNYQPFRVVVLSFELLNGPATVCGPKLSTTLVKDKCVNFNFNGLTGTGVLTTSKKQFLPFQQFGRDISDTTDAVRDPQTLEILDITPCSFGGVSVITPGTNTSNQVAVLYQDVNCTEVPMAIHAEQLTPAWRVYSAGANVFQTRAGCLVGAEHVNNSYECDIPVGAGICASYHSMSSFRSVNQRSIIAYTMSLGAENSVAYSNNSIAICTNFTISVTTEILPVSMTKTSVDCTMYICGDSIECSNLLLQYGSFCTQLNRALTGIAVEQDKNTQEVFAQVKQIYKTPPIKDFGGFNFSQILPDPSKPSKRSFIEDLLFNKVTLADAGFIKQYGDCLGDIAARDLICAQKFNGLTVLPPLLTDEMIAQYTSALLAGTITSGWTFGAGAALQIPFAMQMAYRFNGIGVTQNVLYENQKLIANQFNSAIGKIQDSLSSTASALGKLQDVVNQNAQALNTLVKQLSSNFGAISSVLNDILSRLDKVEAEVQIDRLITGRLQSLQTYVTQQLIRAAEIRASANLAATKMSECVLGQSKRVDFCGKGYHLMSFPQSAPHGVVFLHVTYVCAQEKNFTTAPAICHEGKAHFPREGVFVSNGTHWFITQRNFYEPQIITTDNTFVSGSCDVVIGIVNNTVYDPLQPELDSFKEELDKYFKNHTSPDVDLGDISGINASVVNIQKEIDRLNEVAKNLNESLIDLQELGKYEQYIKGGGSGGGQIYEGKLTAEGLRFGIVASRFNHALVDRLVEGAIDAIVRHGGREEDITLVRVPGSWEIPVAAGELARKEDIDAVIAIGVLIRGATPHFDYIASEVSKGLADLSLELRKPITFGVITADTLEQAIERAGTKHGNKGWEAALSAIEMANLFKSLR

SEQ ID NO: 4158 - protein, 1365 aa, Artificial Sequence
  SARS-CoV-2/pangolin/Guangxi/P5E/2017__EPI_ISL_410541 spike protein (1-1205)(P709C_P1063C) LumSynth construct
MFVFLFVLPLVSSQCVNLTTRTGIPPGYTNSSTRGVYYPDKVFRSSILHLTQDLFLPFFSNVTWFNTITYQGGSKKFDNPVLPFNDGVYFASTEKSNIIRGWIFGTTLDARTQSLLIVNNATNVVIKVCEFQFCTDPFLGVYYHNNNKTWVENEFRVYSSANNCTFEYISQPFLMDLEGKQGNFKNLREFVFKNVDGYFKIYSKHTPIDLVRDLPRGFAALEPLVDLPIGINITRFQTLLALHRSYLTPGKLESGWTTGAAAYYVGYLQQRTFLLSYNQNGTITDAVDCSLDPLSETKCTLKSLTVEKGIYQTSNFRVQPTISIVRFPNITNLCPFGEVFNASKFASVYAWNRKRISNCVADYSVLYNSTSFSTFKCYGVSPTKLNDLCFTNVYADSFVVKGDEVRQIAPGQTGVIADYNYKLPDDFTGCVIAWNSVKQDALTGDNYGYLYRLFRKSKLKPFERDISTEIYQAGSTPCNGQVGLNCYYPLERYGFHPTTGVNYQPFRVVVLSFELLNGPATVCGPKLSTTLVKDKCVNFNFNGLTGTGVLTTSKKQFLPFQQFGRDISDTTDAVRDPQTLEILDITPCSFGGVSVITPGTNTSNQVAVLYQDVNCTEVPMAIHAEQLTPAWRVYSAGANVFQTRAGCLVGAEHVNNSYECDIPVGAGICASYHSMSSFRSVNQRSIIAYTMSLGAENSVAYSNNSIAICTNFTISVTTEILPVSMTKTSVDCTMYICGDSIECSNLLLQYGSFCTQLNRALTGIAVEQDKNTQEVFAQVKQIYKTPPIKDFGGFNFSQILPDPSKPSKRSFIEDLLFNKVTLADAGFIKQYGDCLGDIAARDLICAQKFNGLTVLPPLLTDEMIAQYTSALLAGTITSGWTFGAGAALQIPFAMQMAYRFNGIGVTQNVLYENQKLIANQFNSAIGKIQDSLSSTASALGKLQDVVNQNAQALNTLVKQLSSNFGAISSVLNDILSRLDKVEAEVQIDRLITGRLQSLQTYVTQQLIRAAEIRASANLAATKMSECVLGQSKRVDFCGKGYHLMSFPQSAPHGVVFLHVTYVCAQEKNFTTAPAICHEGKAHFPREGVFVSNGTHWFITQRNFYEPQIITTDNTFVSGSCDVVIGIVNNTVYDPLQPELDSFKEELDKYFKNHTSPDVDLGDISGINASVVNIQKEIDRLNEVAKNLNESLIDLQELGKYEQYIKGGGSGGGQIYEGKLTAEGLRFGIVASRFNHALVDRLVEGAIDAIVRHGGREEDITLVRVPGSWEIPVAAGELARKEDIDAVIAIGVLIRGATPHFDYIASEVSKGLADLSLELRKPITFGVITADTLEQAIERAGTKHGNKGWEAALSAIEMANLFKSLR

SEQ ID NO: 4159 - protein, 1363 aa, Artificial Sequence
  SARS-CoV-2/pangolin/Guangxi/P1E/2017__EPI_ISL_410539 spike protein (1-1203)(P707C_P1061C) LumSynth construct
MFVFLFVLPLVSSQCVNLTTRTGIQPGYTNSSTRGVYYPDKVFRSSILHLTQDLFLPFFSNVTWFNTINYQGGFKKFDNPVLPFNDGVYFASTEKSNIIRGWIFGTTLDARTQSLLIVNNATNVVIKVCEFQFCTDPFLGVYYHNNNKTWVENEFRVYSSANNCTFEYISQPFLMDLEGKQGNFKNLREFVFKNVDGYFKIYSKHTPIDLVRDLPRGFAALEPLVDLPIGINITRFQTLLALHRSYLTPGKLESGWTTGAAAYYVGYLQQRTFLLSYNQNGTITDAVDCSLDPLSETKCTLKSLTVEKGIYQTSNFRVQPTISIVRFPNITNLCPFGEVFNASKFASVYAWNRKRISNCVADYSVLYNSTSFSTFKCYGVSPTKLNDLCFTNVYADSFVVKGDEVRQIAPGQTGVIADYNYKLPDDFTGCVIAWNSVKQDALTGGNYLYRLFRKSKLKPFERDISTEIYQAGSTPCNGQVGLNCYYPLERYGFHPTTGVNYQPFRVVVLSFELLNGPATVCGPKLSTTLVKDKCVNFNFNGLTGTGVLTTSKKQFLPFQQFGRDISDTTDAVRDPQTLEILDITPCSFGGVSVITPGTNTSNQVAVLYQDVNCTEVPMAIHAEQLTPAWRVYSAGANVFQTRAGCLVGAEHVNNSYECDIPVGAGICASYHSMSSLRSVNQRSIIAYTMSLGAENSVAYSNNSIAICTNFTISVTTEILPVSMTKTSVDCTMYICGDSIECSNLLLQYGSFCTQLNRALTGIAVEQDKNTQEVFAQVKQIYKTPPIKDFGGFNFSQILPDPSKPSKRSFIEDLLFNKVTLADAGFIKQYGDCLGDIAARDLICAQKFNGLTVLPPLLTDEMIAQYTSALLAGTITSGWTFGAGAALQIPFAMQMAYRFNGIGVTQNVLYENQKLIANQFNSAIGKIQDSLSSTASALGKLQDVVNQNAQALNTLVKQLSSNFGAISSVLNDILSRLDKVEAEVQIDRLITGRLQSLQTYVTQQLIRAAEIRASANLAATKMSECVLGQSKRVDFCGKGYHLMSFPQSAPHGVVFLHVTYVCAQEKNFTTAPAICHEGKAHFPREGVFVSNGTHWFITQRNFYEPQIITTDNTFVSGSCDVVIGIVNNTVYDPLQPELDSFKEELDKYFKNHTSPDVDLGDISGINASVVNIQKEIDRLNEVAKNLNESLIDLQELGKYEQYIKGGGSGGGQIYEGKLTAEGLRFGIVASRFNHALVDRLVEGAIDAIVRHGGREEDITLVRVPGSWEIPVAAGELARKEDIDAVIAIGVLIRGATPHFDYIASEVSKGLADLSLELRKPITFGVITADTLEQAIERAGTKHGNKGWEAALSAIEMANLFKSLR

SEQ ID NO: 4160 - protein, 1371 aa, Artificial Sequence
  SARS-CoV-2/Wuhan/WIV05/2019__EPI_ISL_402128 spike protein (1-1211)(G889C_L1034C) LumSynth construct
MFVFLVLLPLVSSQCVNLTTRTQLPPAYTNSFTRGVYYPDKVFRSSVLHSTQDLFLPFFSNVTWFHAIHVSGTNGTKRFDNPVLPFNDGVYFASTEKSNIIRGWIFGTTLDSKTQSLLIVNNATNVVIKVCEFQFCNDPFLGVYYHKNNKSWMESEFRVYSSANNCTFEYVSQPFLMDLEGKQGNFKNLREFVFKNIDGYFKIYSKHTPINLVRDLPQGFSALEPLVDLPIGINITRFQTLLALHRSYLTPGDSSSGWTAGAAAYYVGYLQPRTFLLKYNENGTITDAVDCALDPLSETKCTLKSFTVEKGIYQTSNFRVQPTESIVRFPNITNLCPFGEVFNATRFASVYAWNRKRISNCVADYSVLYNSASFSTFKCYGVSPTKLNDLCFTNVYADSFVIRGDEVRQIAPGQTGKIADYNYKLPDDFTGCVIAWNSNNLDSKVGGNYNYLYRLFRKSNLKPFERDISTEIYQAGSTPCNGVEGFNCYFPLQSYGFQPTNGVGYQPYRVVVLSFELLHAPATVCGPKKSTNLVKNKCVNFNFNGLTGTGVLTESNKKFLPFQQFGRDIADTTDAVRDPQTLEILDITPCSFGGVSVITPGTNTSNQVAVLYQDVNCTEVPVAIHADQLTPTWRVYSTGSNVFQTRAGCLIGAEHVNNSYECDIPIGAGICASYQTQTNSPRRARSVASQSIIAYTMSLGAENSVAYSNNSIAIPTNFTISVTTEILPVSMTKTSVDCTMYICGDSTECSNLLLQYGSFCTQLNRALTGIAVEQDKNTQEVFAQVKQIYKTPPIKDFGGFNFSQILPDPSKPSKRSFIEDLLFNKVTLADAGFIKQYGDCLGDIAARDLICAQKFNGLTVLPPLLTDEMIAQYTSALLAGTITSGWTFCAGAALQIPFAMQMAYRFNGIGVTQNVLYENQKLIANQFNSAIGKIQDSLSSTASALGKLQDVVNQNAQALNTLVKQLSSNFGAISSVLNDILSRLDKVEAEVQIDRLITGRLQSLQTYVTQQLIRAAEIRASANLAATKMSECVCGQSKRVDFCGKGYHLMSFPQSAPHGVVFLHVTYVPAQEKNFTTAPAICHDGKAHFPREGVFVSNGTHWFVTQRNFYEPQIITTDNTFVSGNCDVVIGIVNNTVYDPLQPELDSFKEELDKYFKNHTSPDVDLGDISGINASVVNIQKEIDRLNEVAKNLNESLIDLQELGKYEQYIKGGGSGGGQIYEGKLTAEGLRFGIVASRFNHALVDRLVEGAIDAIVRHGGREEDITLVRVPGSWEIPVAAGELARKEDIDAVIAIGVLIRGATPHFDYIASEVSKGLADLSLELRKPITFGVITADTLEQAIERAGTKHGNKGWEAALSAIEMANLFKSLR

SEQ ID NO: 4161 - protein, 1367 aa, Artificial Sequence
  SARS-CoV-2/bat/Yunnan/RaTG13/2013__EPI_ISL_402131 spike protein (1-1207)(G885C_L1030C) LumSynth construct
MFVFLVLLPLVSSQCVNLTTRTQLPPAYTNSSTRGVYYPDKVFRSSVLHLTQDLFLPFFSNVTWFHAIHVSGTNGIKRFDNPVLPFNDGVYFASTEKSNIIRGWIFGTTLDSKTQSLLIVNNATNVVIKVCEFQFCNDPFLGVYYHKNNKSWMESEFRVYSSANNCTFEYVSQPFLMDLEGKQGNFKNLREFVFKNIDGYFKIYSKHTPINLVRDLPPGFSALEPLVDLPIGINITRFQTLLALHRSYLTPGDSSSGWTAGAAAYYVGYLQPRTFLLKYNENGTITDAVDCALDPLSETKCTLKSFTVEKGIYQTSNFRVQPTDSIVRFPNITNLCPFGEVFNATTFASVYAWNRKRISNCVADYSVLYNSTSFSTFKCYGVSPTKLNDLCFTNVYADSFVITGDEVRQIAPGQTGKIADYNYKLPDDFTGCVIAWNSKHIDAKEGGNFNYLYRLFRKANLKPFERDISTEIYQAGSKPCNGQTGLNCYYPLYRYGFYPTDGVGHQPYRVVVLSFELLNAPATVCGPKKSTNLVKNKCVNFNFNGLTGTGVLTESNKKFLPFQQFGRDIADTTDAVRDPQTLEILDITPCSFGGVSVITPGTNASNQVAVLYQDVNCTEVPVAIHADQLTPTWRVYSTGSNVFQTRAGCLIGAEHVNNSYECDIPIGAGICASYQTQTNSRSVASQSIIAYTMSLGAENSVAYSNNSIAIPTNFTISVTTEILPVSMTKTSVDCTMYICGDSTECSNLLLQYGSFCTQLNRALTGIAVEQDKNTQEVFAQVKQIYKTPPIKDFGGFNFSQILPDPSKPSKRSFIEDLLFNKVTLADAGFIKQYGDCLGDIAARDLICAQKFNGLTVLPPLLTDEMIAQYTSALLAGTITSGWTFCAGAALQIPFAMQMAYRFNGIGVTQNVLYENQKLIANQFNSAIGKIQDSLSSTASALGKLQDVVNQNAQALNTLVKQLSSNFGAISSVLNDILSRLDKVEAEVQIDRLITGRLQSLQTYVTQQLIRAAEIRASANLAATKMSECVCGQSKRVDFCGKGYHLMSFPQSAPHGVVFLHVTYVPAQEKNFTTAPAICHDGKAHFPREGVFVSNGTHWFVTQRNFYEPQIITTDNTFVSGSCDVVIGIVNNTVYDPLQPELDSFKEELDKYFKNHTSPDVDLGDISGINASVVNIQKEIDRLNEVAKNLNESLIDLQELGKYEQYIKGGGSGGGQIYEGKLTAEGLRFGIVASRFNHALVDRLVEGAIDAIVRHGGREEDITLVRVPGSWEIPVAAGELARKEDIDAVIAIGVLIRGATPHFDYIASEVSKGLADLSLELRKPITFGVITADTLEQAIERAGTKHGNKGWEAALSAIEMANLFKSLR

SEQ ID NO: 4162 - protein, 1371 aa, Artificial Sequence
  SARS-CoV-2/Wuhan/HBCDC-HB-01/2019__EPI_ISL_402132 spike protein (1-1211)(G889C_L1034C) LumSynth construct
MFVFLVLLPLVSSQCVNLTTRTQLPPAYTNSITRGVYYPDKVFRSSVLHSTQDLFLPFFSNVTWFHAIHVSGTNGTKRFDNPVLPFNDGVYFASTEKSNIIRGWIFGTTLDSKTQSLLIVNNATNVVIKVCEFQFCNDPFLGVYYHKNNKSWMESEFRVYSSANNCTFEYVSQPFLMDLEGKQGNFKNLREFVFKNIDGYFKIYSKHTPINLVRDLPQGFSALEPLVDLPIGINITRFQTLLALHRSYLTPGDSSSGWTAGAAAYYVGYLQPRTFLLKYNENGTITDAVDCALDPLSETKCTLKSFTVEKGIYQTSNFRVQPTESIVRFPNITNLCPFGEVFNATRFASVYAWNRKRISNCVADYSVLYNSASFSTFKCYGVSPTKLNDLCFTNVYADSFVIRGDEVRQIAPGQTGKIADYNYKLPDDFTGCVIAWNSNNLDSKVGGNYNYLYRLFRKSNLKPFERDISTEIYQAGSTPCNGVEGFNCYFPLQSYGFQPTNGVGYQPYRVVVLSFELLHAPATVCGPKKSTNLVKNKCVNFNFNGLTGTGVLTESNKKFLPFQQFGRDIADTTDAVRDPQTLEILDITPCSFGGVSVITPGTNTSNQVAVLYQDVNCTEVPVAIHADQLTPTWRVYSTGSNVFQTRAGCLIGAEHVNNSYECDIPIGAGICASYQTQTNSPRRARSVASQSIIAYTMSLGAENSVAYSNNSIAIPTNFTISVTTEILPVSMTKTSVDCTMYICGDSTECSNLLLQYGSFCTQLNRALTGIAVEQDKNTQEVFAQVKQIYKTPPIKDFGGFNFSQILPDPSKPSKRSFIEDLLFNKVTLADAGFIKQYGDCLGDIAARDLICAQKFNGLTVLPPLLTDEMIAQYTSALLAGTITSGWTFCAGAALQIPFAMQMAYRFNGIGVTQNVLYENQKLIANQFNSAIGKIQDSLSSTASALGKLQDVVNQNAQALNTLVKQLSSNFGAISSVLNDILSRLDKVEAEVQIDRLITGRLQSLQTYVTQQLIRAAEIRASANLAATKMSECVCGQSKRVDFCGKGYHLMSFPQSAPHGVVFLHVTYVPAQEKNFTTAPAICHDGKAHFPREGVFVSNGTHWFVTQRNFYEPQIITTDNTFVSGNCDVVIGIVNNTVYDPLQPELDSFKEELDKYFKNHTSPDVDLGDISGINASVVNIQKEIDRLNEVAKNLNESLIDLQELGKYEQYIKGGGSGGGQIYEGKLTAEGLRFGIVASRFNHALVDRLVEGAIDAIVRHGGREEDITLVRVPGSWEIPVAAGELARKEDIDAVIAIGVLIRGATPHFDYIASEVSKGLADLSLELRKPITFGVITADTLEQAIERAGTKHGNKGWEAALSAIEMANLFKSLR

SEQ ID NO: 4163 - protein, 1371 aa, Artificial Sequence
  SARS-CoV-2/Guangdong/20SF028/2020__EPI_ISL_403936 spike protein (1-1211)(G889C_L1034C) LumSynth construct
MFVFLVLLPLVSSQCVNLTTRTQLPPAYTNSFTRGVYYPDKVFRSSVLYSTQDLFLPFFSNVTWFHAIHVSGTNGTKRFDNPVLPFNDGVYFASTEKSNIIRGWIFGTTLDSKTQSLLIVNNATNVVIKVCEFQFCNDPFLGVYYHKNNKSWMESEFRVYSSANNCTFEYVSQPFLMDLEGKQGNFKNLREFVFKNIDGYFKIYSKHTPINLVRDLPQGFSALEPLVDLPIGINITRFQTLLALHRSYLTPGDSSSGWTAGAAAYYVGYLQPRTFLLKYNENGTITDAVDCALDPLSETKCTLKSFTVEKGIYQTSNFRVQPTESIVRFPNITNLCPFGEVFNATRFASVYAWNRKRISNCVADYSVLYNSASFSTFKCYGVSPTKLNDLCFTNVYADSFVIRGDEVRQIAPGQTGKIADYNYKLPDDFTGCVIAWNSNNLDSKVGGNYNYLYRLFRKSNLKPFERDISTEIYQAGSTPCNGVEGFNCYFPLQSYGFQPTNGVGYQPYRVVVLSFELLHAPATVCGPKKSTNLVKNKCVNFNFNGLTGTGVLTESNKKFLPFQQFGRDIADTTDAVRDPQTLEILDITPCSFGGVSVITPGTNTSNQVAVLYQDVNCTEVPVAIHADQLTPTWRVYSTGSNVFQTRAGCLIGAEHVNNSYECDIPIGAGICASYQTQTNSPRRARSVASQSIIAYTMSLGAENSVAYSNNSIAIPTNFTISVTTEILPVSMTKTSVDCTMYICGDSTECSNLLLQYGSFCTQLNRALTGIAVEQDKNTQEVFAQVKQIYKTPPIKDFGGFNFSQILPDPSKPSKRSFIEDLLFNKVTLADAGFIKQYGDCLGDIAARDLICAQKFNGLTVLPPLLTDEMIAQYTSALLAGTITSGWTFCAGAALQIPFAMQMAYRFNGIGVTQNVLYENQKLIANQFNSAIGKIQDSLSSTASALGKLQDVVNQNAQALNTLVKQLSSNFGAISSVLNDILSRLDKVEAEVQIDRLITGRLQSLQTYVTQQLIRAAEIRASANLAATKMSECVCGQSKRVDFCGKGYHLMSFPQSAPHGVVFLHVTYVPAQEKNFTTAPAICHDGKAHFPREGVFVSNGTHWFVTQRNFYEPQIITTDNTFVSGNCDVVIGIVNNTVYDPLQPELDSFKEELDKYFKNHTSPDVDLGDISGINASVVNIQKEIDRLNEVAKNLNESLIDLQELGKYEQYIKGGGSGGGQIYEGKLTAEGLRFGIVASRFNHALVDRLVEGAIDAIVRHGGREEDITLVRVPGSWEIPVAAGELARKEDIDAVIAIGVLIRGATPHFDYIASEVSKGLADLSLELRKPITFGVITADTLEQAIERAGTKHGNKGWEAALSAIEMANLFKSLR

SEQ ID NO: 4164 - protein, 1371 aa, Artificial Sequence
  SARS-CoV-2/Shenzhen/SZTH-001/2020__EPI_ISL_406592 spike protein (1-1211)(G889C_L1034C) LumSynth construct
MFVFLVLLPLVSSQCVNLTTRTQLPPAYTNSFTRGVYYPDKVFRSSVLHSTQDLFLPFFSNVTWFHAIHVSGTNGTKRFDNPVLPFNDGVYFASTEKSNIIRGWIFGTTLDSKTQSLLIVNNATNVVIKVCEFQFCNDPFLGVYYHKNNKSWMESEFRVYSSANNCTFEYVSQPFLMDLEGKQGNFKNLREFVFKNIDGYFKIYSKHTPINLVRDLPQGFSALEPLVDLPIGINITRFQTLLALHRSYLTPGDSSSGWTAGAAAYYVGYLQPRTFLLKYNENGTITDAVDCALDPLSETKCTLKSFTVEKGIYQTSNFRVQPTESIVRFPNITNLCPFGEVFNATRFASVYAWNRKRISNCVADYSVLYNSASFSTFKCYGVSPTKLNDLCFTNVYADSFVIRGDEVRQIAPGQTGKIADYNYKLPDDFTGCVIAWNSNNLDSKVGGNYNYLYRLFRKSNLKPFERDISTEIYQAGSTPCNGVEGFNCYFPLQSYGFQPTNGVGYQPYRVVVLSFELLHAPATVCGPKKSTNLVKNKCVNFNFNGLTGTGVLTESNKKFLPFQQFGRDIADTTDAVRDPQTLEILDITPCSFGGVSVITPGTNTSNQVAVLYQDVNCTEVPVAIHADQLTPTWRVYSTGSNVFQTRAGCLIGAEHVNNSYECDIPIGAGICASYQTQTNSPRRARSVASQSIIAYTMSLGAENSVAYSNNSIAIPTNFTISVTTEILPVSMTKTSVDCTMYICGDSTECSNLLLQYGSFCTQLNRALTGIAVEQDKNTQEVFAQVKQIYKTPPIKDFGGFNFSQILPDPSKPSKRSFIEDLLFNKVTLADAGFIKQYGDCLGDIAARDLICAQKFNGLTVLPPLLTDEMIAQYTSALLAGTITSGWTFCAGAALQIPFAMQMAYRFNGIGVTQNVLYENQKLIANQFNSAIGKIQDSLSSTASALGKLQDVVNQNAQALNTLVKQLSSNFGAISSVLNDILSRLDKVEAEVQIDRLITGRLQSLQTYVTQQLIRAAEIRASANLAATKMSECVCGQSKRVDFCGKGYHLMSFPQSAPHGVVFLHVTYVPAQEKNFTTAPAICHDGKAHFPREGVFVSNGTHWFVTQRNFYEPQIITTDNTFVSGNCDVLIGIVNNTVYDPLQPELDSFKEELDKYFKNHTSPDVDLGDISGINASVVNIQKEIDRLNEVAKNLNESLIDLQELGKYEQYIKGGGSGGGQIYEGKLTAEGLRFGIVASRFNHALVDRLVEGAIDAIVRHGGREEDITLVRVPGSWEIPVAAGELARKEDIDAVIAIGVLIRGATPHFDYIASEVSKGLADLSLELRKPITFGVITADTLEQAIERAGTKHGNKGWEAALSAIEMANLFKSLR

SEQ ID NO: 4165 - protein, 1371 aa, Artificial Sequence
  SARS-CoV-2/Shenzhen/SZTH-004/2020__EPI_ISL_406595 spike protein (1-1211)(G889C_L1034C) LumSynth construct
MFVFLVLLPLVSSQCVNLTTRTQLPPAYTNSFTRGVYYPDKVFRSSVLHSTQDLFLPFFSNVTWFHAIHVSGTNGTKRFDNPVLPFNDGVYFASTEKSNIIRGWIFGTTLDSKTQSLLIVNNATNVVIKVCEFQFCNDPFLGVYYHKNNKSWMESEFRVYSSANNCTFEYVSQPFLMDLEGKQGNFKNLREFVFKNIDGYFKIYSKHTPINLVRDLPQGFSALEPLVDLPIGINITRFQTLLALHRSYLTPGDSSSGWTAGAAAYYVGYLQPRTFLLKYNENGTITDAVDCALDPLSETKCTLKSFTVEKGIYQTSNFRVQPTESIVRFPNITNLCPFGEVFNATRFASVYAWDRKRISNCVAYYSVLYNSASFSTFKCYGVSPTKLNDLCFTNVYADSFVIRGDEVRQIAPGQTGKIADYNYKLPDDFTGCVIAWNSNNLDSKVGGNYNYLYRLFRKSNLKPFERDISTEIYQAGSTPCNGVEGFNCYFPLQSYGFQPTNGVGYQPYRVVVLSFELLHAPATVCGPKKSTNLVKNKCVNFNFNGLTGTGVLTESNKKFLPFQQFGRDIADTTDAVRDPQTLEILDITPCSFGGVSVITPGTNTSNQVAVLYQDVNCTEVPVAIHADQLTPTWRVYSTGSNVFQTRAGCLIGAEHVNNSYECDIPIGAGICASYQTQTNSPRRARSVASQSIIAYTMSLGAENSVAYSNNSIAIPTNFTISVTTEILPVSMTKTSVDCTMYICGDSTECSNLLLQYGSFCTQLNRALTGIAVEQDKNTQEVFAQVKQIYKTPPIKDFGGFNFSQILPDPSKPSKRSFIEDLLFNKVTLADAGFIKQYGDCLGDIAARDLICAQKFNGLTVLPPLLTDEMIAQYTSALLAGTITSGWTFCAGAALQIPFAMQMAYRFNGIGVTQNVLYENQKLIANQFNSAIGKIQDSLSSTASALGKLQDVVNQNAQALNTLVKQLSSNFGAISSVLNDILSRLDKVEAEVQIDRLITGRLQSLQTYVTQQLIRAAEIRASANLAATKMSECVCGQSKRVDFCGKGYHLMSFPQSAPHGVVFLHVTYVPAQEKNFTTAPAICHDGKAHFPREGVFVSNGTHWFVTQRNFYEPQIITTDNTFVSGNCDVVIGIVNNTVYDPLQPELDSFKEELDKYFKNHTSPDVDLGDISGINASVVNIQKEIDRLNEVAKNLNESLIDLQELGKYEQYIKGGGSGGGQIYEGKLTAEGLRFGIVASRFNHALVDRLVEGAIDAIVRHGGREEDITLVRVPGSWEIPVAAGELARKEDIDAVIAIGVLIRGATPHFDYIASEVSKGLADLSLELRKPITFGVITADTLEQAIERAGTKHGNKGWEAALSAIEMANLFKSLR

SEQ ID NO: 4166 - protein, 1371 aa, Artificial Sequence
  SARS-CoV-2/France/IDF0372/2020__EPI_ISL_406596 spike protein (1-1211)(G889C_L1034C) LumSynth construct
MFVFLVLLPLVSSQCVNLTTRTQLPPAYTNSFTRGVYYPDKVFRSSVLHSTQDLFLPFFSNVTWFHAIHVSGTNGTKRFDNPVLPFNDGVYFASTEKSNIIRGWIFGTTLDSKTQSLLIVNNATNVVIKVCEFQFCNDPFLGVYYHKNNKSWMESEFRVYSSANNCTFEYVSQPFLMDLEGKQGNFKNLREFVFKNIDGYFKIYSKHTPINLVRDLPQGFSALEPLVDLPIGINITRFQTLLALHRSYLTPGDSSSGWTAGAAAYYVGYLQPRTFLLKYNENGTITDAVDCALDPLSETKCTLKSFTVEKGIYQTSNFRVQPTESIVRFPNITNLCPFGEVFNATRFASVYAWNRKRISNCVADYSFLYNSASFSTFKCYGVSPTKLNDLCFTNVYADSFVIRGDEVRQIAPGQTGKIADYNYKLPDDFTGCVIAWNSNNLDSKVGGNYNYLYRLFRKSNLKPFERDISTEIYQAGSTPCNGVEGFNCYFPLQSYGFQPTNGVGYQPYRVVVLSFELLHAPATVCGPKKSTNLVKNKCVNFNFNGLTGTGVLTESNKKFLPFQQFGRDIADTTDAVRDPQTLEILDITPCSFGGVSVITPGTNTSNQVAVLYQDVNCTEVPVAIHADQLTPTWRVYSTGSNVFQTRAGCLIGAEHVNNSYECDIPIGAGICASYQTQTNSPRRARSVASQSIIAYTMSLGAENSVAYSNNSIAIPTNFTISVTTEILPVSMTKTSVDCTMYICGDSTECSNLLLQYGSFCTQLNRALTGIAVEQDKNTQEVFAQVKQIYKTPPIKDFGGFNFSQILPDPSKPSKRSFIEDLLFNKVTLADAGFIKQYGDCLGDIAARDLICAQKFNGLTVLPPLLTDEMIAQYTSALLAGTITSGWTFCAGAALQIPFAMQMAYRFNGIGVTQNVLYENQKLIANQFNSAIGKIQDSLSSTASALGKLQDVVNQNAQALNTLVKQLSSNFGAISSVLNDILSRLDKVEAEVQIDRLITGRLQSLQTYVTQQLIRAAEIRASANLAATKMSECVCGQSKRVDFCGKGYHLMSFPQSAPHGVVFLHVTYVPAQEKNFTTAPAICHDGKAHFPREGVFVSNGTHWFVTQRNFYEPQIITTDNTFVSGNCDVVIGIVNNTVYDPLQPELDSFKEELDKYFKNHTSPDVDLGDISGINASVVNIQKEIDRLNEVAKNLNESLIDLQELGKYEQYIKGGGSGGGQIYEGKLTAEGLRFGIVASRFNHALVDRLVEGAIDAIVRHGGREEDITLVRVPGSWEIPVAAGELARKEDIDAVIAIGVLIRGATPHFDYIASEVSKGLADLSLELRKPITFGVITADTLEQAIERAGTKHGNKGWEAALSAIEMANLFKSLR

SEQ ID NO: 4167 - protein, 1371 aa, Artificial Sequence
  SARS-CoV-2/Australia/VIC01/2020__EPI_ISL_406844 spike protein (1-1211)(G889C_L1034C) LumSynth construct
MFVFLVLLPLVSSQCVNLTTRTQLPPAYTNSFTRGVYYPDKVFRSSVLHSTQDLFLPFFSNVTWFHAIHVSGTNGTKRFDNPVLPFNDGVYFASTEKSNIIRGWIFGTTLDSKTQSLLIVNNATNVVIKVCEFQFCNDPFLGVYYHKNNKSWMESEFRVYSSANNCTFEYVSQPFLMDLEGKQGNFKNLREFVFKNIDGYFKIYSKHTPINLVRDLPQGFSALEPLVDLPIGINITRFQTLLALHRRYLTPGDSSSGWTAGAAAYYVGYLQPRTFLLKYNENGTITDAVDCALDPLSETKCTLKSFTVEKGIYQTSNFRVQPTESIVRFPNITNLCPFGEVFNATRFASVYAWNRKRISNCVADYSVLYNSASFSTFKCYGVSPTKLNDLCFTNVYADSFVIRGDEVRQIAPGQTGKIADYNYKLPDDFTGCVIAWNSNNLDSKVGGNYNYLYRLFRKSNLKPFERDISTEIYQAGSTPCNGVEGFNCYFPLQSYGFQPTNGVGYQPYRVVVLSFELLHAPATVCGPKKSTNLVKNKCVNFNFNGLTGTGVLTESNKKFLPFQQFGRDIADTTDAVRDPQTLEILDITPCSFGGVSVITPGTNTSNQVAVLYQDVNCTEVPVAIHADQLTPTWRVYSTGSNVFQTRAGCLIGAEHVNNSYECDIPIGAGICASYQTQTNSPRRARSVASQSIIAYTMSLGAENSVAYSNNSIAIPTNFTISVTTEILPVSMTKTSVDCTMYICGDSTECSNLLLQYGSFCTQLNRALTGIAVEQDKNTQEVFAQVKQIYKTPPIKDFGGFNFSQILPDPSKPSKRSFIEDLLFNKVTLADAGFIKQYGDCLGDIAARDLICAQKFNGLTVLPPLLTDEMIAQYTSALLAGTITSGWTFCAGAALQIPFAMQMAYRFNGIGVTQNVLYENQKLIANQFNSAIGKIQDSLSSTASALGKLQDVVNQNAQALNTLVKQLSSNFGAISSVLNDILSRLDKVEAEVQIDRLITGRLQSLQTYVTQQLIRAAEIRASANLAATKMSECVCGQSKRVDFCGKGYHLMSFPQSAPHGVVFLHVTYVPAQEKNFTTAPAICHDGKAHFPREGVFVSNGTHWFVTQRNFYEPQIITTDNTFVSGNCDVVIGIVNNTVYDPLQPELDSFKEELDKYFKNHTSPDVDLGDISGINASVVNIQKEIDRLNEVAKNLNESLIDLQELGKYEQYIKGGGSGGGQIYEGKLTAEGLRFGIVASRFNHALVDRLVEGAIDAIVRHGGREEDITLVRVPGSWEIPVAAGELARKEDIDAVIAIGVLIRGATPHFDYIASEVSKGLADLSLELRKPITFGVITADTLEQAIERAGTKHGNKGWEAALSAIEMANLFKSLR

SEQ ID NO: 4168 - protein, 1371 aa, Artificial Sequence
  SARS-CoV-2/Germany/BavPat1/2020__EPI_ISL_406862 spike protein (1-1211)(G889C_L1034C) LumSynth construct
MFVFLVLLPLVSSQCVNLTTRTQLPPAYTNSFTRGVYYPDKVFRSSVLHSTQDLFLPFFSNVTWFHAIHVSGTNGTKRFDNPVLPFNDGVYFASTEKSNIIRGWIFGTTLDSKTQSLLIVNNATNVVIKVCEFQFCNDPFLGVYYHKNNKSWMESEFRVYSSANNCTFEYVSQPFLMDLEGKQGNFKNLREFVFKNIDGYFKIYSKHTPINLVRDLPQGFSALEPLVDLPIGINITRFQTLLALHRSYLTPGDSSSGWTAGAAAYYVGYLQPRTFLLKYNENGTITDAVDCALDPLSETKCTLKSFTVEKGIYQTSNFRVQPTESIVRFPNITNLCPFGEVFNATRFASVYAWNRKRISNCVADYSVLYNSASFSTFKCYGVSPTKLNDLCFTNVYADSFVIRGDEVRQIAPGQTGKIADYNYKLPDDFTGCVIAWNSNNLDSKVGGNYNYLYRLFRKSNLKPFERDISTEIYQAGSTPCNGVEGFNCYFPLQSYGFQPTNGVGYQPYRVVVLSFELLHAPATVCGPKKSTNLVKNKCVNFNFNGLTGTGVLTESNKKFLPFQQFGRDIADTTDAVRDPQTLEILDITPCSFGGVSVITPGTNTSNQVAVLYQGVNCTEVPVAIHADQLTPTWRVYSTGSNVFQTRAGCLIGAEHVNNSYECDIPIGAGICASYQTQTNSPRRARSVASQSIIAYTMSLGAENSVAYSNNSIAIPTNFTISVTTEILPVSMTKTSVDCTMYICGDSTECSNLLLQYGSFCTQLNRALTGIAVEQDKNTQEVFAQVKQIYKTPPIKDFGGFNFSQILPDPSKPSKRSFIEDLLFNKVTLADAGFIKQYGDCLGDIAARDLICAQKFNGLTVLPPLLTDEMIAQYTSALLAGTITSGWTFCAGAALQIPFAMQMAYRFNGIGVTQNVLYENQKLIANQFNSAIGKIQDSLSSTASALGKLQDVVNQNAQALNTLVKQLSSNFGAISSVLNDILSRLDKVEAEVQIDRLITGRLQSLQTYVTQQLIRAAEIRASANLAATKMSECVCGQSKRVDFCGKGYHLMSFPQSAPHGVVFLHVTYVPAQEKNFTTAPAICHDGKAHFPREGVFVSNGTHWFVTQRNFYEPQIITTDNTFVSGNCDVVIGIVNNTVYDPLQPELDSFKEELDKYFKNHTSPDVDLGDISGINASVVNIQKEIDRLNEVAKNLNESLIDLQELGKYEQYIKGGGSGGGQIYEGKLTAEGLRFGIVASRFNHALVDRLVEGAIDAIVRHGGREEDITLVRVPGSWEIPVAAGELARKEDIDAVIAIGVLIRGATPHFDYIASEVSKGLADLSLELRKPITFGVITADTLEQAIERAGTKHGNKGWEAALSAIEMANLFKSLR

SEQ ID NO: 4169 - protein, 1371 aa, Artificial Sequence
  SARS-CoV-2/Wuhan/HBCDC-HB-02/2020__EPI_ISL_412978 spike protein (1-1211)(G889C_L1034C) LumSynth construct
MFVFLVLLPLVSSQCVNLTTRTQLPPAYTNSFTRGVYYPDKVFRSSVLHSTQDLFLPFFSNVTWFHAIHVSGTNGTKRFDNPVLPFNDGVYFASTEKSNIIRGWIFGTTLDSKTQSLLIVNNATNVVIKVCEFQFCNDPFLGVYYHKNNKSWMESEFRVYSSANNCTFEYVSQPFLMDLEGKQGNFKNLREFVFKNIDGYFKIYSKHTPINLVRDLPQGFSALEPLVDLPIGINITRFQTLLALHRSYLTPGDSSSGWTAGAAAYYVGYLQPRTFLLKYNENGTITDAVDCALDPLSETKCTLKSFTVEKGIYQTSNFRVQPTESIVRFPNITNLCPFGEVFNATRFASVYAWNRKRISNCVADYSVLYNSASFSTFKCYGVSPTKLNDLCFTNVYADSFVIRGDEVRQIAPGQTGKIADYNYKLPDDFTGCVIAWNSNNLDSKVGGNYNYLYRLFRKSNLKPFERDISTEIYQAGSTPCNGVEGFNCYFPLQSYGFQPTNGVGYQPYRVVVLSFELLHAPATVCGPKKSTNLVKNKCVNFNFNGLTGTGVLTESNKKFLPFQQFGRDIADTTDAVRDPQTLEILDITPCSFGGVSVITPGTNTSNQVAVLYQDVNCTEVPVAIHADQLTPTWRVYSTGSNVFQTRAGCLIGAEHVNNSYECDIPIGAGICASYQTQTNSPRRARSVASQSIIAYTMSLGAENSVAYSNNSIAIPTNFTISVTTEILPVSMTKTSVDCTMYICGDSTECSNFLLQYGSFCTQLNRALTGIAVEQDKNTQEVFAQVKQIYKTPPIKDFGGFNFSQILPDPSKPSKRSFIEDLLFNKVTLADAGFIKQYGDCLGDIAARDLICAQKFNGLTVLPPLLTDEMIAQYTSALLAGTITSGWTFCAGAALQIPFAMQMAYRFNGIGVTQNVLYENQKLIANQFNSAIGKIQDSLSSTASALGKLQDVVNQNAQALNTLVKQLSSNFGAISSVLNDILSRLDKVEAEVQIDRLITGRLQSLQTYVTQQLIRAAEIRASANLAATKMSECVCGQSKRVDFCGKGYHLMSFPQSAPHGVVFLHVTYVPAQEKNFTTAPAICHDGKAHFPREGVFVSNGTHWFVTQRNFYEPQIITTDNTFVSGNCDVVIGIVNNTVYDPLQPELDSFKEELDKYFKNHTSPDVDLGDISGINASVVNIQKEIDRLNEVAKNLNESLIDLQELGKYEQYIKGGGSGGGQIYEGKLTAEGLRFGIVASRFNHALVDRLVEGAIDAIVRHGGREEDITLVRVPGSWEIPVAAGELARKEDIDAVIAIGVLIRGATPHFDYIASEVSKGLADLSLELRKPITFGVITADTLEQAIERAGTKHGNKGWEAALSAIEMANLFKSLR

SEQ ID NO: 4170 - protein, 1371 aa, Artificial Sequence
  SARS-CoV-2/Australia/QLD02/2020__EPI_ISL_407896 spike protein (1-1211)(G889C_L1034C) LumSynth construct
MFVFLVLLPLVSSQCVNLTTRTQLPPAYTNSFTRGVYYPDKVFRSSVLHSTQDLFLPFFSNVTWFHAIHVSGTNGTKRFDNPVLPFNDGVYFASTEKSNIIRGWIFGTTLDSKTQSLLIVNNATNVVIKVCEFQFCNDPFLGVYYHKNNKSWMESEFRVYSSANNCTFEYVSQPFLMDLEGKQGNFKNLREFVFKNIDGYFKIYSKHTPINLVRDLPQGFSALEPLVDLPIGINITRFQTLLALHRSYLTPGDSSSGWTAGAAAYYVGYLQPRTFLLKYNENGTITDAVDCALDPLSETKCTLKSFTVEKGIYQTSNFRVQPTESIVRFPNITNLCPFGEVFNATRFASVYAWNRKRISNCVADYSVLYNSASFSTFKCYGVSPTKLNDLCFTNVYADSFVIRGDEVRQIAPGQTGKIADYNYKLPDDFTGCVIAWNSNNLDSKVGGNYNYLYRLFRKSNLKPFERDISTEIYQAGSTPCNGVEGFNCYFPLQSYGFQPTNGVGYQPYRVVVLSFELLHAPATVCGPKKSTNLVKNKCVNFNFNGLTGTGVLTESNKKFLPFQQFGRDIADTTDAVRDPQTLEILDITPCSFGGVSVITPGTNTSNQVAVLYQDVNCTEVPVAIHADQLTPTWRVYSTGSNVFQTRAGCLIGAEHVNNSYECDIPIGAGICASYQTQTNSPRRARSVASQSIIAYTMSLGAENSVAYSNNSIAIPTNFTISVTTEILPVSMTKTSVDCTMYICGDSTECSNLLLQYGSFCTQLNRALTGIAVEQDKNTQEVFAQVKQIYKTPPIKDFGGFNFSQILPDPSKPSKRSFIEDLLFNKVTLADAGFIKQYGDCLGDIAARDLICAQKFNGLTVLPPLLTDEMIAQYTSALLAGTITSGWTFCAGAALQIPFAMQMAYRFNGIGVTQNVLYENQKLIANQFNSAIGKIQDSLSSTASALGKLQDVVNQNAQALNTLVKQLSSNFGAISSVLNDILSRLDKVEAEVQIDRLITGRLQSLQTYVTQQLIRAAEIRASANLAATKMSECVCGQSKRVDFCGKGYHLMSFPQSAPHGVVFLHVTYVPAQEKNFTTAPAICHDGKAHFPREGVFVSNGTHWFVTQRNFYEPQIITTDNTFVSGNCDVVIGIVNNTVYDPLQLELDSFKEELDKYFKNHTSPDVDLGDISGINASVVNIQKEIDRLNEVAKNLNESLIDLQELGKYEQYIKGGGSGGGQIYEGKLTAEGLRFGIVASRFNHALVDRLVEGAIDAIVRHGGREEDITLVRVPGSWEIPVAAGELARKEDIDAVIAIGVLIRGATPHFDYIASEVSKGLADLSLELRKPITFGVITADTLEQAIERAGTKHGNKGWEAALSAIEMANLFKSLR

SEQ ID NO: 4171 - protein, 1371 aa, Artificial Sequence
  SARS-CoV-2/India/1-31/2020__EPI_ISL_413523 spike protein (1-1211)(G889C_L1034C) LumSynth construct
MFVFLVLLPLVSSQCVNLTTRTQLPPAYTNSFTRGVYYPDKVFRSSVLHSTQDLFLPFFSNVTWFHAIHVSGTNGTKRFDNPVLPFNDGVYFASTEKSNIIRGWIFGTTLDSKTQSLLIVNNATNVVIKVCEFQFCNDPFLGVYYHKNNKSWMESEFRVYSSANNCTFEYVSQPFLMDLEGKQGNFKNLREFVFKNIDGYFKIYSKHTPINLVRDLPQGFSALEPLVDLPIGINITRFQTLLALHRSYLTPGDSSSGWTAGAAAYYVGYLQPRTFLLKYNENGTITDAVDCALDPLSETKCTLKSFTVEKGIYQTSNFRVQPTESIVRFPNITNLCPFGEVFNATRFASVYAWNRKRISNCVADYSVLYNSASFSTFKCYGVSPTKLNDLCFTNVYADSFVIRGDEVRQIAPGQTGKIADYNYKLPDDFTGCVIAWNSNNLDSKVGGNYNYLYRLFRKSNLKPFERDISTEIYQAGSTPCNGVEGFNCYFPLQSYGFQPTNGVGYQPYRVVVLSFELLHAPATVCGPKKSTNLVKNKCVNFNFNGLTGTGVLTESNKKFLPFQQFGRDIADTTDAVRDPQTLEILDITPCSFGGVSVITPGTNTSNQVAVLYQDVNCTEVPVAIHADQLTPTWRVYSTGSNVFQTRAGCLIGAEHVNNSYECDIPIGAGICASYQTQTNSPRRARSVASQSIIAYTMSLGAENSVAYSNNSIAIPTNFTISVTTEILPVSMTKTSVDCTMYICGDSTECSNLLLQYGSFCTQLNRALTGIAVEQDKNTQEVFAQVKQIYKTPPIKDFGGFNFSQILPDPSKPSKRSFIEDLLFNKVTLADAGFIKQYGDCLGDIAARDLICAQKFNGLTVLPPLLTDEMIAQYTSALLAGTITSGWTFCAGAALQIPFAMQMAYRFNGIGVTQNVLYENQKLIANQFNSVIGKIQDSLSSTASALGKLQDVVNQNAQALNTLVKQLSSNFGAISSVLNDILSRLDKVEAEVQIDRLITGRLQSLQTYVTQQLIRAAEIRASANLAATKMSECVCGQSKRVDFCGKGYHLMSFPQSAPHGVVFLHVTYVPAQEKNFTTAPAICHDGKAHFPREGVFVSNGTHWFVTQRNFYEPQIITTDNTFVSGNCDVVIGIVNNTVYDPLQPELDSFKEELDKYFKNHTSPDVDLGDISGINASVVNIQKEIDRLNEVAKNLNESLIDLQELGKYEQYIKGGGSGGGQIYEGKLTAEGLRFGIVASRFNHALVDRLVEGAIDAIVRHGGREEDITLVRVPGSWEIPVAAGELARKEDIDAVIAIGVLIRGATPHFDYIASEVSKGLADLSLELRKPITFGVITADTLEQAIERAGTKHGNKGWEAALSAIEMANLFKSLR

SEQ ID NO: 4172 - protein, 1371 aa, Artificial Sequence
  SARS-CoV-2/Guangdong/GD2020087-P0008/2020__EPI_ISL_413863 spike protein (1-1211)(G889C_L1034C) LumSynth construct
MFVFLVLLPLVSSQCVNLTTRTQLPPAYTNSFTRGVYYPDKVFRSSVLHSTQDLFLPFFSNVTWFHAIHVSGTNGTKRFDNPVLPFNDGVYFASTEKSNIIRGWIFGTTLDSKTQSLLIVNNATNVVIKVCEFQFCNDPFLGVYYHKNNKSWMESEFRVYSSANNCTFEYVSQPFLMDLEGKQGNFKNLREFVFKNIDGYFKIYSKHTPINLVRDLPQGFSALEPLVDLPIGINITRFQTLLALHRSYLTPGDSSSGWTAGAAAYYVGYLQPRTFLLKYNENGTITDAVDCALDPLSETKCTLKSFTVEKGIYQTSNFRVQPTESIVRFPNITNLCPFGEVFNATRFASVYAWNRKRISNCVADYSVLYNSASFSTFKCYGVSPTKLNDLCFTNVYADSFVIRGDEVREIAPGQTGKIADYNYKLPDDFTGCVIAWNSNNLDSKVGGNYNYLYRLFRKSNLKPFERDISTEIYQAGSTPCNGVEGFNCYFPLQSYGFQPTNGVGYQPYRVVVLSFELLHAPATVCGPKKSTNLVKNKCVNFNFNGLTGTGVLTESNKKFLPFQQFGRDIADTTDAVRDPQTLEILDITPCSFGGVSVITPGTNTSNQVAVLYQDVNCTEVPVAIHADQLTPTWRVYSTGSNVFQTRAGCLIGAEHVNNSYECDIPIGAGICASYQTQTNSPRRARSVASQSIIAYTMSLGAENSVAYSNNSIAIPTNFTISVTTEILPVSMTKTSVDCTMYICGDSTECSNLLLQYGSFCTQLNRALTGIAVEQDKNTQEVFAQVKQIYKTPPIKDFGGFNFSQILPDPSKPSKRSFIEDLLFNKVTLADAGFIKQYGDCLGDIAARDLICAQKFNGLTVLPPLLTDEMIAQYTSALLAGTITSGWTFCAGAALQIPFAMQMAYRFNGIGVTQNVLYENQKLIANQFNSAIGKIQDSLSSTASALGKLQDVVNQNAQALNTLVKQLSSNFGAISSVLNDILSRLDKVEAEVQIDRLITGRLQSLQTYVTQQLIRAAEIRASANLAATKMSECVCGQSKRVDFCGKGYHLMSFPQSAPHGVVFLHVTYVPAQEKNFTTAPAICHDGKAHFPREGVFVSNGTHWFVTQRNFYEPQIITTDNTFVSGNCDVVIGIVNNTVYDPLQPELDSFKEELDKYFKNHTSPDVDLGDISGINASVVNIQKEIDRLNEVAKNLNESLIDLQELGKYEQYIKGGGSGGGQIYEGKLTAEGLRFGIVASRFNHALVDRLVEGAIDAIVRHGGREEDITLVRVPGSWEIPVAAGELARKEDIDAVIAIGVLIRGATPHFDYIASEVSKGLADLSLELRKPITFGVITADTLEQAIERAGTKHGNKGWEAALSAIEMANLFKSLR

SEQ ID NO: 4173 - protein, 1371 aa, Artificial Sequence
  SARS-CoV-2/Sweden/01/2020__EPI_ISL_411951 spike protein (1-1211)(G889C_L1034C) LumSynth construct
MFVFLVLLPLVSSQCVNLTTRTQLPPAYTNSFTRGVYYPDKVFRSSVLHSTQDLFLPFFSNVTWFHAIHVSGTNGTKRFDNPVLPFNDGVYFASTEKSNIIRGWIFGTTLDSKTQSLLIVNNATNVVIKVCEFQFCNDPFLGVYYHKNNKSWMESEFRVYSSANNCTFEYVSQPFLMDLEGKQGNFKNLREFVFKNIDGYFKIYSKHTPINLVRDLPQGFSALEPLVDLPIGINITRFQTLLALHRSYLTPGDSSSGWTAGAAAYYVGYLQPRTFLLKYNENGTITDAVDCALDPLSETKCTLKSFTVEKGIYQTSNFRVQPTESIVRFPNITNLCPFGEVFNATRFASVYAWNRKRISNCVADYSVLYNSASFSTFKCYGVSPTKLNDLCFTNVYADSFVIRGDEVRQIAPGQTGKIADYNYKLPDDFTGCVIAWNSNNLDSKVGGNYNYLYRLFRKSNLKPFERDISTEIYQAGSTPCNGVEGFNCYFPLQSYGFQPTNGVGYQPYRVVVLSFELLHAPATVCGPKKSTNLVKNKCVNFNFNGLTGTGVLTESNKKFLPFQQFGRDIADTTDAVRDPQTLEILDITPCSFGGVSVITPGTNTSNQVAVLYQDVNCTEVPVAIHADQLTPTWRVYSTGSNVFQTRAGCLIGAEHVNNSYECDIPIGAGICASYQTQTNSPRRARSVASQSIIAYTMSLGAENSVAYSNNSIAIPTNFTISVTTEILPVSMTKTSVDCTMYICGDSTECSNLLLQYGSFCTQLNRALTGIAVEQDKNTQEVFAQVKQIYKTPPIKDCGGFNFSQILPDPSKPSKRSFIEDLLFNKVTLADAGFIKQYGDCLGDIAARDLICAQKFNGLTVLPPLLTDEMIAQYTSALLAGTITSGWTFCAGAALQIPFAMQMAYRFNGIGVTQNVLYENQKLIANQFNSAIGKIQDSLSSTASALGKLQDVVNQNAQALNTLVKQLSSNFGAISSVLNDILSRLDKVEAEVQIDRLITGRLQSLQTYVTQQLIRAAEIRASANLAATKMSECVCGQSKRVDFCGKGYHLMSFPQSAPHGVVFLHVTYVPAQEKNFTTAPAICHDGKAHFPREGVFVSNGTHWFVTQRNFYEPQIITTDNTFVSGNCDVVIGIVNNTVYDPLQPELDSFKEELDKYFKNHTSPDVDLGDISGINASVVNIQKEIDRLNEVAKNLNESLIDLQELGKYEQYIKGGGSGGGQIYEGKLTAEGLRFGIVASRFNHALVDRLVEGAIDAIVRHGGREEDITLVRVPGSWEIPVAAGELARKEDIDAVIAIGVLIRGATPHFDYIASEVSKGLADLSLELRKPITFGVITADTLEQAIERAGTKHGNKGWEAALSAIEMANLFKSLR

SEQ ID NO: 4174 - protein, 1371 aa, Artificial Sequence
  SARS-CoV-2/Tianmen/HBCDC-HB-07/2020__EPI_ISL_412983 spike protein (1-1211)(G889C_L1034C) LumSynth construct
MFVFLVLLPLVSSQCVNLTTRTQLPPAYTNSFTRGVYYPDKVFRSSVLHSTQDLFLPFFSNVTWFHAIHVSGTNGTKRFDNPVLPFNDGVYFASTEKSNIIRGWIFGTTLDSKTQSLLIVNNATNVVIKVCEFQFCNDPFLGVYYHKNNKSWMESEFRVYSSANNCTFEYVSQPFLMDLEGKQGNFKNLREFVFKNIDGYFKIYSKHTPINLVRDLPQGFSALEPLVDLPIGINITRFQTLLALHRSYLTPGDSSSGWTAGAAAYYVGYLQPRTFLLKYNENGTITDAVDCALDPLSETKCTLKSFTVEKGIYQTSNFRVQPTESIVRFPNITNLCPFGEVFNATRFASVYAWNRKRISNCVADYSVLYNSASFSTFKCYGVSPTKLNDLCFTNVYADSFVIRGDEVRQIAPGQTGKIADYNYKLPDDFTGCVIAWNSNNLDSKVGGNYNYLYRLFRKSNLKPFERDISTEIYQAGSTPCNGVEGFNCYFPLQSYGFQPTNGVGYQPYRVVVLSFELLHAPATVCGPKKSTNLVKNKCVNFNFNGLTGTGVLTESNKKFLPFQQFGRDIADTTDAVRDPQTLEILDITPCSFGGVSVITPGTNTSNQVAVLYQDLNCTEVPVAIHADQLTPTWRVYSTGSNVFQTRAGCLIGAEHVNNSYECDIPIGAGICASYQTQTNSPRRARSVASQSIIAYTMSLGAENSVAYSNNSIAIPTNFTISVTTEILPVSMTKTSVDCTMYICGDSTECSNLLLQYGSFCTQLNRALTGIAVEQDKNTQEVFAQVKQIYKTPPIKDFGGFNFSQILPDPSKPSKRSFIEDLLFNKVTLADAGFIKQYGDCLGDIAARDLICAQKFNGLTVLPPLLTDEMIAQYTSALLAGTITSGWTFCAGAALQIPFAMQMAYRFNGIGVTQNVLYENQKLIANQFNSAIGKIQDSLSSTASALGKLQDVVNQNAQALNTLVKQLSSNFGAISSVLNDILSRLDKVEAEVQIDRLITGRLQSLQTYVTQQLIRAAEIRASANLAATKMSECVCGQSKRVDFCGKGYHLMSFPQSAPHGVVFLHVTYVPAQEKNFTTAPAICHDGKAHFPREGVFVSNGTHWFVTQRNFYEPQIITTDNTFVSGNCDVVIGIVNNTVYDPLQPELDSFKEELDKYFKNHTSPDVDLGDISGINASVVNIQKEIDRLNEVAKNLNESLIDLQELGKYEQYIKGGGSGGGQIYEGKLTAEGLRFGIVASRFNHALVDRLVEGAIDAIVRHGGREEDITLVRVPGSWEIPVAAGELARKEDIDAVIAIGVLIRGATPHFDYIASEVSKGLADLSLELRKPITFGVITADTLEQAIERAGTKHGNKGWEAALSAIEMANLFKSLR

SEQ ID NO: 4175 - protein, 1371 aa, Artificial Sequence
  SARS-CoV-2/Hong Kong/case42_VM20002493/2020__EPI_ISL_414527 spike protein (1-1211)(G889C_L1034C) LumSynth construct
MFVFLVLLPLVSSQCVNLTTRTQLPPAYTNSFTRGVYYPDKVFRSSVLHSTQDLFLPFFSNVTWFHAIHVSGTNGTKRFDNPVLPFNDGVYFASTEKSNIIRGWIFGTTLDSKTQSLLIVNNATNVVIKVCEFQFCNDPFLGVYYHKNNKSWMESEFRVYSSANNCTFEYVSQPFLMDLEGKQGNFKNLREFVFKNIDGYFKIYSKHTPINLVRDLPQGFSALEPLVDLPIGINITRFQTLLALHRSYLTPGDSSSGWTAGAAAYYVGYLQPRTFLLKYNENGTITDAVDCALDPLSETKCTLKSFTVEKGIYQTSNFRVQPTESIVRFPNITNLCPFGEVFNATRFASVYAWNRKRISNCVADYSVLYNSASFSTFKCYGVSPTKLNDLCFTNVYADSFVIRGDEVRQIAPGQTGKIADYNYKLPDDFTGCVIAWNSNNLDSKVGGNYNYLYRLFRKSNLKPFERDISTEIYQAGSTPCNGVEGFNCYFPLQSYGFQPTNGVGYQPYRVVVLSFELLHAPATVCGPKKSTNLVKNKCVNFNFNGLTGTGVLTESNKKFLPFQQFGRDIADTTDAVRDPQTLEILDITPCSFGGVSVITPGTNTSNQVAVLYQDVNCTEVPVAIHADQLTPTWRVYSTGSNVFQTRAGCLIGAEHVNNSYECDIPIGAGICASYQTQTNSPRRARSVASQSIIAYTMSLGAENSVAYSNNSIAIPTNFAISVTTEILPVSMTKTSVDCTMYICGDSTECSNLLLQYGSFCTQLNRALTGIAVEQDKNTQEVFAQVKQIYKTPPIKDFGGFNFSQILPDPSKPSKRSFIEDLLFNKVTLADAGFIKQYGDCLGDIAARDLICAQKFNGLTVLPPLLTDEMIAQYTSALLAGTITSGWTFCAGAALQIPFAMQMAYRFNGIGVTQNVLYENQKLIANQFNSAIGKIQDSLSSTASALGKLQDVVNQNAQALNTLVKQLSSNFGAISSVLNDILSRLDKVEAEVQIDRLITGRLQSLQTYVTQQLIRAAEIRASANLAATKMSECVCGQSKRVDFCGKGYHLMSFPQSAPHGVVFLHVTYVPAQEKNFTTAPAICHDGKAHFPREGVFVSNGTHWFVTQRNFYEPQIITTDNTFVSGNCDVVIGIVNNTVYDPLQPELDSFKEELDKYFKNHTSPDVDLGDISGINASVVNIQKEIDRLNEVAKNLNESLIDLQELGKYEQYIKGGGSGGGQIYEGKLTAEGLRFGIVASRFNHALVDRLVEGAIDAIVRHGGREEDITLVRVPGSWEIPVAAGELARKEDIDAVIAIGVLIRGATPHFDYIASEVSKGLADLSLELRKPITFGVITADTLEQAIERAGTKHGNKGWEAALSAIEMANLFKSLR

SEQ ID NO: 4176 - protein, 1371 aa, Artificial Sequence
  SARS-CoV-2/USA/CruiseA-23/2020__EPI_ISL_414482 spike protein (1-1211)(G889C_L1034C) LumSynth construct
MFVFLVLLPLVSSQCVNLTTRTQLPPAYTNSFTRGVYYPDKVFRSSVLHSTQDLFLPFFSNVTWFHAIHVSGTNGTKRFDNPVLPFNDGVYFASTEKSNIIRGWIFGTTLDSKTQSLLIVNNATNVVIKVCEFQFCNDPFLGVYYHKNNKSWMESEFRVYSSANNCTFEYVSQPFLMDLEVKQGNFKNLREFVFKNIDGYFKIYSKHTPINLVRDLPQGFSALEPLVDLPIGINITRFQTLLALHRSYLTPGDSSSGWTAGAAAYYVGYLQPRTFLLKYNENGTITDAVDCALDPLSETKCTLKSFTVEKGIYQTSNFRVQPTESIVRFPNITNLCPFGEVFNATRFASVYAWNRKRISNCVADYSVLYNSASFSTFKCYGVSPTKLNDLCFTNVYADSFVIRGDEVRQIAPGQTGKIADYNYKLPDDFTGCVIAWNSNNLDSKVGGNYNYLYRLFRKSNLKPFERDISTEIYQAGSTPCNGVEGFNCYFPLQSYGFQPTNGVGYQPYRVVVLSFELLHAPATVCGPKKSTNLVKNKCVNFNFNGLTGTGVLTESNKKFLPFQQFGRDIADTTDAVRDPQTLEILDITPCSFGGVSVITPGTNTSNQVAVLYQDVNCTEVPVAIHADQLTPTWRVYSTGSNVFQTRAGCLIGAEHVNNSYECDIPIGAGICASYQTQTNSPRRARSVASQSIIAYTMSLGAENSVAYSNNSIAIPTNFTISVTTEILPVSMTKTSVDCTMYICGDSTECSNLLLQYGSFCTQLNRALTGIAVEQDKNTQEVFAQVKQIYKTPPIKDFGGFNFSQILPDPSKPSKRSFIEDLLFNKVTLADAGFIKQYGDCLGDIAARDLICAQKFNGLTVLPPLLTDEMIAQYTSALLAGTITSGWTFCAGAALQIPFAMQMAYRFNGIGVTQNVLYENQKLIANQFNSAIGKIQDSLSSTASALGKLQDVVNQNAQALNTLVKQLSSNFGAISSVLNDILSRLDKVEAEVQIDRLITGRLQSLQTYVTQQLIRAAEIRASANLAATKMSECVCGQSKRVDFCGKGYHLMSFPQSAPHGVVFLHVTYVPAQEKNFTTAPAICHDGKAHFPREGVFVSNGTHWFVTQRNFYEPQIITTDNTFVSGNCDVVIGIVNNTVYDPLQPELDSFKEELDKYFKNHTSPDVDLGDISGINASVVNIQKEIDRLNEVAKNLNESLIDLQELGKYEQYIKGGGSGGGQIYEGKLTAEGLRFGIVASRFNHALVDRLVEGAIDAIVRHGGREEDITLVRVPGSWEIPVAAGELARKEDIDAVIAIGVLIRGATPHFDYIASEVSKGLADLSLELRKPITFGVITADTLEQAIERAGTKHGNKGWEAALSAIEMANLFKSLR

SEQ ID NO: 4177 - protein, 1371 aa, Artificial Sequence
  SARS-CoV-2/Hong Kong/case85_VM20002868/2020__EPI_ISL_414519 spike protein (1-1211)(G889C_L1034C) LumSynth construct
MFVFLVLVPLVSSQCVNLTTRTQLPPAYTNSFTRGVYYPDKVFRSSVLHSTQDLFLPFFSNVTWFHAIHVSGTNGTKRFDNPVLPFNDGVYFASTEKSNIIRGWIFGTTLDSKTQSLLIVNNATNVVIKVCEFQFCNDPFLGVYYHKNNKSWMESEFRVYSSANNCTFEYVSQPFLMDLEGKQGNFKNLREFVFKNIDGYFKIYSKHTPINLVRDLPQGFSALEPLVDLPIGINITRFQTLLALHRSYLTPGDSSSGWTAGAAAYYVGYLQPRTFLLKYNENGTITDAVDCALDPLSETKCTLKSFTVEKGIYQTSNFRVQPTESIVRFPNITNLCPFGEVFNATRFASVYAWNRKRISNCVADYSVLYNSASFSTFKCYGVSPTKLNDLCFTNVYADSFVIRGDEVRQIAPGQTGKIADYNYKLPDDFTGCVIAWNSNNLDSKVGGNYNYLYRLFRKSNLKPFERDISTEIYQAGSTPCNGVEGFNCYFPLQSYGFQPTNGVGYQPYRVVVLSFELLHAPATVCGPKKSTNLVKNKCVNFNFNGLTGTGVLTESNKKFLPFQQFGRDIADTTDAVRDPQTLEILDITPCSFGGVSVITPGTNTSNQVAVLYQDVNCTEVPVAIHADQLTPTWRVYSTGSNVFQTRAGCLIGAEHVNNSYECDIPIGAGICASYQTQTNSPRRARSVASQSIIAYTMSLGAENSVAYSNNSIAIPTNFTISVTTEILPVSMTKTSVDCTMYICGDSTECSNLLLQYGSFCTQLNRALTGIAVEQDKNTQEVFAQVKQIYKTPPIKDFGGFNFSQILPDPSKPSKRSFIEDLLFNKVTLADAGFIKQYGDCLGDIAARDLICAQKFNGLTVLPPLLTDEMIAQYTSALLAGTITSGWTFCAGAALQIPFAMQMAYRFNGIGVTQNVLYENQKLIANQFNSAIGKIQDSLSSTASALGKLQDVVNQNAQALNTLVKQLSSNFGAISSVLNDILSRLDKVEAEVQIDRLITGRLQSLQTYVTQQLIRAAEIRASANLAATKMSECVCGQSKRVDFCGKGYHLMSFPQSAPHGVVFLHVTYVPAQEKNFTTAPAICHDGKAHFPREGVFVSNGTHWFVTQRNFYEPQIITTDNTFVSGNCDVVIGIVNNTVYDPLQPELDSFKEELDKYFKNHTSPDVDLGDISGINASVVNIQKEIDRLNEVAKNLNESLIDLQELGKYEQYIKGGGSGGGQIYEGKLTAEGLRFGIVASRFNHALVDRLVEGAIDAIVRHGGREEDITLVRVPGSWEIPVAAGELARKEDIDAVIAIGVLIRGATPHFDYIASEVSKGLADLSLELRKPITFGVITADTLEQAIERAGTKHGNKGWEAALSAIEMANLFKSLR

SEQ ID NO: 4178 - protein, 1371 aa, Artificial Sequence; identical to SEQ ID NO: 4168
  SARS-CoV-2/England/200990660/2020__EPI_ISL_414523 spike protein (1-1211)(G889C_L1034C) LumSynth construct

SEQ ID NO: 4179 - protein, 1371 aa, Artificial Sequence
  SARS-CoV-2/Australia/NSW09/2020__EPI_ISL_413595 spike protein (1-1211)(G889C_L1034C) LumSynth construct
MFVFLVLLPLVSSQCVNLTTRTQLPPAYTNSFTRGVYYPDKVFRSSVLHSTQDLFLPFFSNVTWFHAIHVSGTNGTKRFDNPVLPFNDGVYFASTEKSNIIRGWIFGTTLDSKTQSLLIVNNATNVVIKVCEFQFCNDPFLGVYYHKNNKSWMESEFRVYSSANNCTFEYVSQPFLMDLEGKQGNFKNLREFVFKNIDGYFKIYSKHTPINLVRDLPQGFSALEPLVDLPIGINITRFQTLLALHRSYLTPGDSSSGWTAGAAAYYVGYLQPRTFLLKYNENGTITDAVDCALDPLSETKCTLKSFTVEKGIYQTSNFRVQPTESIVRFPNITNLCPFGEVFNATRFASVYAWNRKRISNCVADYSVLYNSASFSTFKCYGVSPTKLNDLCFTNVYADSFVIRGDEVRQIAPGQTGKIADYNYKLPDDFTGCVIAWNSNNLDSKVGGNYNYLYRLFRKSNLKPFERDISTEIYQAGSTPCNGVEGFNCYFPLQSYGFQPTNGVGYQPYRVVVLSFELLHAPATVCGPKKSTNLVKNKCVNFNFNGLTGTGVLTESNKKFLPFQQFGRDIADTTDAVRDPQTLEILDITPCSFGGVSVITPGTNTSNQVAVLYQDVNCTEVPVAIHADQLTPTWRVYSTGSNVFQTRAGCLIGAEHVNNSYECDIPIGAGICASYQTQTNSPRRARSVASQSIIAYTMSLGAENSVAYSNNSIAIPTNFTISVTTEILPVSMTKTSVDCTMYICGDSTECSNLLLQYGSFCTQLNRALTGIAVEQDKNTQEVFAQVKQIYKTPPIKDFGGFNFSQILPDPSKPSKRSFIEDLLFNKVTLADAGFIKQYGDCLGDIAARDLICAQKFNGLTVLPPLLTDEMIAQYTSALLAGTITSGWTFCAGAALQIPFAMQMAYRFNGIGVTQNVLYENQKLIANQFNSAIGKIQDSLSFTASALGKLQDVVNQNAQALNTLVKQLSSNFGAISSVLNDILSRLDKVEAEVQIDRLITGRLQSLQTYVTQQLIRAAEIRASANLAATKMSECVCGQSKRVDFCGKGYHLMSFPQSAPHGVVFLHVTYVPAQEKNFTTAPAICHDGKAHFPREGVFVSNGTHWFVTQRNFYEPQIITTDNTFVSGNCDVVIGIVNNTVYDPLQPELDSFKEELDKYFKNHTSPDVDLGDISGINASVVNIQKEIDRLNEVAKNLNESLIDLQELGKYEQYIKGGGSGGGQIYEGKLTAEGLRFGIVASRFNHALVDRLVEGAIDAIVRHGGREEDITLVRVPGSWEIPVAAGELARKEDIDAVIAIGVLIRGATPHFDYIASEVSKGLADLSLELRKPITFGVITADTLEQAIERAGTKHGNKGWEAALSAIEMANLFKSLR

SEQ ID NO: 4180 - protein, 1371 aa, Artificial Sequence; identical to SEQ ID NO: 4160
  SARS-CoV-2/Australia/NSW10/2020__EPI_ISL_413596 spike protein (1-1211)(G889C_L1034C) LumSynth construct

SEQ ID NO: 4181 - protein, 1371 aa, Artificial Sequence
  SARS-CoV-2/Switzerland/1000477797/2020__EPI_ISL_413023 spike protein (1-1211)(G889C_L1034C) LumSynth construct
MFVFLVLLPLVSSQCVNLTTRTQLPPAYTNSFTRGVYYPDKVFRSSVLHSTQDLFLPFFSNVTWFHAIHVSGTNGTKRFDNPVLPFNDGVYFASTEKSNIIRGWIFGTTLDSKTQSLLIVNNATNVVIKVCEFQFCNDPFLGVYYHKNNKSWMESEFRVYSSANNCTFEYVSQPFLMDLEGKQGNFKNLREFVFKNIDGYFNIYSKHTPINLVRDLPQGFSALEPLVDLPIGINITRFQTLLALHRSYLTPGDSSSGWTAGAAAYYVGYLQPRTFLLKYNENGTITDAVDCALDPLSETKCTLKSFTVEKGIYQTSNFRVQPTESIVRFPNITNLCPFGEVFNATRFASVYAWNRKRISNCVADYSVLYNSASFSTFKCYGVSPTKLNDLCFTNVYADSFVIRGDEVRQIAPGQTGKIADYNYKLPDDFTGCVIAWNSNNLDSKVGGNYNYLYRLFRKSNLKPFERDISTEIYQAGSTPCNGVEGFNCYFPLQSYGFQPTNGVGYQPYRVVVLSFELLHAPATVCGPKKSTNLVKNKCVNFNFNGLTGTGVLTESNKKFLPFQQFGRDIADTTDAVRDPQTLEILDITPCSFGGVSVITPGTNTSNQVAVLYQGVNCTEVPVAIHADQLTPTWRVYSTGSNVFQTRAGCLIGAEHVNNSYECDIPIGAGICASYQTQTNSPRRARSVASQSIIAYTMSLGAENSVAYSNNSIAIPTNFTISVTTEILPVSMTKTSVDCTMYICGDSTECSNLLLQYGSFCTQLNRALTGIAVEQDKNTQEVFAQVKQIYKTPPIKDFGGFNFSQILPDPSKPSKRSFIEDLLFNKVTLADAGFIKQYGDCLGDIAARDLICAQKFNGLTVLPPLLTDEMIAQYTSALLAGTITSGWTFCAGAALQIPFAMQMAYRFNGIGVTQNVLYENQKLIANQFNSAIGKIQDSLSSTASALGKLQDVVNQNAQALNTLVKQLSSNFGAISSVLNDILSRLDKVEAEVQIDRLITGRLQSLQTYVTQQLIRAAEIRASANLAATKMSECVCGQSKRVDFCGKGYHLMSFPQSAPHGVVFLHVTYVPAQEKNFTTAPAICHDGKAHFPREGVFVSNGTHWFVTQRNFYEPQIITTDNTFVSGNCDVVIGIVNNTVYDPLQPELDSFKEELDKYFKNHTSPDVDLGDISGINASVVNIQKEIDRLNEVAKNLNESLIDLQELGKYEQYIKGGGSGGGQIYEGKLTAEGLRFGIVASRFNHALVDRLVEGAIDAIVRHGGREEDITLVRVPGSWEIPVAAGELARKEDIDAVIAIGVLIRGATPHFDYIASEVSKGLADLSLELRKPITFGVITADTLEQAIERAGTKHGNKGWEAALSAIEMANLFKSLR

SEQ ID NO: 4182 - protein, 1371 aa, Artificial Sequence
  SARS-CoV-2/Belgium/BA-02291/2020__EPI_ISL_415159 spike protein (1-1211)(G889C_L1034C) LumSynth construct
MFVFLVLLPLVSSQCVNLTTRTQLPPAYTNSFTRGVYYPDKVFRSSVLHSTQDLFLPFFSNVTWFHAIHVSGTNGTKRFDNPVLPFNDGVYFASTEKSNIIRGWIFGTTLDSKTQSLLIVNNATNVVIKVCEFQFCNDPFLGVYYHKNNKSWMESEFRVYSSANNCTFEYVSQPFLMDLEGKQGNFKNLREFVFKNIDGYFKIYSKHTPINLVRDLPQGFSALEPLVDLPIGINITRFQTLLALHRSYLTPGDSSSGWTAGAAAYYVGYLQPRTFLLKYNENGTITDAVDCALDPLSETKCTLKSFTVEKGIYQTSNFRVQPTESIVRFPNITNLCPFGEVFNATRFASVYAWNRKRISNCVADYSVLYNSASFSTFKCYGVSPTKLNDLCFTNVYADSFVIRGDEVRQIAPGQTGKIADYNYKLPDDFTGCVIAWNSNNLDSKVGGNYNYLYRLFRRSNLKPFERDISTEIYQAGSTPCNGVEGFNCYFPLQSYGFQPTNGVGYQPYRVVVLSFELLPAPATVCGPKKSTNLVKNKCVNFNFNGLTGTGVLTESNKKFLPFQQFGRDIADTTDAVRDPQTLEILDITPCSFGGVSVITPGTNTSNQVAVLYQGVNCTEVPVAIHADQLTPTWRVYSTGSNVFQTRAGCLIGAEHVNNSYECDIPIGAGICASYQTQTNSPRRARSVASQSIIAYTMSLGAENSVAYSNNSIAIPTNFTISVTTEILPVSMTKTSVDCTMYICGDSTECSNLLLQYGSFCTQLNRALTGIAVEQDKNTQEVFAQVKQIYKTPPIKDFGGFNFSQILPDPSKPSKRSFIEDLLFNKVTLADAGFIKQYGDCLGDIAARDLICAQKFNGLTVLPPLLTDEMIAQYTSALLAGTITSGWTFCAGAALQIPFAMQMAYRFNGIGVTQNVLYENQKLIANQFNSAIGKIQDSLSSAAPALGKLQDVVNQNAQALNTLVKQLSSNFGAISSVLNDILSRLDKVEAEVQIDRLITGRLQSLQTYVTQQLIRAAEIRASANLAATKMSECVCGQSKRVDFCGKGYHLMSFPQSAPHGVVFLHVTYVPAQEKNFTTAPAICHDGKAHFPREGVFVSNGTHWFVTQRNFYEPQIITTDNTFVSGNCDVVIGIVNNTVYDPLQPELDSFKEELDKYFKNHTSPDVDLGDISGINASVVNIQKEIDRLNEVAKNLNESLIDLQELGKYEQYIKGGGSGGGQIYEGKLTAEGLRFGIVASRFNHALVDRLVEGAIDAIVRHGGREEDITLVRVPGSWEIPVAAGELARKEDIDAVIAIGVLIRGATPHFDYIASEVSKGLADLSLELRKPITFGVITADTLEQAIERAGTKHGNKGWEAALSAIEMANLFKSLR

SEQ ID NO: 4183 - protein, 1371 aa, Artificial Sequence
  SARS-CoV-2/USA/WA8-UW5/2020__EPI_ISL_413486 spike protein (1-1211)(G889C_L1034C) LumSynth construct
MFVFLVLLPLVSSQCVNLTTRTQLPPAYTNSFTRGVYYPDKVFRSSVLHSTQDLFLPFFSNVTWFHAIHVSGTNGTKRFDNPVLPFNDGVYFASTEKSNIIRGWIFGTTLDSKTQSLLIVNNATNVVIKVCEFQFCNDPFLGVYYHKNNKSWMESEFRVYSSANNCTFEYVSQPFLMDLEGKQGNFKNLREFVFKNIDGYFKIYSKHTPINLVRDLPQGFSALEPLVDLPIGINITRFQTLLALHRSYLTPGDSSSGWTAGAAAYYVGYLQPRTFLLKYNENGTITDAVDCALDPLSETKCTLKSFTVEKGIYQTSNFRVQPTESIVRFPNITNLCPFGEVFNATRFASVYAWNRKRISNCVADYSVLYNSASFSTFKCYGVSPTKLNDLCFTNVYADSFVIRGDEVRQIAPGQTGKIADYNYKLPDDFTGCVIAWNSNNLDSKVGGNYNYLYRLFRKSNLKPFERDISTEIYQAGSTPCNGVEGFNCYFPLQSYGFQPTNGVGYQPYRVVVLSFELLHAPATVCGPKKSTNLVKNKCVNFNFNGLTGTGVLTESNKKFLPFQQFGRDIADTTDAVRDPQTLEILDITPCSFGGVSVITPGTNTSNQVAVLYQDVNCTEVPVAIHADQLTPTWRVYSTGSNVFQTRAGCLIGAEYVNNSYECDIPIGAGICASYQTQTNSPRRARSVASQSIIAYTMSLGAENSVAYSNNSIAIPTNFTISVTTEILPVSMTKTSVDCTMYICGDSTECSNLLLQYGSFCTQLNRALTGIAVEQDKNTQEVFAQVKQIYKTPPIKDFGGFNFSQILPDPSKPSKRSFIEDLLFNKVTLADAGFIKQYGDCLGDIAARDLICAQKFNGLTVLPPLLTDEMIAQYTSALLAGTITSGWTFCAGAALQIPFAMQMAYRFNGIGVTQNVLYENQKLIANQFNSAIGKIQDSLSSTASALGKLQDVVNQNAQALNTLVKQLSSNFGAISSVLNDILSRLDKVEAEVQIDRLITGRLQSLQTYVTQQLIRAAEIRASANLAATKMSECVCGQSKRVDFCGKGYHLMSFPQSAPHGVVFLHVTYVPAQEKNFTTAPAICHDGKAHFPREGVFVSNGTHWFVTQRNFYEPQIITTDNTFVSGNCDVVIGIVNNTVYDPLQPELDSFKEELDKYFKNHTSPDVDLGDISGINASVVNIQKEIDRLNEVAKNLNESLIDLQELGKYEQYIKGGGSGGGQIYEGKLTAEGLRFGIVASRFNHALVDRLVEGAIDAIVRHGGREEDITLVRVPGSWEIPVAAGELARKEDIDAVIAIGVLIRGATPHFDYIASEVSKGLADLSLELRKPITFGVITADTLEQAIERAGTKHGNKGWEAALSAIEMANLFKSLR

SEQ ID NO: 4184 - protein, 1371 aa, Artificial Sequence
  SARS-CoV-2/England/20102000506/2020__EPI_ISL_415147 spike protein (1-1211)(G889C_L1034C) LumSynth construct
MFVFLVLLPLVSSQCVNLTTRTQLPPAYTNSFTRGVYYPDKVFRSSVLHSTQDLFLPFFSNVTWFHAIHVSGTNGTKRFDNPVLPFNDGVYFASTEKSNIIRGWIFGTTLDSKTQSLLIVNNATNVVIKVCEFQFCNDPFLGVYYHKNNKSWMESEFRVYSSANNCTFEYVSQPFLMDLEGKQGNFKNLREFVFKNIDGYFKIYSKHTPINLVRDLPQGFSALEPLVDLPIGINITRFQTLLALHRSYLTPGDSSSGWTAGAAAYYVGYLQPRTFLLKYNENGTITDAVDCALDPLSETKCTLKSFTVEKGIYQTSNFRVQPTESIVRFPNITNLCPFGEVFNATRFASVYAWNRKRISNCVADYSVLYNSASFSTFKCYGVSPTKLNDLCFTNVYADSFVIRGDEVRQIAPGQTGKIADYNYKLPDDFTGCVIAWNSNNLDSKVGGNYNYLYRLFRKSNLKPFERDISTEIYQAGSTPCNGVEGFNCYFPLQSYGFQPTNGVGYQPYRVVVLSFELLHAPATVCGPKKSTNLVKNKCVNFNFNGLTGTGVLTESNKKFLPFQQFGRDIADTTDAVRDPQTLEILDITPCSFGGVSVITPGTNTSNQVAVLYQGVNCTEVPVAIHADQLTPTWRVYSTGSNVFQTRAGCLIGAEHVNNSYECDIPIGAGICASYQTQTNSPRRARSVASQSIIAYTMSLGAENSVAYSNNSIAIPTNFTISVTTEILPVSMTKTSVDCTMYICGDSTECSNLLLQYGSFCTQLNRALTGIAVEQDKNTQEVFAQVKQIYKTPPIKDFGGFNFSQILPDPSKPSKRSFIEDLLFNKVTLADAGFIKQYGYCLGDIAARDLICAQKFNGLTVLPPLLTDEMIAQYTSALLAGTITSGWTFCAGAALQIPFAMQMAYRFNGIGVTQNVLYENQKLIANQFNSAIGKIQDSLSSTASALGKLQDVVNQNAQALNTLVKQLSSNFGAISSVLNDILSRLDKVEAEVQIDRLITGRLQSLQTYVTQQLIRAAEIRASANLAATKMSECVCGQSKRVDFCGKGYHLMSFPQSAPHGVVFLHVTYVPAQEKNFTTAPAICHDGKAHFPREGVFVSNGTHWFVTQRNFYEPQIITTDNTFVSGNCDVVIGIVNNTVYDPLQPELDSFKEELDKYFKNHTSPDVDLGDISGINASVVNIQKEIDRLNEVAKNLNESLIDLQELGKYEQYIKGGGSGGGQIYEGKLTAEGLRFGIVASRFNHALVDRLVEGAIDAIVRHGGREEDITLVRVPGSWEIPVAAGELARKEDIDAVIAIGVLIRGATPHFDYIASEVSKGLADLSLELRKPITFGVITADTLEQAIERAGTKHGNKGWEAALSAIEMANLFKSLR

SEQ ID NO: 4185 - protein, 1371 aa, Artificial Sequence
  SARS-CoV-2/Belgium/VAG-03013/2020__EPI_ISL_415155 spike protein (1-1211)(G889C_L1034C) LumSynth construct
MFVFLVLLPLVSSQCVNLTTRTQLPPAYTNSFTRGVYYPDKVFRSSVLHSTQDLFLPFFSNVTWFHAIHVSGTNGTKRFDNPVLPFNDGVYFASTEKSNIIRGWIFGTTLDSKTQSLLIVNNATNVVIKVCEFQFCNDPFLGVYYHKNNKSWMESEFRVYSSANNCTFEYVSQPFLMDLEGKQGNFKNLREFVFKNIDGYFKIYSKHTPINLVRDLPQGFSALEPLVDLPIGINITRFQTLLALHRSYLTPGDSSSGWTAGAAAYYVGYLQPRTFLLKYNENGTITDAVDCALDPLSETKCTLKSFTVEKGIYQTSNFRVQPTESIVRFPNITNLCPFGEVFNATRFASVYAWNRKRISNCVADYSVLYNSASFSTFKCYGVSPTKLNDLCFTNVYADSFVIRGDEVRQIAPGQTGKIADYNYKLPDDFTGCVIAWNSNNLDSKVGGNYNYLYRLFRKSNLKPFERDISTEIYQAGSTPCNGVEGFNCYFPLQSYGFQPTNGVGYQPYRVVVLSFELLHAPATVCGPKKSTNLVKNKCVNFNFNGLTGTGVLTESNKKFLPFQQFGRDIADTTDAVRDPQTLEILDITPCSFGGVSVITPGTNTSNQVAVLYQGVNCTEVPVAIHADQLTPTWRVYSTGSNVFQTRAGCLIGAEHVNNSYECDIPIGAGICASYQTQTNSPRRARSVASQSIIAYTMSLGAENSVAYSNNSIAIPTNFTISVTTEILPVSMTKTSVDCTMYICGDSTECSNLLLQYGSFCTQLNRALTGIAVEQDKNTQEVFAQVKQIYKTPPIKDFGGFNFSQILPDPSKPSKRSFIEDLLFNKVTLADAGFIKQYGDCLGDIAARDLICAQKFNGLTVLPPLLTDEMIAQYTSALLAGTITSGWTFCAGAALQIPFAMQMAYRFNGIGVTQNVLYENQKLIANQFNSAIGKIQDSLSSTATALGKLQDVVNQNAQALNTLVKQLSSNFGAISSVLNDILSRLDKVEAEVQIDRLITGRLQSLQTYVTQQLIRAAEIRASANLAATKMSECVCGQSKRVDFCGKGYHLMSFPQSAPHGVVFLHVTYVPAQEKNFTTAPAICHDGKAHFPREGVFVSNGTHWFVTQRNFYEPQIITTDNTFVSGNCDVVIGIVNNTVYDPLQPELDSFKEELDKYFKNHTSPDVDLGDISGINASVVNIQKEIDRLNEVAKNLNESLIDLQELGKYEQYIKGGGSGGGQIYEGKLTAEGLRFGIVASRFNHALVDRLVEGAIDAIVRHGGREEDITLVRVPGSWEIPVAAGELARKEDIDAVIAIGVLIRGATPHFDYIASEVSKGLADLSLELRKPITFGVITADTLEQAIERAGTKHGNKGWEAALSAIEMANLFKSLR

SEQ ID NO: 4186 - protein, 1371 aa, Artificial Sequence
  SARS-CoV-2/Belgium/BC-03016/2020__EPI_ISL_415157 spike protein (1-1211)(G889C_L1034C) LumSynth construct
MFVFLVLLPLVSSQCVNLTTRTQLPPAYTNSFTRGVYYPDKVFRSSVLHSTQDLFLPFFSNVTWFHAIHVSGTNGTKRFDNPVLPFNDGVYFASTEKSNIIRGWIFGTTLDSKTQSLLIVNNATNVVIKVCEFQFCNDPFLGVYYHKNNKSWMESEFRVYSSANNCTFEYVSQPFLMDLEGKQGNFKNLREFVFKNIDGYFKIYSKHTPINLVRDLPQGFSALEPLVDLPIGINITRFQTLLALHRSYLTPGDSSSGWTAGAAAYYVGYLQPRTFLLKYNENGTITDAVDCALDPLSETKCTLKSFTVEKGIYQTSNFRVQPTESIVRFPNITNLCPFGEVFNATRFASVYAWNRKRISNCVADYSVLYNSASFSTFKCYGVSPTKLNDLCFTNVYADSFVIRGDEVRQIAPGQTGKIADYNYKLPDDFTGCVIAWNSNNLDSKVGGNYNYLYRLFRKSNLKPFERDISTEIYQAGSTPCNGVEGFNCYFPLQSYGFQPTNGVGYQPYRVVVLSFELLHAPATVCGPKKSTNLVKNKCVNFNFNGLTGTGVLTESNKKFLPFQQFGRDIADTTDAVRDPQTLEILDITPCSFGGVSVITPGTNTSNQVAVLYQGVNCTEVPVAIHADQLTPTWRVYSTGSNVFQTRAGCLIGAEHVNNSYECDIPIGAGICASYQTQTNSPRRARSVASQSIIAYTMSLGAENSVAYSNNSIAIPTNFTISVTTEILPVSMTKTSVDCTMYICGDSTECSNLLLQYGSFCTQLNRALTGIAVEQDKNTQEVFAQVKQIYKTPPIKDFGGFNFSQILPDPSKPSKRSFIEDLLFNKVTLADAGFIKQYGDCLGDIAARDLICAQKFNGLTVLPPLLTDEMIAQYTSALLAGTITSGWTFCAGAALQIPFAMQMAYRFNGIGVTQNVLYENQKLIANQFNSAIGKIQDSLSSTAPALGKLQDVVNQNAQALNTLVKQLSSNFGAISSVLNDILSRLDKVEAEVQIDRLITGRLQSLQTYVTQQLIRAAEIRASANLAATKMSECVCGQSKRVDFCGKGYHLMSFPQSAPHGVVFLHVTYVPAQEKNFTTAPAICHDGKAHFPREGVFVSNGTHWFVTQRNFYEPQIITTDNTFVSGNCDVVIGIVNNTVYDPLQPELDSFKEELDKYFKNHTSPDVDLGDISGINASVVNIQKEIDRLNEVAKNLNESLIDLQELGKYEQYIKGGGSGGGQIYEGKLTAEGLRFGIVASRFNHALVDRLVEGAIDAIVRHGGREEDITLVRVPGSWEIPVAAGELARKEDIDAVIAIGVLIRGATPHFDYIASEVSKGLADLSLELRKPITFGVITADTLEQAIERAGTKHGNKGWEAALSAIEMANLFKSLR

SEQ ID NO: 4187 - protein, 1371 aa, Artificial Sequence
  SARS-CoV-2/Germany/BavPat3/2020__EPI_ISL_414521 spike protein (1-1211)(G889C_L1034C) LumSynth construct
MFVFLVLLPLVSSQCVNLTTRTQLPPAYTNSFTRGVYYPDKVFRSSVLHSTQDLFLPFFSNVTWFHAIHVSGTNGTKRFDNPVLPFNDGVYFASTEKSNIIRGWIFGTTLDSKTQSLLIVNNATNVVIKVCEFQFCNDPFLGVYYHKNNKSWMESEFRVYSSANNCTFEYVSQPFLMDLEGKQGNFKNLREFVFKNIDGYFKIYSKHTPINLVRDLPQGFSALEPLVDLPIGINITRFQTLLALHRSYLTPGDSSSGWTAGAAAYYVGYLQPRTFLLKYNENGTITDAVDCALDPLSETKCTLKSFTVEKGIYQTSNFRVQPTESIVRFPNITNLCPFGEVFNATRFASVYAWNRKRISNCVADYSVLYNSASFSTFKCYGVSPTKLNDLCFTNVYADSFVIRGDEVRQIAPGQTGKIADYNYKLPDDFTGCVIAWNSNNLDSKVGGNYNYLYRLFRKSNLKPFERDISTEIYQAGSTPCNGVEGFNCYFPLQSYGFQPTNGVGYQPYRVVVLSFELLHAPATVCGPKKSTNLVKNKCVNFNFNGLTGTGVLTESNKKFLPFQQFGRDIADTTDAVRDPQTLEILDITPCSFGGVSVITPGTNTSNQVAVLYQDVNCTEVPVAIHADQLTPTWRVYSTGSNVFQTRAGCLIGAEHVNNSYECDIPIGAGICASYQTQTNSPRRARSVASQSIIAYTMSLGAENSVAYSNNSIAIPTNFTISVTTEILPVSMTKTSVDCTMYICGDSTECSNLLLQYGSFCTQLNRALTGIAVEQDKNTQQVFAQVKQIYKTPPIKDFGGFNFSQILPDPSKPSKRSFIEDLLFNKVTLADAGFIKQYGDCLGDIAARDLICAQKFNGLTVLPPLLTDEMIAQYTSALLAGTITSGWTFCAGAALQIPFAMQMAYRFNGIGVTQNVLYENQKLIANQFNSAIGKIQDSLSSTASALGKLQDVVNQNAQALNTLVKQLSSNFGAISSVLNDILSRLDKVEAEVQIDRLITGRLQSLQTYVTQQLIRAAEIRASANLAATKMSECVCGQSKRVDFCGKGYHLMSFPQSAPHGVVFLHVTYVPAQEKNFTTAPAICHDGKAHFPREGVFVSNGTHWFVTQRNFYEPQIITTDNTFVSGNCDVVIGIVNNTVYDPLQPELDSFKEELDKYFKNHTSPDVDLGDISGINASVVNIQKEIDRLNEVAKNLNESLIDLQELGKYEQYIKGGGSGGGQIYEGKLTAEGLRFGIVASRFNHALVDRLVEGAIDAIVRHGGREEDITLVRVPGSWEIPVAAGELARKEDIDAVIAIGVLIRGATPHFDYIASEVSKGLADLSLELRKPITFGVITADTLEQAIERAGTKHGNKGWEAALSAIEMANLFKSLR

SEQ ID NO: 4188 - protein, 1371 aa, Artificial Sequence
  SARS-CoV-2/France/HF1805/2020__EPI_ISL_414628 spike protein (1-1211)(G889C_L1034C) LumSynth construct
MFVFLVLLPLVSSQCVNLTTRTQLPPAYTNSFTRGVYYPDKVFRSSVLHSTQDLFLPFFSNVTWFHAIHVSGTNGTKRFDNPVLPFNDGVYFASTEKSNIIRGWIFGTTLDSKTQSLLIVNNATNVVIKVCEFQFCNDPFLGVYYHKNNKSWMESEFRVYSSANNCTFEYVSQPFLMDLEGKQGNFKNLREFVFKNIDGYFKIYSKHTPINLVRDLPQGFSALEPLVDLPIGINITRFQTLLALHRSYLTPGDSSSGWTAGAAAYYVGYLQPRTFLLKYNENGTITDAVDCALDPLSETKCTLKSFTVEKGIYQTSNFRVQPTESIVRFPNITNLCPFGEVFNATRFASVYAWNRKRISNCVADYSVLYNSASFSTFKCYGVSPTKLNDLCFTNVYADSFVIRGDEVRQIAPGQTGKIADYNYKLPDDFTGCVIAWNSNNLDSKVGGNYNYLYRLFRKSNLKPFERDISTEIYQAGSTPCNGVEGFNCYFPLQSYGFQPTNGVGYQPYRVVVLSFELLHAPATVCGPKKSTNLVKNKCVNFNFNGLTGTGVLTESNKKFLPFQQFGRDIADTTDAVRDPQTLEILDITPCSFGGVSVITPGTNTSNQVAVLYQGVNCTEVPVAIHADQLTPTWRVYSTGSNVFQTRAGCLIGAEHVNNSYECDIPIGAGICASYQTQTNSPRRARSVASQSIIAYTMSLGAENSVAYSNNSIAIPTNFTISVTTEILPVSMTKTSVDCTMYICGDSTECSNLLLQYGSFCTQLNRALTGIAVEQDKNTQEVFAQVKQIYKTPPIKDFGGFNFSQILPDPSKPSKRSFIEDLLFNKVTLADAGFIKQYGDCLGDIAARDLICAQKFNGLTVLPPLLTDEMIAQYTSALLAGTITSGWTFCAGAALQIPFAMQMAYRFNGIGVTQNVLYENQKLIANQFNSAIGKIQDSLSSTASALGKLQDVVNQNAQALNTLVKQLSSNFGAISSVLNDILSRLDKVEAEVQIDRLITGRLQSLQTYVTQQLIRAAEIRASANLAATKMSECVCGQSKRVDFCGKGYHLMSFPQSAPHGVVFLHVTYVPAQEKNFTTAPAICHDGKAHFPREGVFVSNGTHWFVTQRNFYEPQIITTDNTFVSGNCDVVIGVVNNTVYDPLQPELDSFKEELDKYFKNHTSPDVDLGDISGINASVVNIQKEIDRLNEVAKNLNESLIDLQELGKYEQYIKGGGSGGGQIYEGKLTAEGLRFGIVASRFNHALVDRLVEGAIDAIVRHGGREEDITLVRVPGSWEIPVAAGELARKEDIDAVIAIGVLIRGATPHFDYIASEVSKGLADLSLELRKPITFGVITADTLEQAIERAGTKHGNKGWEAALSAIEMANLFKSLR

SEQ ID NO: 4189 - protein, 1371 aa, Artificial Sequence
  SARS-CoV-2/Netherlands/ZuidHolland_9/2020__EPI_ISL_414445 spike protein (1-1211)(G889C_L1034C) LumSynth construct
MFVFLVLLPLVSSQCVNLTTRTQLPPAYTNSFTRGVYYPDKVFRSSVLHSTQDLFLPFFSNVTWFHAIHVSGTNGTKRFDNPVLPFNDGVYFASTEKSNIIRGWIFGTTLDSKTQSLLIVNNATNVVIKVCEFQFCNDPFLGVYYHKNNKSWMESEFRVYSSANNCTFEYVSQPFLMDLEGKQGNFKNLREFVFKNIDGYFKIYSKHTPINLVRDLPQGFSALEPLVDLPIGINITRFQTLLALHRSYLTPGDSSSGWTAGAAAYYVGYLQPRTFLLKYNENGTITDAVDCALDPLSETKCTLKSFTVEKGIYQTSNFRVQPTESIVRFPNITNLCPFGEVFNATRFASVYAWNRKRISNCVADYSVLYNSASFSTFKCYGVSPTKLNDLCFTNVYADSFVIRGDEVRQIAPGQTGKIADYNYKLPDDFTGCVIAWNSNNLDSKVGGNYNYLYRLFRKSNLKPFERDISTEIYQAGSTPCNGVEGFNCYFPLQSYGFQPTNGVGYQPYRVVVLSFELLHAPATVCGPKKSTNLVKNKCVNFNFNGLTGTGVLTESNKKFLPFQQFGRDIADTTDAVRDPQTLEILDITPCSFGGVSVITPGTNTSNQVAVLYQGVNCTEVPVAIHADQLTPTWRVYSTGSNVFQTRAGCLIGAEHVNNSYECDIPIGAGICASYQTQTNSPRRARSVASQSIIAYTMSLGAENSVAYSNNSIAIPTNFTISVTTEILPVSMTKTSVDCTMYICGDSTECSNLLLQYGSFCTQLNRALTGIAVEQDKNTQEVFAQVKQIYKTPPIKDFGGFNFSQILPDPSKPSKRSFIEDLLFNKVTLADAGFIKQYGDCLGDIAARDLICVQKFNGLTVLPPLLTDEMIAQYTSALLAGTITSGWTFCAGAALQIPFAMQMAYRFNGIGVTQNVLYENQKLIANQFNSAIGKIQDSLSSTASALGKLQDVVNQNAQALNTLVKQLSSNFGAISSVLNDILSRLDKVEAEVQIDRLITGRLQSLQTYVTQQLIRAAEIRASANLAATKMSECVCGQSKRVDFCGKGYHLMSFPQSAPHGVVFLHVTYVPAQEKNFTTAPAICHDGKAHFPREGVFVSNGTHWFVTQRNFYEPQIITTDNTFVSGNCDVVIGIVNNTVYDPLQPELDSFKEELDKYFKNHTSPDVDLGDISGINASVVNIQKEIDRLNEVAKNLNESLIDLQELGKYEQYIKGGGSGGGQIYEGKLTAEGLRFGIVASRFNHALVDRLVEGAIDAIVRHGGREEDITLVRVPGSWEIPVAAGELARKEDIDAVIAIGVLIRGATPHFDYIASEVSKGLADLSLELRKPITFGVITADTLEQAIERAGTKHGNKGWEAALSAIEMANLFKSLR

SEQ ID NO: 4190 - protein, 1371 aa, Artificial Sequence
  SARS-CoV-2/Finland/FIN03032020A/2020__EPI_ISL_413602 spike protein (1-1211)(G889C_L1034C) LumSynth construct
MFVFLVLLPLVSSQCVNLTTRTQLPPAYTNSFTRGVYYPDKVFRSSVLHSTQDLFLPFFSNVTWFHAIHVSGTNGTKRFDNPVLPFNDGVYFASTEKSNIIRGWIFGTTLDSKTQSLLIVNNATNVVIKVCEFQFCNDPFLGVYYHKNNKSWMESEFRVYSSANNCTFEYVSQPFLMDLEGKQGNFKNLREFVFKNIDGYFKIYSKHTPINLVRDLPQGFSALEPLVDLPIGINITRFQTLLALHRSYLTPGDSSSGWTAGAAAYYVGYLQPRTFLLKYNENGTITDAVDCALDPLSETKCTLKSFTVEKGIYQTSNFRVQPTESIVRFPNITNLCPFGEVFNATRFASVYAWNRKRISNCVADYSVLYNSASFSTFKCYGVSPTKLNDLCFTNVYADSFVIRGDEVRQIAPGQTGKIADYNYKLPDDFTGCVISWNSNNLDSKVGGNYNYLYRLFRKSNLKPFERDISTEIYQAGSTPCNGVEGFNCYFPLQSYGFQPTNGVGYQPYRVVVLSFELLHAPATVCGPKKSTNLVKNKCVNFNFNGLTGTGVLTESNKKFLPFQQFGRDIADTTDAVRDPQTLEILDITPCSFGGVSVITPGTNTSNQVAVLYQGVNCTEVPVAIHADQLTPTWRVYSTGSNVFQTRAGCLIGAEHVNNSYECDIPIGAGICASYQTQTNSPRRARSVASQSIIAYTMSLGAENSVAYSNNSIAIPTNFTISVTTEILPVSMTKTSVDCTMYICGDSTECSNLLLQYGSFCTQLNRALTGIAVEQDKNTQEVFAQVKQIYKTPPIKDFGGFNFSQILPDPSKPSKRSFIEDLLFNKVTLADAGFIKQYGDCLGDIAARDLICAQKFNGLTVLPPLLTDEMIAQYTSALLAGTITSGWTFCAGAALQIPFAMQMAYRFNGIGVTQNVLYENQKLIANQFNSAIGKIQDSLSSTASALGKLQDVVNQNAQALNTLVKQLSSNFGAISSVLNDILSRLDKVEAEVQIDRLITGRLQSLQTYVTQQLIRAAEIRASANLAATKMSECVCGQSKRVDFCGKGYHLMSFPQSAPHGVVFLHVTYVPAQEKNFTTAPAICHDGKAHFPREGVFVSNGTHWFVTQRNFYEPQIITTDNTFVSGNCDVVIGIVNNTVYDPLQPELDSFKEELDKYFKNHTSPDVDLGDISGINASVVNIQKEIDRLNEVAKNLNESLIDLQELGKYEQYIKGGGSGGGQIYEGKLTAEGLRFGIVASRFNHALVDRLVEGAIDAIVRHGGREEDITLVRVPGSWEIPVAAGELARKEDIDAVIAIGVLIRGATPHFDYIASEVSKGLADLSLELRKPITFGVITADTLEQAIERAGTKHGNKGWEAALSAIEMANLFKSLR

SEQ ID NO: 4191 - protein, 1371 aa, Artificial Sequence
  SARS-CoV-2/France/GE1977/2020__EPI_ISL_414632 spike protein (1-1211)(G889C_L1034C) LumSynth construct
MFVFLVLLPLVSSQCVNLTTRTQLPPAYTNSFTRGVYYPDKVFRSSVLHSTQDLFLPFFSNVTWFHAIHVSGTNGTKRFDNPVLPFNDGVYFASTEKSNIIRGWIFGTTLDSKTQSLLIVNNATNVVIKVCEFQFCNDPFLGVYYHKNNKSWMESEFRVYSSANNCTFEYVSQPFLMDLEGKQGNFKNLREFVFKNIDGYFKIYSKHTPINLVRDLPQGFSALEPLVDLPIGINITRFQTLLALHRSYLTPGDSSSGWTAGAAAYYVGYLQPRTFLLKYNENGTITDAVDCALDPLSETKCTLKSFTVEKGIYQTSNFRVQPTESIVRFPNITNLCPFGEVFNATRFASVYAWNRKRISNCVADYSVLYNSASFSTFKCYGVSPTKLNDLCFTNVYADSFVIRGDEVRQIAPGQTGKIADYNYKLPDDFTGCVIAWNSNNLDSKVGGNYNYLYRLFRKSNLKPFERDISTEIYQAGSTPCNGVEGFNCYFPLQSYGFQPTNGVGYQPYRVVVLSFELLHAPATVCGPKKSTNLVKNKCVNFNFNGLTGTGVLTESNKKFLPFQQFGRDIADTTDAVRDPQTLEILDITPCSFGGVSVITPGTNTSNQVAVLYQGVNCTEVPVAIHADQLTPTWRVYSTGSNVFQTRAGCLIGAEHVNNSYECDIPIGAGICASYQTQTNSPRRARSVASQSIIAYTMSLGAENSVAYSNNSIAIPTNFTISVTTEILPVSMTKTSVDCTMYICGDSTECSNLLLQYGSFCTQLNRALTGIAVEQDKNTQEVFAQVKQIYKTPPIKDFGGFNFSQILPDPSKPSKRSFIEDLLFNKVTLADAGFIKQYGDCLGDIAARDLICAQKFNGLTVLPPLLTDEMIAQYTSALLAGTITSGWTFCAGAALQIPFAMQMAYRFNGIGVTQNVLYENQKLIANQFNSAIGKIQDSLFSTASALGKLQDVVNQNAQALNTLVKQLSSNFGAISSVLNDILSRLDKVEAEVQIDRLITGRLQSLQTYVTQQLIRAAEIRASANLAATKMSECVCGQSKRVDFCGKGYHLMSFPQSAPHGVVFLHVTYVPAQEKNFTTAPAICHDGKAHFPREGVFVSNGTHWFVTQRNFYEPQIITTDNTFVSGNCDVVIGIVNNTVYDPLQPELDSFKEELDKYFKNHTSPDVDLGDISGINASVVNIQKEIDRLNEVAKNLNESLIDLQELGKYEQYIKGGGSGGGQIYEGKLTAEGLRFGIVASRFNHALVDRLVEGAIDAIVRHGGREEDITLVRVPGSWEIPVAAGELARKEDIDAVIAIGVLIRGATPHFDYIASEVSKGLADLSLELRKPITFGVITADTLEQAIERAGTKHGNKGWEAALSAIEMANLFKSLR

SEQ ID NO: 4192 - protein, 1371 aa, Artificial Sequence
  SARS-CoV-2/Finland/FIN-313/2020__EPI_ISL_414641 spike protein (1-1211)(G889C_L1034C) LumSynth construct
MFVFLVLLPLVSSQCVNLTTRTQLPPAYTNSFTRGVYYPDKVFRSSVLHSTQDLFLPFFSNVTWFHAIHVSGTNGTKRFDNPVLPFNDGVYFASTEKSNIIRGWIFGTTLDSKTQSLLIVNNATNVVIKVCEFQFCNDPFLGVYYHKNNKSWMESEFRVYSSANNCTFEYVSQPFLMDLEGKQGNFKNLREFVFKNIDGYFKIYSKHTPINLVRDLPQGFSALEPLVDLPIGINITRFKTLLALHRSYLTPGDSSSGWTAGAAAYYVGYLQPRTFLLKYNENGTITDAVDCALDPLSETKCTLKSFTVEKGIYQTSNFRVQPTESIVRFPNITNLCPFGEVFNATRFASVYAWNRKRISNCVADYSVLYNSASFSTFKCYGVSPTKLNDLCFTNVYADSFVIRGDEVRQIAPGQTGKIADYNYKLPDDFTGCVIAWNSNNLDSKVGGNYNYLYRLFRKSNLKPFERDISTEIYQAGSTPCNGVEGFNCYFPLQSYGFQPTNGVGYQPYRVVVLSFELLHAPATVCGPKKSTNLVKNKCVNFNFNGLTGTGVLTESNKKFLPFQQFGRDIADTTDAVRDPQTLEILDITPCSFGGVSVITPGTNTSNQVAVLYQGVNCTEVPVAIHADQLTPTWRVYSTGSNVFQTRAGCLIGAEHVNNSYECDIPIGAGICASYQTQTNSPRRARSVASQSIIAYTMSLGAENSVAYSNNSIAIPTNFTISVTTEILPVSMTKTSVDCTMYICGDSTECSNLLLQYGSFCTQLNRALTGIAVEQDKNTQEVFAQVKQIYKTPPIKDFGGFNFSQILPDPSKPSKRSFIEDLLFNKVTLADAGFIKQYGDCLGDIAARDLICAQKFNGLTVLPPLLTDEMIAQYTSALLAGTITSGWTFCAGAALQIPFAMQMAYRFNGIGVTQNVLYENQKLIANQFNSAIGKIQDSLSSTASALGKLQDVVNQNAQALNTLVKQLSSNFGAISSVLNDILSRLDKVEAEVQIDRLITGRLQSLQTYVTQQLIRAAEIRASANLAATKMSECVCGQSKRVDFCGKGYHLMSFPQSAPHGVVFLHVTYVPAQEKNFTTAPAICHDGKAHFPREGVFVSNGTHWFVTQRNFYEPQIITTDNTFVSGNCDVVIGIVNNTVYDPLQPELDSFKEELDKYFKNHTSPDVDLGDISGINASVVNIQKEIDRLNEVAKNLNESLIDLQELGKYEQYIKGGGSGGGQIYEGKLTAEGLRFGIVASRFNHALVDRLVEGAIDAIVRHGGREEDITLVRVPGSWEIPVAAGELARKEDIDAVIAIGVLIRGATPHFDYIASEVSKGLADLSLELRKPITFGVITADTLEQAIERAGTKHGNKGWEAALSAIEMANLFKSLR

SEQ ID NO: 4193 - protein, 1371 aa, Artificial Sequence
  SARS-CoV-2/Netherlands/ZuidHolland_2/2020__EPI_ISL_414556 spike protein (1-1211)(G889C_L1034C) LumSynth construct
MFVFLVLLPLVSSQCVNLTTRTQLPPAYTNSFTRGVYYPDKVFRSSVLHSTQDLFLPFFSNVTWFHAIHVSGTNGTKRFDNPVLPFNDGVYFASTEKSNIIRGWIFGTTLDSKTQSLLIVNNATNVVIKVCEFQFCNDPFLGVYYHKNNKSWMESEFRVYSSANNCTFEYVSQPFLMDLEGKQGNFKNLREFVFKNIDGYFKIYSKHTPINLVRDLPQGFSALEPLVDLPIGINITRFQTLLALHRSYLTPGDSSSGWTAGAAAYYVGYLQPRTFLLKYNENGTITDAVDCALDPLSETKCTLKSFTVEKGIYQTSNFRVQPTESIVRFPNITNLCPFGEVFNATRFASVYAWNRKRISNCVADYSVLYNSASFSTFKCYGVSPTKLNDLCFTNVYADSFVIRGDEVRQIAPGQTGKIADYNYKLPDDFTGCVIAWNSNNLDSKVGGNYNYLYRLFRKSNLKPFERDISTEIYQAGSTPCNGVEGFNCYFPLQSYGFQPTNGVGYQPYRVVVLSFELLHAPATVCGPKKSTNLVKNKCVNFNFNGLTGTGVLTESNKKFLPFQQFGRDIADTTDAVRDPQTLEILDITPCSFGGVSVITPGTNTSNQVAVLYQGVNCTEVPVAIHADQLTPTWRVYSTGSNVFQTRAGCLIGAEHVNNSYECDIPIGAGICASYQTQTNSPRRARSVASQSIIAYTMSLGAENSVAYSNNSIAIPTNFTISVTTEILPVSMTKTSVDCTMYICGDSTECSNLLLQYGSFCTQLNRALTGIALEQDKNTQEVFAQVKQIYKTPPIKDFGGFNFSQILPDPSKPSKRSFIEDLLFNKVTLADAGFIKQYGDCLGDIAARDLICAQKFNGLTVLPPLLTDEMIAQYTSALLAGTITSGWTFCAGAALQIPFAMQMAYRFNGIGVTQNVLYENQKLIANQFNSAIGKIQDSLSSTASALGKLQDVVNQNAQALNTLVKQLSSNFGAISSVLNDILSRLDKVEAEVQIDRLITGRLQSLQTYVTQQLIRAAEIRASANLAATKMSECVCGQSKRVDFCGKGYHLMSFPQSAPHGVVFLHVTYVPAQEKNFTTAPAICHDGKAHFPREGVFVSNGTHWFVTQRNFYEPQIITTDNTFVSGNCDVVIGIVNNTVYDPLQPELDSFKEELDKYFKNHTSPDVDLGDISGINASVVNIQKEIDRLNEVAKNLNESLIDLQELGKYEQYIKGGGSGGGQIYEGKLTAEGLRFGIVASRFNHALVDRLVEGAIDAIVRHGGREEDITLVRVPGSWEIPVAAGELARKEDIDAVIAIGVLIRGATPHFDYIASEVSKGLADLSLELRKPITFGVITADTLEQAIERAGTKHGNKGWEAALSAIEMANLFKSLR

SEQ ID NO: 4194 - protein, 1371 aa, Artificial Sequence
  SARS-CoV-2/USA/WA-UW31/2020__EPI_ISL_414618 spike protein (1-1211)(G889C_L1034C) LumSynth construct
MFVFLVLLPLVSSQCVNLTTRTQLPPAYTNSFTRGVYYPDKVFRSSVLHSTQDLFLPFFSNVTWFHAIHVSGTNGTKRFDNPVLPFNDGVYFASTEKSNIIRGWIFGTTLDSKTQSLLIVNNATNVVIKVCEFQFCNDPFLGVYYHKNNKSWMESEFRVYSSANNCTFEYVSQPFLMDLEGKQGNFKNLREFVFKNIDGYFKIYSKHTPINLVRDLPQGFSALEPLVDLPIGINITRFQTLLALHRSYLTPGDSSSGWTAGAAAYYVGYLQPRTFLLKYNENGTITDAVDCALDPLSETKCTLKSFTVEKGIYQTSNFRVQPTESIVRFPNITNLCPFGEVFNATRFASVYAWNRKRISNCVADYSVLYNSASFSTFKCYGVSPTKLNDLCFTNVYADSFVIRGDEVRQIAPGQTGKIADYNYKLPDDFTGCVIAWNSNNLDSKVGGNYNYLYRLFRKSNLKPFERDISTEIYQAGSTPCNGAEGFNCYFPLQSYGFQPTNGVGYQPYRVVVLSFELLHAPATVCGPKKSTNLVKNKCVNFNFNGLTGTGVLTESNKKFLPFQQFGRDIADTTDAVRDPQTLEILDITPCSFGGVSVITPGTNTSNQVAVLYQDVNCTEVPVAIHADQLTPTWRVYSTGSNVFQTRAGCLIGAEHVNNSYECDIPIGAGICASYQTQTNSPRRARSVASQSIIAYTMSLGAENSVAYSNNSIAIPTNFTISVTTEILPVSMTKTSVDCTMYICGDSTECSNLLLQYGSFCTQLNRALTGIAVEQDKNTQEVFAQVKQIYKTPPIKDFGGFNFSQILPDPSKPSKRSFIEDLLFNKVTLADAGFIKQYGDCLGDIAARDLICAQKFNGLTVLPPLLTDEMIAQYTSALLAGTITSGWTFCAGAALQIPFAMQMAYRFNGIGVTQNVLYENQKLIANQFNSAIGKIQDSLSSTASALGKLQDVVNQNAQALNTLVKQLSSNFGAISSVLNDILSRLDKVEAEVQIDRLITGRLQSLQTYVTQQLIRAAEIRASANLAATKMSECVCGQSKRVDFCGKGYHLMSFPQSAPHGVVFLHVTYVPAQEKNFTTAPAICHDGKAHFPREGVFVSNGTHWFVTQRNFYEPQIITTDNTFVSGNCDVVIGIVNNTVYDPLQPELDSFKEELDKYFKNHTSPDVDLGDISGINASVVNIQKEIDRLNEVAKNLNESLIDLQELGKYEQYIKGGGSGGGQIYEGKLTAEGLRFGIVASRFNHALVDRLVEGAIDAIVRHGGREEDITLVRVPGSWEIPVAAGELARKEDIDAVIAIGVLIRGATPHFDYIASEVSKGLADLSLELRKPITFGVITADTLEQAIERAGTKHGNKGWEAALSAIEMANLFKSLR

SEQ ID NO: 4195 - protein, 1371 aa, Artificial Sequence
  SARS-CoV-2/South Korea/SNU01/2020__EPI_ISL_411929 spike protein (1-1211)(G889C_L1034C) LumSynth construct
MFVFLVLLPLVSSQCVNLTTRTQLPPAYTNSFTRGVYYPDKVFRSSVLHSTQDLFLPFFSNVTWFHAIHVSGTNGTKRFDNPVLPFNDGVYFASTEKSNIIRGWIFGTTLDSKTQSLLIVNNATNVVIKVCEFQFCNDPFLGVYYHKNNKSWMESEFRVYSSANNCTFEYVSQPFLMDLEGKQGNFKNLREFVFKNIDGYFKIYSKHTPINLVRDLPQGFWALEPLVDLPIGINITRFQTLLALHRSYLTPGDSSSGWTAGAAAYYVGYLQPRTFLLKYNENGTITDAVDCALDPLSETKCTLKSFTVEKGIYQTSNFRVQPTESIVRFPNITNLCPFGEVFNATRFASVYAWNRKRISNCVADYSVLYNSASFSTFKCYGVSPTKLNDLCFTNVYADSFVIRGDEVRQIAPGQTGKIADYNYKLPDDFTGCVIAWNSNNLDSKVGGNYNYLYRLFRKSNLKPFERDISTEIYQAGSTPCNGVEGFNCYFPLQSYGFQPTNGVGYQPYRVVVLSFELLHAPATVCGPKKSTNLVKNKCVNFNFNGLTGTGVLTESNKKFLPFQQFGRDIADTTDAVRDPQTLEILDITPCSFGGVSVITPGTNTSNQVAVLYQDVNCTEVPVAIHADQLTPTWRVYSTGSNVFQTRAGCLIGAEHVNNSYECDIPIGAGICASYQTQTNSPRRARSVASQSIIAYTMSLGAENSVAYSNNSIAIPTNFTISVTTEILPVSMTKTSVDCTMYICGDSTECSNLLLQYGSFCTQLNRALTGIAVEQDKNTQEVFAQVKQIYKTPPIKDFGGFNFSQILPDPSKPSKRSFIEDLLFNKVTLADAGFIKQYGDCLGDIAARDLICAQKFNGLTVLPPLLTDEMIAQYTSALLAGTITSGWTFCAGAALQIPFAMQMAYRFNGIGVTQNVLYENQKLIANQFNSAIGKIQDSLSSTASALGKLQDVVNQNAQALNTLVKQLSSNFGAISSVLNDILSRLDKVEAEVQIDRLITGRLQSLQTYVTQQLIRAAEIRASANLAATKMSECVCGQSKRVDFCGKGYHLMSFPQSAPHGVVFLHVTYVPAQEKNFTTAPAICHDGKAHFPREGVFVSNGTHWFVTQRNFYEPQIITTDNTFVSGNCDVVIGIVNNTVYDPLQPELDSFKEELDKYFKNHTSPDVDLGDISGINASVVNIQKEIDRLNEVAKNLNESLIDLQELGKYEQYIKGGGSGGGQIYEGKLTAEGLRFGIVASRFNHALVDRLVEGAIDAIVRHGGREEDITLVRVPGSWEIPVAAGELARKEDIDAVIAIGVLIRGATPHFDYIASEVSKGLADLSLELRKPITFGVITADTLEQAIERAGTKHGNKGWEAALSAIEMANLFKSLR

SEQ ID NO: 4196 - protein, 1371 aa, Artificial Sequence
  SARS-CoV-2/China/WF0004/2020__EPI_ISL_413694 spike protein (1-1211)(G889C_L1034C) LumSynth construct
MFVFLVLLPLVSSQCVNLTTRTQLPPAYTNSFTRGVYYPDKVFRSSVLHSTQDLFLPFFSNVTWFHAIHVSGTNGTKRFDNPVLPFNDGVYFASTEKSNIIRGWIFGTTLDSKTQSLLIVNNATNVVIKVCEFQFCNDPFLGVYYHKNNKSWTESEFRVYSSANNCTFEYVSQPFLMDLEGKQGNFKNLREFVFKNIDGYFKIYSKHTPINLVRDLPQGFSALEPLVDLPIGINITRFQTLLALHRSYLTPGDSSSGWTAGAAAYYVGYLQPRTFLLKYNENGTITDAVDCALDPLSETKCTLKSFTVEKGIYQTSNFRVQPTESIVRFPNITNLCPFGEVFNATRFASVYAWNRKRISNCVADYSVLYNSASFSTFKCYGVSPTKLNDLCFTNVYADSFVIRGDEVRQIAPGQTGKIADYNYKLPDDFTGCVIAWNSNNLDSKVGGNYNYLYRLFRKSNLKPFERDISTEIYQAGSTPCNGVEGFNCYFPLQSYGFQPTNGVGYQPYRVVVLSFELLHAPATVCGPKKSTNLVKNKCVNFNFNGLTGTGVLTESNKKFLPFQQFGRDIADTTDAVRDPQTLEILDITPCSFGGVSVITPGTNTSNQVAVLYQDVNCTEVPVAIHADQLTPTWRVYSTGSNVFQTRAGCLIGAEHVNNSYECDIPIGAGICASYQTQTNSPRRARSVASQSIIAYTMSLGAENSVAYSNNSIAIPTNFTISVTTEILPVSMTKTSVDCTMYICGDSTECSNLLLQYGSFCTQLNRALTGIAVEQDKNTQEVFAQVKQIYKTPPIKDFGGFNFSQILPDPSKPSKRSFIEDLLFNKVTLADAGFIKQYGDCLGDIAARDLICAQKFNGLTVLPPLLTDEMIAQYTSALLAGTITSGWTFCAGAALQIPFAMQMAYRFNGIGVTQNVLYENQKLIANQFNSAIGKIQDSLSSTASALGKLQDVVNQNAQALNTLVKQLSSNFGAISSVLNDILSRLDKVEAEVQIDRLITGRLQSLQTYVTQQLIRAAEIRASANLAATKMSECVCGQSKRFDFCGKGYHLMSFPQSAPHGVVFLHVTYVPAQEKNFTTAPAICHDGKAHFPREGVFVSNGTHWFVTQRNFYEPQIITTDNTFVSGNCDVVIGIVNNTVYDPLQPELDSFKEELDKYFKNHTSPDVDLGDISGINASVVNIQKEIDRLNEVAKNLNESLIDLQELGKYEQYIKGGGSGGGQIYEGKLTAEGLRFGIVASRFNHALVDRLVEGAIDAIVRHGGREEDITLVRVPGSWEIPVAAGELARKEDIDAVIAIGVLIRGATPHFDYIASEVSKGLADLSLELRKPITFGVITADTLEQAIERAGTKHGNKGWEAALSAIEMANLFKSLR

SEQ ID NO: 4197 - protein, 1371 aa, Artificial Sequence
  SARS-CoV-2/China/WF0028/2020__EPI_ISL_413791 spike protein (1-1211)(G889C_L1034C) LumSynth construct
MFVFLVLLPLVSSQCVNLTTRTQLPPAYTNSFTRGVYYPDKVFRSSVLHSTQDLFLPFFSNVTWFHAIHVSGTNGTKRFDNPVLPFNDGVYFASTEKSNIIRGWIFGTTLDSKTQSLLIVNNATNVVIKVCEFQFCNDPFLGVYYHKNNKSWMESEFRVYSSANNCTFEYVSQPFLMDLEGKQGNFKNLREFVFKNIDGYFKIYSKHTPINLVRDLPQGFSALEPLVDLPIGINITRFQTLLALHRSYLTPGDSSSGWTAGAAAYYVGYLQPRTFLLKYNENGTITDAVDCALDPLSETKCTLKSFTVEKGIYQTSNFRVQPTESIVRFPNITNLCPFGEVFNATRFASVYAWNRKRISNCVADYSVLYNSASFSTFKCYGVSPTKLNDLCFTNVYADSFVIRGDEVRQIAPGQTGKIADYNYKLPDDFTGCVIAWNSNNLDSKVGGNYNYLYRLFRKSNLKPFERDISTEIYQAGSTPCNGVEGFNCYFPLQSYGFQPTNGVGYQPYRVVVLSFELLHAPATVCGPKKSTNLVKNKCVNFNFNGLTGTGVLTESNKKFLPFQQFGRDIADTTDAVRDPQTLEILDITPCSFGGVSVITPGTNTSNQVAVLYQDVNCTEVPVAIHADQLTPTWRVYSTGSNVFQTRAGCLIGAEHVNNSYECDIPIGAGICASYQTQTNSPRRARSVASQSIIAYTMSLGAENSVAYSNNSIAIPTNFTISVTTEILPVSMTKTSVDCTMYICGDSTECSNLLLQYGSFCTQLNRALTGIAVEQDKNTQEVFAQVKQIYKTPPIKDFGGFNFSQILPDPSKPSKRSFIEDLLFNKVTLADAGFIKQYGDCLGDIAARDLICAQKFNGLTVLPPLLTDEMIAQYTSALLAGTITSGWTFCAGAALQIPFAMQMAYRFNGIGVTQNVLYENQKLIANQFNSAIGKIQDSLSSTASALGKLQDVVNQNAQALNTLVKQLSSNFGAISSVLNDILSRLDKVEAEVQIDRLITGRLQSLQTYVTQQLIRAAEIRASANLAATKMSECVCGQSKRVDFCGKGYHLMSFPQSAPHGVVFLHVTYVPAQEKNFTTAPAICHDGKAHFPREGVFVSNGTHWFVTQRNFYEPQIITTDNTFVSGNCDVVIGIVNNTVYDPLQPELESFKEELDKYFKNHTSPDVDLGDISGINASVVNIQKEIDRLNEVAKNLNESLIDLQELGKYEQYIKGGGSGGGQIYEGKLTAEGLRFGIVASRFNHALVDRLVEGAIDAIVRHGGREEDITLVRVPGSWEIPVAAGELARKEDIDAVIAIGVLIRGATPHFDYIASEVSKGLADLSLELRKPITFGVITADTLEQAIERAGTKHGNKGWEAALSAIEMANLFKSLR

SEQ ID NO: 4198 - protein, 1371 aa, Artificial Sequence
  SARS-CoV-2/2019-nCoV/USA-CruiseA-18/2020__MT159716.1 spike protein (1-1211)(G889C_L1034C) LumSynth construct
MFVFLVLLPLVSSQCVNLTTRTQLPPAYTNSFTRGVYYPDKVFRSSVLHSTQDLFLPFFSNVTWFHAIHVSGTNGTKRFDNPVLPFNDGVYFASTEKSNIIRGWIFGTTLDSKTQSLLIVNNATNVVIKVCEFQFCNDPFLGVYYHKNNKSWMESELRVYSSANNCTFEYVSQPFLMDLEGKQGNFKNLREFVFKNIDGYFKIYSKHTPINLVRDLPQGFSALEPLVDLPIGINITRFQTLLALHRSYLTPGDSSSGWTAGAAAYYVGYLQPRTFLLKYNENGTITDAVDCALDPLSETKCTLKSFTVEKGIYQTSNFRVQPTESIVRFPNITNLCPFGEVFNATRFASVYAWNRKRISNCVADYSVLYNSASFSTFKCYGVSPTKLNDLCFTNVYADSFVIRGDEVRQIAPGQTGKIADYNYKLPDDFTGCVIAWNSNNLDSKVGGNYNYLYRLFRKSNLKPFERDISTEIYQAGSTPCNGVEGFNCYFPLQSYGFQPTNGVGYQPYRVVVLSFELLHAPATVCGPKKSTNLVKNKCVNFNFNGLTGTGVLTESNKKFLPFQQFGRDIADTTDAVRDPQTLEILDITPCSFGGVSVITPGTNTSNQVAVLYQDVNCTEVPVAIHADQLTPTWRVYSTGSNVFQTRAGCLIGAEHVNNSYECDIPIGAGICASYQTQTNSPRRARSVASQSIIAYTMSLGAENSVAYSNNSIAIPTNFTISVTTEILPVSMTKTSVDCTMYICGDSTECSNLLLQYGSFCTQLNRALTGIAVEQDKNTQEVFAQVKQIYKTPPIKDFGGFNFSQILPDPSKPSKRSFIEDLLFNKVTLADAGFIKQYGDCLGDIAARDLICAQKFNGLTVLPPLLTDEMIAQYTSALLAGTITSGWTFCAGAALQIPFAMQMAYRFNGIGVTQNVLYENQKLIANQFNSAIGKIQDSLSSTASALGKLQDVVNQNAQALNTLVKQLSSNFGAISSVLNDILSRLDKVEAEVQIDRLITGRLQSLQTYVTQQLIRAAEIRASANLAATKMSECVCGQSKRVDFCGKGYHLMSFPQSAPHGVVFLHVTYVPAQEKNFTTAPAICHDGKAHFPREGVFVSNGTHWFVTQRNFYEPQIITTDNTFVSGNCDVVIGIVNNTVYDPLQPELDSFKEELDKYFKNHTSPDVDLGDISGINASVVNIQKEIDRLNEVAKNLNESLIDLQELGKYEQYIKGGGSGGGQIYEGKLTAEGLRFGIVASRFNHALVDRLVEGAIDAIVRHGGREEDITLVRVPGSWEIPVAAGELARKEDIDAVIAIGVLIRGATPHFDYIASEVSKGLADLSLELRKPITFGVITADTLEQAIERAGTKHGNKGWEAALSAIEMANLFKSLR

SEQ ID NO: 4199 - protein, 1371 aa, Artificial Sequence
  SARS-CoV-2/SARS-CoV-2/Yunnan-01/human/2020/CHN__MT049951.1 spike protein (1-1211)(G889C_L1034C) LumSynth construct
MFVFLVLLPLVSSQCVNLTTRTQLPPANTNSFTRGVYYPDKVFRSSVLHSTQDLFLPFFSNVTWFHAIHVSGTNGTKRFDNPVLPFNDGVYFASTEKSNIIRGWIFGTTLDSKTQSLLIVNNATNVVIKVCEFQFCNDPFLGVYYHKNNKSWMESEFRVYSSANNCTFEYVSQPFLMDLEGKQGNFKNLREFVFKNIDGYFKIYSKHTPINLVRDLPQGFSALEPLVDLPIGINITRFQTLLALHRSYLTPGDSSSGWTAGAAAYYVGYLQPRTFLLKYNENGTITDAVDCALDPLSETKCTLKSFTVEKGIYQTSNFRVQPTESIVRFPNITNLCPFGEVFNATRFASVYAWNRKRISNCVADYSVLYNSASFSTFKCYGVSPTKLNDLCFTNVYADSFVIRGDEVRQIAPGQTGKIADYNYKLPDDFTGCVIAWNSNNLDSKVGGNYNYLYRLFRKSNLKPFERDISTEIYQAGSTPCNGVEGFNCYFPLQSYGFQPTNGVGYQPYRVVVLSFELLHAPATVCGPKKSTNLVKNKCVNFNFNGLTGTGVLTESNKKFLPFQQFGRDIADTTDAVRDPQTLEILDITPCSFGGVSVITPGTNTSNQVAVLYQDVNCTEVPVAIHADQLTPTWRVYSTGSNVFQTRAGCLIGAEHVNNSYECDIPIGAGICASYQTQTNSPRRARSVASQSIIAYTMSLGAENSVAYSNNSIAIPTNFTISVTTEILPVSMTKTSVDCTMYICGDSTECSNLLLQYGSFCTQLNRALTGIAVEQDKNTQEVFAQVKQIYKTPPIKDFGGFNFSQILPDPSKPSKRSFIEDLLFNKVTLADAGFIKQYGDCLGDIAARDLICAQKFNGLTVLPPLLTDEMIAQYTSALLAGTITSGWTFCAGAALQIPFAMQMAYRFNGIGVTQNVLYENQKLIANQFNSAIGKIQDSLSSTASALGKLQDVVNQNAQALNTLVKQLSSNFGAISSVLNDILSRLDKVEAEVQIDRLITGRLQSLQTYVTQQLIRAAEIRASANLAATKMSECVCGQSKRVDFCGKGYHLMSFPQSAPHGVVFLHVTYVPAQEKNFTTAPAICHDGKAHFPREGVFVSNGTHWFVTQRNFYEPQIITTDNTFVSGNCDVVIGIVNNTVYDPLQPELDSFKEELDKYFKNHTSPDVDLGDISGINASVVNIQKEIDRLNEVAKNLNESLIDLQELGKYEQYIKGGGSGGGQIYEGKLTAEGLRFGIVASRFNHALVDRLVEGAIDAIVRHGGREEDITLVRVPGSWEIPVAAGELARKEDIDAVIAIGVLIRGATPHFDYIASEVSKGLADLSLELRKPITFGVITADTLEQAIERAGTKHGNKGWEAALSAIEMANLFKSLR

SEQ ID NO: 4200 - protein, 1371 aa, Artificial Sequence
  SARS-CoV-2/USA/WA-UW292/2020__EPI_ISL_418077 spike protein (1-1211)(G889C_L1034C) LumSynth construct
MFVFLVLLPLVSSQCVNLTTRTQLPPAYTNSFTRGVYYPDKVFRSSVLHSTQDLFLPFFSNVTWFHAIHVSGTNGTKRFDNPVLPFNDGVYFASTEKSNIIRGWIFGTTLDSKTQSLLIVNNATNVVIKVCEFQFCNDPFLGVYYHKNNKSWMESEFRVYSSANNCTFEYVSQPFLMDLEGKQGNFKNLREFVFKNIDGYFKIYSKHTPINLVRDLPQGFSALEPLVDLPIGINITRFQTLLALHRSYLTPGDSSSGWTAGAAAYYVGYLQPRTFLLKYNENGTITDAVDCALDPLSETKCTLKSFTVEKGIYQTSNFRVQPTESIVRFPNITNLCPFGEVFNATRFASVYAWNRKRISNCVADYSVLYNSASFSTFKCYGVSPTKLNDLCFTNVYADSFVIRGDEVRQIAPGQTGKIADYNYKLPDDFTGCVIAWNSNNLDSKVGGNYNYLYRLFRKSNLKPFERDISTEIYQASSTPCNGVEGFNCYFPLQSYGFQPTNGVGYQPYRVVVLSFELLHAPATVCGPKKSTNLVKNKCVNFNFNGLTGTGVLTESNKKFLPFQQFGRDIADTTDAVRDPQTLEILDITPCSFGGVSVITPGTNTSNQVAVLYQDVNCTEVPVAIHADQLTPTWRVYSTGSNVFQTRAGCLIGAEHVNNSYECDIPIGAGICASYQTQTNSPRRARSVASQSIIAYTMSLGAENSVAYSNNSIAIPTNFTISVTTEILPVSMTKTSVDCTMYICGDSTECSNLLLQYGSFCTQLNRALTGIAVEQDKNTQEVFAQVKQIYKTPPIKDFGGFNFSQILPDPSKPSKRSFIEDLLFNKVTLADAGFIKQYGDCLGDIAARDLICAQKFNGLTVLPPLLTDEMIAQYTSALLAGTITSGWTFCAGAALQIPFAMQMAYRFNGIGVTQNVLYENQKLIANQFNSAIGKIQDSLSSTASALGKLQDVVNQNAQALNTLVKQLSSNFGAISSVLNDILSRLDKVEAEVQIDRLITGRLQSLQTYVTQQLIRAAEIRASANLAATKMSECVCGQSKRVDFCGKGYHLMSFPQSAPHGVVFLHVTYVPAQEKNFTTAPAICHDGKAHFPREGVFVSNGTHWFVTQRNFYEPQIITTDNTFVSGNCDVVIGIVNNTVYDPLQPELDSFKEELDKYFKNHTSPDVDLGDISGINASVVNIQKEIDRLNEVAKNLNESLIDLQELGKYEQYIKGGGSGGGQIYEGKLTAEGLRFGIVASRFNHALVDRLVEGAIDAIVRHGGREEDITLVRVPGSWEIPVAAGELARKEDIDAVIAIGVLIRGATPHFDYIASEVSKGLADLSLELRKPITFGVITADTLEQAIERAGTKHGNKGWEAALSAIEMANLFKSLR

SEQ ID NO: 4201 - protein, 1371 aa, Artificial Sequence
  SARS-CoV-2/Iceland/192/2020__EPI_ISL_417819 spike protein (1-1211)(G889C_L1034C) LumSynth construct
MFVFFVLLPLVSSQCVNLTTRTQLPPAYTNSFTRGVYYPDKVFRSSVLHSTQDLFLPFFSNVTWFHAIHVSGTNGTKRFDNPVLPFNDGVYFASTEKSNIIRGWIFGTTLDSKTQSLLIVNNATNVVIKVCEFQFCNDPFLGVYYHKNNKSWMESEFRVYSSANNCTFEYVSQPFLMDLEGKQGNFKNLREFVFKNIDGYFKIYSKHTPINLVRDLPQGFSALEPLVDLPIGINITRFQTLLALHRSYLTPGDSSSGWTAGAAAYYVGYLQPRTFLLKYNENGTITDAVDCALDPLSETKCTLKSFTVEKGIYQTSNFRVQPTESIVRFPNITNLCPFGEVFNATRFASVYAWNRKRISNCVADYSVLYNSASFSTFKCYGVSPTKLNDLCFTNVYADSFVIRGDEVRQIAPGQTGKIADYNYKLPDDFTGCVIAWNSNNLDSKVGGNYNYLYRLFRKSNLKPFERDISTEIYQAGSTPCNGVEGFNCYFPLQSYGFQPTNGVGYQPYRVVVLSFELLHAPATVCGPKKSTNLVKNKCVNFNFNGLTGTGVLTESNKKFLPFQQFGRDIADTTDAVRDPQTLEILDITPCSFGGVSVITPGTNTSNQVAVLYQGVNCTEVPVAIHADQLTPTWRVYSTGSNVFQTRAGCLIGAEHVNNSYECDIPIGAGICASYQTQTNSPRRARSVASQSIIAYTMSLGAENSVAYSNNSIAIPTNFTISVTTEILPVSMTKTSVDCTMYICGDSTECSNLLLQYGSFCTQLNRALTGIAVEQDKNTQEVFAQVKQIYKTPPIKDFGGFNFSQILPDPSKPSKRSFIEDLLFNKVTLADAGFIKQYGDCLGDIAARDLICAQKFNGLTVLPPLLTDEMIAQYTSALLAGTITSGWTFCAGAALQIPFAMQMAYRFNGIGVTQNVLYENQKLIANQFNSAIGKIQDSLSSTASALGKLQDVVNQNAQALNTLVKQLSSNFGAISSVLNDILSRLDKVEAEVQIDRLITGRLQSLQTYVTQQLIRAAEIRASANLAATKMSECVCGQSKRVDFCGKGYHLMSFPQSAPHGVVFLHVTYVPAQEKNFTTAPAICHDGKAHFPREGVFVSNGTHWFVTQRNFYEPQIITTDNTFVSGNCDVVIGIVNNTVYDPLQPELDSFKEELDKYFKNHTSPDVDLGDISGINASVVNIQKEIDRLNEVAKNLNESLIDLQELGKYEQYIKGGGSGGGQIYEGKLTAEGLRFGIVASRFNHALVDRLVEGAIDAIVRHGGREEDITLVRVPGSWEIPVAAGELARKEDIDAVIAIGVLIRGATPHFDYIASEVSKGLADLSLELRKPITFGVITADTLEQAIERAGTKHGNKGWEAALSAIEMANLFKSLR

SEQ ID NO: 4202 - protein, 1371 aa, Artificial Sequence
  SARS-CoV-2/Belgium/ULG-6939/2020__EPI_ISL_417020 spike protein (1-1211)(G889C_L1034C) LumSynth construct
MFVFLVLLPLVSSQCVNLTTRTQLPPAYTNSFTRGVYYPDKVFRSSVLHSTQDLFLPFFSNVTWFHAIHVSGTNGTKRFDNPVLPFNDGVYFASTEKSNIIRGWIFGTTLDSKTQSLLIVNNATNVVIKVCEFQFCNDPFLGVYYHKNNKSWMESEFRVYSSANNCTFEYVSQPFLMDLEGKQGNFKNLREFVFKNIDGYFKIYSKHTPINLVRDLPQGFSALEPLVDLPIGINITRFQTLLALHRSYLTPGDSSSGWTAGAAAYYVGYLQPRTFLLKYNENGTITDAVDCALDPLSETKCTLKSFTVEKGIYQTSNFRVQPTESIVRFPNITNLCPFGEVFNATRFASVYAWNRKRISNCVADYSVLYNSASFSTFKCYGVSPTKLNDLCFTNVYADSFVIRGDEVRQIAPGQTGKIADYNYKLPDDFTGCVIAWNSNNLDSKVGGNYNYLYRLFRKSNLKPFERDISTEIYQAGSTPCNGVEGFNCYFPLQSYGFQPTNGVGYQPYRVVVLSFELLHAPATVCGPKKSTNLVKNKCVNFNFNGLTGTGVLTESNKKFLPFQQFGRDIADTTDAVRDPQTLEILDITPCSFGGVSVITPGTNTSNQVAVLYQGVNCTEVPVAIHADQLTPTWRVYSTGSNVFQTRAGCLIGAEHVNNSYECDIPIGAGICASYQTQTNSPRRARSVASQSIIAYTMSLGAENSVVYSNNSIAIPTNFTISVTTEILPVSMTKTSVDCTMYICGDSTECSNLLLQYGSFCTQLNRALTGIAVEQDKNTQEVFAQVKQIYKTPPIKDFGGFNFSQILPDPSKPSKRSFIEDLLFNKVTLADAGFIKQYGDCLGDIAARDLICAQKFNGLTVLPPLLTDEMIAQYTSALLAGTITSGWTFCAGAALQIPFAMQMAYRFNGIGVTQNVLYENQKLIANQFNSAIGKIQDSLSSTASALGKLQDVVNQNAQALNTLVKQLSSNFGAISSVLNDILSRLDKVEAEVQIDRLITGRLQSLQTYVTQQLIRAAEIRASANLAATKMSECVCGQSKRVDFCGKGYHLMSFPQSAPHGVVFLHVTYVPAQEKNFTTAPAICHDGKAHFPREGVFVSNGTHWFVTQRNFYEPQIITTDNTFVSGNCDVVIGIVNNTVYDPLQPELDSFKEELDKYFKNHTSPDVDLGDISGINASVVNIQKEIDRLNEVAKNLNESLIDLQELGKYEQYIKGGGSGGGQIYEGKLTAEGLRFGIVASRFNHALVDRLVEGAIDAIVRHGGREEDITLVRVPGSWEIPVAAGELARKEDIDAVIAIGVLIRGATPHFDYIASEVSKGLADLSLELRKPITFGVITADTLEQAIERAGTKHGNKGWEAALSAIEMANLFKSLR

SEQ ID NO: 4203 - protein, 1371 aa, Artificial Sequence
  SARS-CoV-2/France/HF2496/2020__EPI_ISL_418231 spike protein (1-1211)(G889C_L1034C) LumSynth construct
MFVFLVLLPLVSSQCVNLTTRTQLPPAYTNSFTRGVYYPDKVFRSSVLHSTQDLFLPFFSNVTWFHAIHVSGTNGTKRFDNPVLPFNDGVYFASTEKSNIIRGWIFGTTLDSKTQSLLIVNNATNVVIKVCEFQFCNDPFLGVYYHKNNKSWMESEFRVYSSANNCTFEYVSQPFLMDLEGKQGNFKNLREFVFKNIDGYFKIYSKHTPINLVRDLPQGFSALEPLVDLPIGINITRFQTLLALHRSYLTPGDSSSGWTAGAAAYYVGYLQPRTFLLKYNENGTITDAVDCALDPLSETKCTLKSFTVEKGIYQTSNFRVQPTESIVRFPNITNLCPFGEVFNATRFASVYAWNRKRISNCVADYSVLYNSASFSTFKCYGVSPTKLNDLCFTNVYADSFVIRGDEVRQIAPGQTGKIADYNYKLPDDFTGCVIAWNSNNLDSKVGGNYNYLYRLFRKSNLKPFERDISTEIYQAGSTPCNGVEGFNCYFPLQSYGFQPTNGVGYQPYRVVVLSFELLHAPATVCGPKKSTNLVKNKCVNFNFNGLTGTGVLTESNKKFLPFQQFGRDIADTTDAVRDPQTLEILDITPCSFGGVSVITPGTNTSNQVAVLYQGVNCTEVPVAIHADQLTPTWRVYSTGSNVFQTRAGCLIGAEHVNNSYECDIPIGAGICASYQTQTNSPRRARSVASQSIIAYTMSLGAENSVAYSNNSIAIPTNFTISVTTEILPVSMTKTSVDCTMYICGDSTECSNLLLQYGSFCTQLNRALTGIAVEQDKNTQEVFAQVKQIYKTPPIKDFGGFNFSQILPDPSKPSKRSFIEDLLFNKVTLADAGFIKQYGDCLGDIVARDLICAQKFNGLTVLPPLLTDEMIAQYTSALLAGTITSGWTFCAGAALQIPFAMQMAYRFNGIGVTQNVLYENQKLIANQFNSAIGKIQDSLSSTASALGKLQDVVNQNAQALNTLVKQLSSNFGAISSVLNDILSRLDKVEAEVQIDRLITGRLQSLQTYVTQQLIRAAEIRASANLAATKMSECVCGQSKRVDFCGKGYHLMSFPQSAPHGVVFLHVTYVPAQEKNFTTAPAICHDGKAHFPREGVFVSNGTHWFVTQRNFYEPQIITTDNTFVSGNCDVVIGIVNNTVYDPLQPELDSFKEELDKYFKNHTSPDVDLGDISGINASVVNIQKEIDRLNEVAKNLNESLIDLQELGKYEQYIKGGGSGGGQIYEGKLTAEGLRFGIVASRFNHALVDRLVEGAIDAIVRHGGREEDITLVRVPGSWEIPVAAGELARKEDIDAVIAIGVLIRGATPHFDYIASEVSKGLADLSLELRKPITFGVITADTLEQAIERAGTKHGNKGWEAALSAIEMANLFKSLR

SEQ ID NO: 4204 - protein, 1371 aa, Artificial Sequence
  SARS-CoV-2/USA/WA-UW291/2020__EPI_ISL_418076 spike protein (1-1211)(G889C_L1034C) LumSynth construct
MFVFLVLLPLVSSQCVNLTTRTQLPPAYTNSFTRGVYYPDKVFRSSVLHSTQDLFLPFFSNVTWFHAIHVSGTNGTKRFDNPVLPFNDGVYFASTEKSNIIRGWIFGTTLDSKTQSLLIVNNATNVVIKVCEFQFCNDPFLGVYYHKNNKSWMESEFRVYSSANNCTFEYVSQPFLMDLEGKQGNFKNLREFVFKNIDGYFKIYSKHTPINLVRDLPQGFSALEPLVDLPIGINITRFQTLLALHRSYLTPGDSSSGWTAGAAAYYVGYLQPRTFLLKYNENGTITDAVDCALDPLSETKCTLKSFTVEKGIYQTSNFRVQPTESIVRFPNITNLCPFGEVFNATRFASVYAWNRKRISNCVADYSVLYNSASFSTFKCYGVSPTKLNDLCFTNVYADSFVIRGDEVRQIAPGQTGKIADYNYKLPDDFTGCVIAWNSNNLDSKVGGNYNYLYRLFRKSNLKPFERDISTEIYQAGSTPCNGVEGFNCYFPLQSYGFQPTNGVGYQPYRVVVLSFELLHAPATVCGPKKSTNLVKNKCVNFNFNGLTGTGVLTESNKKFLPFQQFGRDIADTTDAVRDPQTLEILDITPCSFGGVSVITPGTNTSNQVAVLYQGVNCTEVPVAIHADQLTPTWRVYSTGSNVFQTRAGCLIGAEHVNNSYECDIPIGAGICASYQTQTNSPRRARSVASQSIIAYTMSLGAENSVAYSNNSIAIPTNFTISVTTEILPVSMTKTSVDCTMYICGDSTECSNLLLQYGSFCTQLNRALTGIAVEQDKNTQEVFAQVKQIYKTPPIKDFGGFNFSQILPDPSKPSKRSFIEDLLFNKVTLADAGFIKQYGDCLGDIAARDLICAQKFNGLTVLPPLLTDEMIAQYTSALLAGTITSGWTFCAGAALQIPFAMQMAYRFNGIGVTQNVLYENQKLIANQFNSAIGKIQYSLSSTASALGKLQDVVNQNAQALNTLVKQLSSNFGAISSVLNDILSRLDKVEAEVQIDRLITGRLQSLQTYVTQQLIRAAEIRASANLAATKMSECVCGQSKRVDFCGKGYHLMSFPQSAPHGVVFLHVTYVPAQEKNFTTAPAICHDGKAHFPREGVFVSNGTHWFVTQRNFYEPQIITTDNTFVSGNCDVVIGIVNNTVYDPLQPELDSFKEELDKYFKNHTSPDVDLGDISGINASVVNIQKEIDRLNEVAKNLNESLIDLQELGKYEQYIKGGGSGGGQIYEGKLTAEGLRFGIVASRFNHALVDRLVEGAIDAIVRHGGREEDITLVRVPGSWEIPVAAGELARKEDIDAVIAIGVLIRGATPHFDYIASEVSKGLADLSLELRKPITFGVITADTLEQAIERAGTKHGNKGWEAALSAIEMANLFKSLR

SEQ ID NO: 4205 - protein, 1371 aa, Artificial Sequence; identical to SEQ ID NO: 4168
  SARS-CoV-2/Portugal/PT0034/2020__EPI_ISL_418019 spike protein (1-1211)(G889C_L1034C) LumSynth construct

SEQ ID NO: 4206 - protein, 1371 aa, Artificial Sequence
  SARS-CoV-2/Iceland/202/2020__EPI_ISL_417750 spike protein (1-1211)(G889C_L1034C) LumSynth construct
MFVFLVLLPLVSSQCVNLTTRTQLPPAYTNSFTRGVYYPDKVFRSSVLHSTQDLFLPFFSNVTWFHAIHVSGTNGTKRFDNPVLPFNDGVYFASTEKSNIIRGWIFGTTLDSKTQSLLIVNNATNVVIKVCEFQFCNDPFLGVYYHKNNKSWMESEFRVYSSANNCTFEYVSQPFLMDLEGKQGNFKNLREFVFKNIDGYFKIYSKHTPINLVRDLPQGFSALEPLVDLPIGINITRFQTLLALHRSYLTPGDSSSGWTAGAAAYYVGYLQPRTFLLKYNENGTITDAVDCALDPLSETKCTLKSFTVEKGIYQTSNFRVQPTESIVRFPNITNLCPFGEVFNATRFASVYAWNRKRISNCVADYSVLYNSASFSTFKCYGVSPTKLNDLCFTNVYADSFVIRGDEVRQIAPGQTGKIADYNYKLPDDFTGCVIAWNSNNLDSKVGGNYNYLYRLFRKSNLKPFERDISTEIYQAGSTPCNGVEGFNCYFPLQSYGFQPTNGVGYQPYRVVVLSFELLHAPATVCGPKKSTNLVKNKCVNFNFNGLTGTGVLTESNKKFLPFQQFGRDIADTTDAVRDPQTLEILDITPCSFGGVSVITPGTNTSNQVAVLYQDVNCTEVPVAIHADQLTPTWRVYSTGSNVFQTRAGCLIGAEHVNNSYECDIPIGAGICASYQTQTNSPRRARSVASQSIIAYTMSLGAENSVAYSNNSIAIPTNFTISVTTEILPVSMTKTSVDCTMYICGDSTECSNLLLQYGSFCTQLNRALTGIAVEQDKNTQEVFAQVKQIYKTPPIKDFGGFNFSQILPDPSKPSKRSFIEDLLFNKVTLADAGFIKQYGDCLGDIAARDLICAQKFNGLTVLPPLLTDEMIAQYTSALLAGTITSGWTFCAGAALQIPFAMQMAYRFNGIGVTQNVLYENQKLIANQFNSAIGKIQDSLSSTASALGKLQDVVNQNAQALNTLVKQLSSNFGAISSVLNDILSRLDKVEAEVQIDRLITGRLQSLQTYVTQQLIRAAEIRASANLAATKMSECVCGQSKRVDFCGKGYHLMSFPQSAPHGVVFLHVTYVPAQEKNFTTAPAICHDGKAHFPREGVFVSNGTHWFVTQRNFYEPQIITTDNTFVSGNCDVVIGIVNNTVYDPLQPELDSFKEELDKYFKNHTSPDVDLGDIPGINASVVNIQKEIDRLNEVAKNLNESLIDLQELGKYEQYIKGGGSGGGQIYEGKLTAEGLRFGIVASRFNHALVDRLVEGAIDAIVRHGGREEDITLVRVPGSWEIPVAAGELARKEDIDAVIAIGVLIRGATPHFDYIASEVSKGLADLSLELRKPITFGVITADTLEQAIERAGTKHGNKGWEAALSAIEMANLFKSLR

SEQ ID NO: 4207 - protein, 1371 aa, Artificial Sequence
  SARS-CoV-2/USA/WA-UW261/2020__EPI_ISL_418046 spike protein (1-1211)(G889C_L1034C) LumSynth construct
MFVFLVLLPLVSSQCVNLTTRTQLPPAYTNSFTRGVYYPDKVFRSSVLHSTQDLFLPFFSNVTWFHAIHVSGTNGTKRFDNPVLPFNDGVYFASTEKSNIIRGWIFGTTLDSKTQSLLIVNNATNVVIKVCEFQFCNDPFLGVYYHKNNKSWMESEFRVYSSANNCTFEYVSQPFLMDLEGKQGNFKNLREFVFKNIDGYFKIYSKHTPINLVRDLPQGFSALEPLVDLPIGINITRFQTLLALHRSYLTPGDSSSGWTAGAAAYYVGYLQPRTFLLKYNENGTITDAVDCALDPLSETKCTLKSFTVEKGIYQTSNFRVQPTESIVRFPNITNLCPFGEVFNATRFTSVYAWNRKRISNCVADYSVLYNSASFSTFKCYGVSPTKLNDLCFTNVYADSFVIRGDEVRQIAPGQTGKIADYNYKLPDDFTGCVIAWNSNNLDSKVGGNYNYLYRLFRKSNLKPFERDISTEIYQAGSTPCNGVEGFNCYFPLQSYGFQPTNGVGYQPYRVVVLSFELLHAPATVCGPKKSTNLVKNKCVNFNFNGLTGTGVLTESNKKFLPFQQFGRDIADTTDAVRDPQTLEILDITPCSFGGVSVITPGTNTSNQVAVLYQDVNCTEVPVAIHADQLTPTWRVYSTGSNVFQTRAGCLIGAEHVNNSYECDIPIGAGICASYQTQTNSPRRARSVASQSIIAYTMSLGAENSVAYSNNSIAIPTNFTISVTTEILPVSMTKTSVDCTMYICGDSTECSNLLLQYGSFCTQLNRALTGIAVEQDKNTQEVFAQVKQIYKTPPIKDFGGFNFSQILPDPSKPSKRSFIEDLLFNKVTLADAGFIKQYGDCLGDIAARDLICAQKFNGLTVLPPLLTDEMIAQYTSALLAGTITSGWTFCAGAALQIPFAMQMAYRFNGIGVTQNVLYENQKLIANQFNSAIGKIQDSLSSTASALGKLQDVVNQNAQALNTLVKQLSSNFGAISSVLNDILSRLDKVEAEVQIDRLITGRLQSLQTYVTQQLIRAAEIRASANLAATKMSECVCGQSKRVDFCGKGYHLMSFPQSAPHGVVFLHVTYVPAQEKNFTTAPAICHDGKAHFPREGVFVSNGTHWFVTQRNFYEPQIITTDNTFVSGNCDVVIGIVNNTVYDPLQPELDSFKEELDKYFKNHTSPDVDLGDISGINASVVNIQKEIDRLNEVAKNLNESLIDLQELGKYEQYIKGGGSGGGQIYEGKLTAEGLRFGIVASRFNHALVDRLVEGAIDAIVRHGGREEDITLVRVPGSWEIPVAAGELARKEDIDAVIAIGVLIRGATPHFDYIASEVSKGLADLSLELRKPITFGVITADTLEQAIERAGTKHGNKGWEAALSAIEMANLFKSLR

SEQ ID NO: 4208 - protein, 1371 aa, Artificial Sequence
  SARS-CoV-2/Portugal/PT0035/2020__EPI_ISL_418020 spike protein (1-1211)(G889C_L1034C) LumSynth construct
MFVFLVLLPLVSSQCVNLTTRTQLPPAYTNSFTRGVYYPDKVFRSSVLHSTQDLFLPFFSNVTWFHAIHVSGTNGTKRFDNPVLPFNDGVYFASTEKSNIIRGWIFGTTLDSKTQSLLIVNNATNVVIKVCEFQFCNDPFLGVYYHKNNKSWMESEFRVYSSANNCTFEYVSQPFLMDLEGKQGNFKNLREFVFKNIDGYFKIYSKHTPINLVRDLPQGFSALEPLVDLPIGINITRFQTLLALHRSYLTPGDSSSGWTAGAAAYYVGYLQPRTFLLKYNENGTITDAVDCALDPLSETKCTLKSFTVEKGIYQTSNFRVQPTESIVRFPNITNLCPFGEVFNATRFASVYAWNRKRISNCVADYSVLYNSASFSTFKCYGVSPTKLNDLCFTNVYADSFVIRGDEVRQIAPGQTGKIADYNYKLPDDFTGCVIAWNSNNLDSKVGGNYNYLYRLFRKSNLKPFERDISTEIYQAGSTPCNGVEGFNCYFPLQSYGFQPTNGVGYQPYRVVVLSFELLHAPATVCGPKKSTNLVKNKCVNFNFNGLTGTGVLTESNKKFLPFQQFGRDIADTTDAVRDPQTLEILDITPCSFGGVSVITPGTNTSNQVAVLYQDVNCTEVPVAIHADQLTPTWRVYSTGSNVFQTRAGCLIGAEHVNNSYECDIPIGAGICASYQTQTNSPRRARSVASQSIIAYTMSLGAENSVAYSNNSIAIPTNFTISVTTEILPVSMTKTSVDCTMYICGDSTECSNLLLQYGSFCTQLNRALTGIAVEQDKNTQEVFAQVKQIYKTPPIKDFGGFNFSQILPDPSKPSKRSFIEDLLFNKVTLADAGFIKQYGDCLGDISARDLICAQKFNGLTVLPPLLTDEMIAQYTSALLAGTITSGWTFCAGAALQIPFAMQMAYRFNGIGVTQNVLYENQKLIANQFNSAIGKIQDSLSSTASALGKLQDVVNQNAQALNTLVKQLSSNFGAISSVLNDILSRLDKVEAEVQIDRLITGRLQSLQTYVTQQLIRAAEIRASANLAATKMSECVCGQSKRVDFCGKGYHLMSFPQSAPHGVVFLHVTYVPAQEKNFTTAPAICHDGKAHFPREGVFVSNGTHWFVTQRNFYEPQIITTDNTFVSGNCDVVIGIVNNTVYDPLQPELDSFKEELDKYFKNHTSPDVDLGDISGINASVVNIQKEIDRLNEVAKNLNESLIDLQELGKYEQYIKGGGSGGGQIYEGKLTAEGLRFGIVASRFNHALVDRLVEGAIDAIVRHGGREEDITLVRVPGSWEIPVAAGELARKEDIDAVIAIGVLIRGATPHFDYIASEVSKGLADLSLELRKPITFGVITADTLEQAIERAGTKHGNKGWEAALSAIEMANLFKSLR

SEQ ID NO: 4209 - protein, 1371 aa, Artificial Sequence
  SARS-CoV-2/USA/NY-NYUMC7/2020__EPI_ISL_418192 spike protein (1-1211)(G889C_L1034C) LumSynth construct
MFVFLVLLPLVSSQCVNLTTRTQLPPAYTNSFTRGVYYPDKVFRSSVLHSTQDLFLPFFSNVTWFHAIHVSGTNGTKRFDNPVLPFNDGVYFASTEKSNIIRGWIFGTTLDSKTQSLLIVNNATNVVIKVCEFQFCNDPFLGVYHHKNNKSWMESEFRVYSSANNCTFEYVSQPFLMDLEGKQGNFKNLREFVFKNIDGYFKIYSKHTPINLVRDLPQGFSALEPLVDLPIGINITRFQTLLALHRSYLTPGDSSSGWTAGAAAYYVGYLQPRTFLLKYNENGTITDAVDCALDPLSETKCTLKSFTVEKGIYQTSNFRVQPTESIVRFPNITNLCPFGEVFNATRFASVYAWNRKRISNCVADYSVLYNSASFSTFKCYGVSPTKLNDLCFTNVYADSFVIRGDEVRQIAPGQTGKIADYNYKLPDDFTGCVIAWNSNNLDSKVGGNYNYLYRLFRKSNLKPFERDISTEIYQAGSTPCNGVEGFNCYFPLQSYGFQPTNGVGYQPYRVVVLSFELLHAPATVCGPKKSTNLVKNKCVNFNFNGLTGTGVLTESNKKFLPFQQFGRDIADTTDAVRDPQTLEILDITPCSFGGVSVITPGTNTSNQVAVLYQGVNCTEVPVAIHADQLTPTWRVYSTGSNVFQTRAGCLIGAEHVNNSYECDIPIGAGICASYQTQTNSPRRARSVASQSIIAYTMSLGAENSVAYSNNSIAIPTNFTISVTTEILPVSMTKTSVDCTMYICGDSTECSNLLLQYGSFCTQLNRALTGIAVEQDKNTQEVFAQVKQIYKTPPIKDFGGFNFSQILPDPSKPSKRSFIEDLLFNKVTLADAGFIKQYGDCLGDIAARDLICAQKFNGLTVLPPLLTDEMIAQYTSALLAGTITSGWTFCAGAALQIPFAMQMAYRFNGIGVTQNVLYENQKLIANQFNSAIGKIQDSLSSTASALGKLQDVVNQNAQALNTLVKQLSSNFGAISSVLNDILSRLDKVEAEVQIDRLITGRLQSLQTYVTQQLIRAAEIRASANLAATKMSECVCGQSKRVDFCGKGYHLMSFPQSAPHGVVFLHVTYVPAQEKNFTTAPAICHDGKAHFPREGVFVSNGTHWFVTQRNFYEPQIITTDNTFVSGNCDVVIGIVNNTVYDPLQPELDSFKEELDKYFKNHTSPDVDLGDISGINASVVNIQKEIDRLNEVAKNLNESLIDLQELGKYEQYIKGGGSGGGQIYEGKLTAEGLRFGIVASRFNHALVDRLVEGAIDAIVRHGGREEDITLVRVPGSWEIPVAAGELARKEDIDAVIAIGVLIRGATPHFDYIASEVSKGLADLSLELRKPITFGVITADTLEQAIERAGTKHGNKGWEAALSAIEMANLFKSLR

SEQ ID NO: 4210 - protein, 1371 aa, Artificial Sequence
  SARS-CoV-2/Iceland/189/2020__EPI_ISL_417709 spike protein (1-1211)(G889C_L1034C) LumSynth construct
MFVFLVLLPLVSSQCVNLTTRTQLPPAYTNSFTRGVYYPDKVFRSSVLHSTQDLFLPFFSNVTWFHAIHVSGTNGTKRFDNPVLPFNDGVYFASTEKSNIIRGWIFGTTLDSKTQSLLIVNNATNVVIKVCEFQFCNDPFLGVYYHKNNKSWMESEFRVYSSANNCTFEYVSQPFLMDLEGKQGNFKNLREFVFKNIDGYFKIYSKHTPINLVRDLPQGFSALEPLVDLPIGINITRFQTLLALHRSYLTPGDSSSGWTAGAAAYYVGYLQPRTFLLKYNENGTITDAVDCALDPLSETKCTLKSFTVEKGIYQTSNFRVQPTESIVRFPNITNLCPFGEVFNATRFASVYAWNRKRISNCVADYSVLYNSASFSTFKCYGVSPTKLNDLCFTNVYADSFVIRGDEVRQIAPGQTGKIADYNYKLPDDFTGCVIAWNSNNLDSKVGGNYNYLYRLFRKSNLKPFERDISTEIYQAGSTPCNGVEGFNCYFPLQSYGFQPTNGVGYQPYRVVVLSFELLHAPATVCGPKKSTNLVKNKCVNFNFNGLTGTGVLTESNKKFLPFQQFGRDIADTTDAVRDPQTLEILDITPCSFGGVSVITPGTNTSNQVAVLYQGVNCTEVPVAIHADQLTPTWRVYSTGSNVFQTRAGCLIGAEHVNNSYECDIPIGAGICASYQTQTNSPRRARSVASQSIIAYTMSLGAENSVAYSNNSIAIPTNFTISVTTEILPVSMTKTSVDCTMYICGDSTECSNLLLQYGSFCTQLNRALTGIAVEQDKNTQEVFAQVKQIYKTPPIKDFGGFNFSQILPDPSKPSKRSFIEDLLFNKVTLADAGFTKQYGDCLGDIAARDLICAQKFNGLTVLPPLLTDEMIAQYTSALLAGTITSGWTFCAGAALQIPFAMQMAYRFNGIGVTQNVLYENQKLIANQFNSAIGKIQDSLSSTASALGKLQDVVNQNAQALNTLVKQLSSNFGAISSVLNDILSRLDKVEAEVQIDRLITGRLQSLQTYVTQQLIRAAEIRASANLAATKMSECVCGQSKRVDFCGKGYHLMSFPQSAPHGVVFLHVTYVPAQEKNFTTAPAICHDGKAHFPREGVFVSNGTHWFVTQRNFYEPQIITTDNTFVSGNCDVVIGIVNNTVYDPLQPELDSFKEELDKYFKNHTSPDVDLGDISGINASVVNIQKEIDRLNEVAKNLNESLIDLQELGKYEQYIKGGGSGGGQIYEGKLTAEGLRFGIVASRFNHALVDRLVEGAIDAIVRHGGREEDITLVRVPGSWEIPVAAGELARKEDIDAVIAIGVLIRGATPHFDYIASEVSKGLADLSLELRKPITFGVITADTLEQAIERAGTKHGNKGWEAALSAIEMANLFKSLR

SEQ ID NO: 4211 - protein, 1371 aa, Artificial Sequence
  SARS-CoV-2/Australia/NSW56/2020__EPI_ISL_417408 spike protein (1-1211)(G889C_L1034C) LumSynth construct
MFVFLVLLPLVSSQCVNLTTRTQLPPAYTNSFTRGVYYPDKVFRSSVLHSTQDLFLPFFSNVTWFHAIHVSGTNGTKRFDNPVLPFNDGVYFASTEKSNIIRGWIFGTTLDSKTQSLLIVNNATNVVIKVCEFQFCNDPFLGVYYHKNNKSWMESEFRVYSSANNCTFEYVSQPFLMDLEGKQGNFKNLREFVFKNIDGYFKIYSKHTPINLVRDLPQGFSALEPLVDLPIGINITRFQTLLALHRSYLTPGDSSSGWTAGAAAYYVGYLQPRTFLLKYNENGTITDAVDCALDPLSETKCTLKSFTVEKGIYQTSNFRVQPTESIVRFPNITNLCPFGEVFNATRFASVYAWNRKRISNCVADYSVLYNSASFSTFKCYGVSPTKLNDLCFTNVYADSFVIRGDEVRQIAPGQTGKIADYNYKLPDDFTGCVIAWNSNNLDSKVGGNYNYLYRLFRKSNLKPFERDISTEIYQAGSTPCNGVEGFNCYFPLQSYGFQPTNGVGYQPYRVVVLSFELLHAPATVCGPKKSTNLVKNKCVNFNFNGLTGTGVLTESNKKFLPFQQFGRDIADTTDAVRDPQTLEILDITPCSFGGVSVITPGTNTSNQVAVLYQDVNCTEVPVAIHADQLTPTWRVYSTGSNVFQTRAGCLIGAEHVNNSYECDIPIGAGICASYQTQTNSPRRARSVASQSIIAYTMSLGAENSVAYSNNSIAIPTNFTISVTTEILPVSMTKTSVDCTMYICGDSTECSNLLLQYGSFCTQLNRALTGIAVEQDKNTQEVFAQVKQIYKTPPIKDFGGFNFSQILPDSSKPSKRSFIEDLLFNKVTLADAGFIKQYGDCLGDIAARDLICAQKFNGLTVLPPLLTDEMIAQYTSALLAGTITSGWTFCAGAALQIPFAMQMAYRFNGIGVTQNVLYENQKLIANQFNSAIGKIQDSLSSTASALGKLQDVVNQNAQALNTLVKQLSSNFGAISSVLNDILSRLDKVEAEVQIDRLITGRLQSLQTYVTQQLIRAAEIRASANLAATKMSECVCGQSKRVDFCGKGYHLMSFPQSAPHGVVFLHVTYVPAQEKNFTTAPAICHDGKAHFPREGVFVSNGTHWFVTQRNFYEPQIITTDNTFVSGNCDVVIGIVNNTVYDPLQPELDSFKEELDKYFKNHTSPDVDLGDISGINASVVNIQKEIDRLNEVAKNLNESLIDLQELGKYEQYIKGGGSGGGQIYEGKLTAEGLRFGIVASRFNHALVDRLVEGAIDAIVRHGGREEDITLVRVPGSWEIPVAAGELARKEDIDAVIAIGVLIRGATPHFDYIASEVSKGLADLSLELRKPITFGVITADTLEQAIERAGTKHGNKGWEAALSAIEMANLFKSLR

SEQ ID NO: 4212 - protein, 1371 aa, Artificial Sequence
  SARS-CoV-2/Iceland/280/2020__EPI_ISL_417608 spike protein (1-1211)(G889C_L1034C) LumSynth construct
MFVFLVLLPLVSSQCVNLTTRTQLPPAYTNSFTRGVYYPDKVFRSSVLHSTQDLFLPFFSNVTWFHAIHVSGTNGTKRFDNPVLPFNDGVYFASTEKSNIIRGWIFGTTLDSKTQSLLIVNNATNVVIKVCEFQFCNDPFLGVYYHKNNKSWMESEFRVYSSANNCTFEYVSQPFLMDLEGKQGNFKNLREFVFKNIDGYFKIYSKHTPINLVRDLPQGFSALEPLVDLPIGINITRFQTLLALHRSYLTPGDSSSGWTAGAAAYYVGYLQPRTFLLKYNENGTITDAVDCALDPLSETKCTLKSFTVEKGIYQTSNFRVQPTESIVRFPNITNLCPFGEVFNATRFASVYAWNRKRISNCVADYSVLYNSASFSTFKCYGVSPTKLNDLCFTNVYADSFVIRGDEVRQIAPGQTGKIADYNYKLPDDFTGCVIAWNSNNLDSKVGGNYNYLYRLFRKSNLKPFERDISTEIYQAGSTPCNGVEGFNCYFPLQSYGFQPTNGVGYQPYRVVVLSFELLHAPATVCGPKKSTNLVKNKCVNFNFNGLTGTGVLTESNKKFLPFQQFGRDIADTTDAVRDPQTLEILDITPCSFGGVSVITPGTNTSNQVAVLYQGVNCTEVPVAIHADQLTPTWRVYSTGSNVFQTRAGCLIGAEHVNNSYECDIPIGAGICASYHTQTNSPRRARSVASQSIIAYTMSLGAENSVAYSNNSIAIPTNFTISVTTEILPVSMTKTSVDCTMYICGDSTECSNLLLQYGSFCTQLNRALTGIAVEQDKNTQEVFAQVKQIYKTPPIKDFGGFNFSQILPDPSKPSKRSFIEDLLFNKVTLADAGFIKQYGDCLGDIAARDLICAQKFNGLTVLPPLLTDEMIAQYTSALLAGTITSGWTFCAGAALQIPFAMQMAYRFNGIGVTQNVLYENQKLIANQFNSAIGKIQDSLSSTASALGKLQDVVNQNAQALNTLVKQLSSNFGAISSVLNDILSRLDKVEAEVQIDRLITGRLQSLQTYVTQQLIRAAEIRASANLAATKMSECVCGQSKRVDFCGKGYHLMSFPQSAPHGVVFLHVTYVPAQEKNFTTAPAICHDGKAHFPREGVFVSNGTHWFVTQRNFYEPQIITTDNTFVSGNCDVVIGIVNNTVYDPLQPELDSFKEELDKYFKNHTSPDVDLGDISGINASVVNIQKEIDRLNEVAKNLNESLIDLQELGKYEQYIKGGGSGGGQIYEGKLTAEGLRFGIVASRFNHALVDRLVEGAIDAIVRHGGREEDITLVRVPGSWEIPVAAGELARKEDIDAVIAIGVLIRGATPHFDYIASEVSKGLADLSLELRKPITFGVITADTLEQAIERAGTKHGNKGWEAALSAIEMANLFKSLR

SEQ ID NO: 4213 - protein, 1371 aa, Artificial Sequence; identical to SEQ ID NO: 4168
  SARS-CoV-2/Iceland/247/2020__EPI_ISL_417575 spike protein (1-1211)(G889C_L1034C) LumSynth construct

SEQ ID NO: 4214 - protein, 1371 aa, Artificial Sequence
  SARS-CoV-2/Iceland/238/2020__EPI_ISL_417566 spike protein (1-1211)(G889C_L1034C) LumSynth construct
MFVFLVLLPLVSSQCVNLTTRTQLPPAYTNSFTRGVYYPDKVFRSSVLHSTQDLFLPFFSNVTWFHAIHVSGTNGTKRFDNPVLPFNDGVYFASTEKSNIIRGWIFGTTLDSKTQSLLIVNNATNVVIKVCEFQFCNDPFLGVYYHKNNKSWMESEFRVYSSANNCTFEYVSQPFLMDLEGKQGNFKNLREFVFKNIDGYFKIYSKHTPINLVRDLPQGFSALEPLVDLPIGINITRFQTLLALHRSYLTPGDSSSGWTAGAAAYYVGYLQPRTFLLKYNENGTITDAVDCALDPLSETKCTLKSFTVEKGIYQTSNFRVQPTESIVRFPNITNLCPFGEVFNATRFASVYAWNRKRISNCVADYSVLYNSASFSTFKCYGVSPTKLNDLCFTNVYADSFVIRGDEVRQIAPGQTGKIADYNYKLPDDFTGCVIAWNSNNLDSKVGGNYNYLYRLFRKSNLKPFERDISTEIYQAGSTPCNGVEGFNCYFPLQSYGFQPTNGVGYQPYRVVVLSFELLHAPATVCGPKKSTNLVKNKCVNFNFNGLTGTGVLTESNKKFLPFQQFGRDIADTTDAVRDPQTLEILDITPCSFGGVSVITPGTNTSNQVAVLYQGVNCTEVPVAIHADQLTPTWRVYSTGSNVFQTRAGCLIGAEHVNNSYECDIPIGAGICASYQTQTNSPRRARSVASQSIIAYTMSLGAENSVAYSNNSIAIPTNFTISVTTEILPVSMTKTSVDCTMYICGDSTECSNLLLQYGSFCTQLNRALTGIAVEQDKNTQEVFAQVKQIYKTPPIKDFGGFNFSQILPDPSKPSKRSFIEDLLFNKVTLADVGFIKQYGDCLGDIAARDLICAQKFNGLTVLPPLLTDEMIAQYTSALLAGTITSGWTFCAGAALQIPFAMQMAYRFNGIGVTQNVLYENQKLIANQFNSAIGKIQDSLSSTASALGKLQDVVNQNAQALNTLVKQLSSNFGAISSVLNDILSRLDKVEAEVQIDRLITGRLQSLQTYVTQQLIRAAEIRASANLAATKMSECVCGQSKRVDFCGKGYHLMSFPQSAPHGVVFLHVTYVPAQEKNFTTAPAICHDGKAHFPREGVFVSNGTHWFVTQRNFYEPQIITTDNTFVSGNCDVVIGIVNNTVYDPLQPELDSFKEELDKYFKNHTSPDVDLGDISGINASVVNIQKEIDRLNEVAKNLNESLIDLQELGKYEQYIKGGGSGGGQIYEGKLTAEGLRFGIVASRFNHALVDRLVEGAIDAIVRHGGREEDITLVRVPGSWEIPVAAGELARKEDIDAVIAIGVLIRGATPHFDYIASEVSKGLADLSLELRKPITFGVITADTLEQAIERAGTKHGNKGWEAALSAIEMANLFKSLR

SEQ ID NO: 4215 - protein, 1371 aa, Artificial Sequence
  SARS-CoV-2/Greece/16/2020__EPI_ISL_418265 spike protein (1-1211)(G889C_L1034C) LumSynth construct
MFVFLVLLPLVSSQCVNLTTRTQLPPAYTNSFTRGVYYPDKVFRSSVLHSTQDLFLPFFSNVTWFHAIHVSGTNGTKRFDNPVLPFNDGVYFASTEKSNIIRGWIFGTTLDSKTQSLLIVNNATNVVIKVCEFQFCNDPFLGVYYHKNNKSWMESEFRVYSSANNCTFEYVSQPFLMDLEGKQGNFKNLREFVFKNVDGYFKIYSKHTPINLVRDLPQGFSALEPLVDLPIGINITRFQTLLALHRSYLTPGDSSSGWTAGAAAYYVGYLQPRTFLLKYNENGTITDAVDCALDPLSETKCTLKSFTVEKGIYQTSNFRVQPTESIVRFPNITNLCPFGEVFNATRFASVYAWNRKRISNCVADYSVLYNSASFSTFKCYGVSPTKLNDLCFTNVYADSFVIRGDEVRQIAPGQTGKIADYNYKLPDDFTGCVIAWNSNNLDSKVGGNYNYLYRLFRKSNLKPFERDISTEIYQAGSTPCNGVEGFNCYFPLQSYGFQPTNGVGYQPYRVVVLSFELLHAPATVCGPKKSTNLVKNKCVNFNFNGLTGTGVLTESNKKFLPFQQFGRDIADTTDAVRDPQTLEILDITPCSFGGVSVITPGTNTSNQVAVLYQDVNCTEVPVAIHADQLTPTWRVYSTGSNVFQTRAGCLIGAEHVNNSYECDIPIGAGICASYQTQTNSPRRARSVASQSIIAYTMSLGAENSVAYSNNSIAIPTNFTISVTTEILPVSMTKTSVDCTMYICGDSTECSNLLLQYGSFCTQLNRALTGIAVEQDKNTQEVFAQVKQIYKTPPIKDFGGFNFSQILPDPSKPSKRSFIEDLLFNKVTLADAGFIKQYGDCLGDIAARDLICAQKFNGLTVLPPLLTDEMIAQYTSALLAGTITSGWTFCAGAALQIPFAMQMAYRFNGIGVTQNVLYENQKLIANQFNSAIGKIQDSLSSTASALGKLQDVVNQNAQALNTLVKQLSSNFGAISSVLNDILSRLDKVEAEVQIDRLITGRLQSLQTYVTQQLIRAAEIRASANLAATKMSECVCGQSKRVDFCGKGYHLMSFPQSAPHGVVFLHVTYVPAQEKNFTTAPAICHDGKAHFPREGVFVSNGTHWFVTQRNFYEPQIITTDNTFVSGNCDVVIGIVNNTVYDPLQPELDSFKEELDKYFKNHTSPDVDLGDISGINASVVNIQKEIDRLNEVAKNLNESLIDLQELGKYEQYIKGGGSGGGQIYEGKLTAEGLRFGIVASRFNHALVDRLVEGAIDAIVRHGGREEDITLVRVPGSWEIPVAAGELARKEDIDAVIAIGVLIRGATPHFDYIASEVSKGLADLSLELRKPITFGVITADTLEQAIERAGTKHGNKGWEAALSAIEMANLFKSLR

SEQ ID NO: 4216 - protein, 1371 aa, Artificial Sequence
  SARS-CoV-2/Iceland/319/2020__EPI_ISL_417648 spike protein (1-1211)(G889C_L1034C) LumSynth construct
MFVFLVLLPLVSSQCVNLTTRTQLPPAYTNSFTRGVYYPDKVFRSSVLHSTQDLFLPFFSNVTWFHAIHVSGTNGTKRFDNPVLPFNDGVYFASTEKSNIIRGWIFGTTLDSKTQSLLIVNNATNVVIKVCEFQFCNDPFLGVYYHKNNKSWMESEFRVYSSANNCTFEYVSQPFLIDLEGKQGNFKNLREFVFKNIDGYFKIYSKHTPINLVRDLPQGFSALEPLVDLPIGINITRFQTLLALHRSYLTPGDSSSGWTAGAAAYYVGYLQPRTFLLKYNENGTITDAVDCALDPLSETKCTLKSFTVEKGIYQTSNFRVQPTESIVRFPNITNLCPFGEVFNATRFASVYAWNRKRISNCVADYSVLYNSASFSTFKCYGVSPTKLNDLCFTNVYADSFVIRGDEVRQIAPGQTGKIADYNYKLPDDFTGCVIAWNSNNLDSKVGGNYNYLYRLFRKSNLKPFERDISTEIYQAGSTPCNGVEGFNCYFPLQSYGFQPTNGVGYQPYRVVVLSFELLHAPATVCGPKKSTNLVKNKCVNFNFNGLTGTGVLTESNKKFLPFQQFGRDIADTTDAVRDPQTLEILDITPCSFGGVSVITPGTNTSNQVAVLYQGVNCTEVPVAIHADQLTPTWRVYSTGSNVFQTRAGCLIGAEHVNNSYECDIPIGAGICASYQTQTNSPRRARSVASQSIIAYTMSLGAENSVAYSNNSIAIPTNFTISVTTEILPVSMTKTSVDCTMYICGDSTECSNLLLQYGSFCTQLNRALTGIAVEQDKNTQEVFAQVKQIYKTPPIKDFGGFNFSQILPDPSKPSKRSFIEDLLFNKVTLADAGFIKQYGDCLGDIAARDLICAQKFNGLTVLPPLLTDEMIAQYTSALLAGTITSGWTFCAGAALQIPFAMQMAYRFNGIGVTQNVLYENQKLIANQFNSAIGKIQDSLSSTASALGKLQDVVNQNAQALNTLVKQLSSNFGAISSVLNDILSRLDKVEAEVQIDRLITGRLQSLQTYVTQQLIRAAEIRASANLAATKMSECVCGQSKRVDFCGKGYHLMSFPQSAPHGVVFLHVTYVPAQEKNFTTAPAICHDGKAHFPREGVFVSNGTHWFVTQRNFYEPQIITTDNTFVSGNCDVVIGIVNNTVYDPLQPELDSFKEELDKYFKNHTSPDVDLGDISGINASVVNIQKEIDRLNEVAKNLNESLIDLQELGKYEQYIKGGGSGGGQIYEGKLTAEGLRFGIVASRFNHALVDRLVEGAIDAIVRHGGREEDITLVRVPGSWEIPVAAGELARKEDIDAVIAIGVLIRGATPHFDYIASEVSKGLADLSLELRKPITFGVITADTLEQAIERAGTKHGNKGWEAALSAIEMANLFKSLR

SEQ ID NO: 4217 - protein, 1371 aa, Artificial Sequence
  SARS-CoV-2/Congo/94/2020__EPI_ISL_417947 spike protein (1-1211)(G889C_L1034C) LumSynth construct
MFVFLVLLPLVSSQCVNLTTRTQLPPAYTNSFTRGVYYPDKVFRSSVLHSTQDLFLPFFSNVTWFHAIHVSGTNGTKRFDNPVLPFNDGVYFASTEKSNIIRGWIFGTTLDSKTQSLLIVNNATNVVIKVCEFQFCNDPFLGVYYHKNNKSWMESEFRVYSSANNCTFEYVSQPFLMDLEGKQGNFKNLREFVFKNIDGYFKIYSKHTPINLVRDLPQGFSALEPLVDLPIGINITRFQTLLALHRSYLTPGDSSSGWTAGAAAYYVGYLQPRTFLLKYNENGTITDAVDCALDPLSETKCTLKSFTVEKGIYQTSNFRVQPTESIVRFPNITNLCPFGEVFNATRFASVYAWNRKRISNCVADYSVLYNSASFSTFKCYGVSPTKLNDLCFTNVYADSFVIRGDEVRQIAPGQTGKIADYNYKLPDDFTGCVIAWNSNNLDSKVGGNYNYLYRLFRKSNLKPFERDISTEIYQAGSTPCNGVEGFNCYFPLQSYGFQPTNGVGYQPYRVVVLSFELLHAPATVCGPKKSTNLVKNKCVNFNFNGLTGTGVLTESNKKFLPFQQFGRDIADTTDAVRDPQTLEILDITPCSFGGVSVITPGTNTSNQVAVLYQGVNCTEVPVAIHADQLTPTWRVYSTGSNVFQTRAGCLIGAEHVNNSYECDIPIGAGICASYQTQTNSPRRARSVASQSIIAYTMSLGAENSVAYSNNSIAIPTNFTISVTTEILPVSMTKTSVDCTMYICGDSTECSNLLLQYGSFCTQLNRALTGIAVEQDKNTQEVFAQVKQIYKTPPIKDFGGFNFSQILPDPSKPSKRSFIEDILFNKVTLADAGFIKQYGDCLGDIAARDLICAQKFNGLTVLPPLLTDEMIAQYTSALLAGTITSGWTFCAGAALQIPFAMQMAYRFNGIGVTQNVLYENQKLIANQFNSAIGKIQDSLSSTASALGKLQDVVNQNAQALNTLVKQLSSNFGAISSVLNDILSRLDKVEAEVQIDRLITGRLQSLQTYVTQQLIRAAEIRASANLAATKMSECVCGQSKRVDFCGKGYHLMSFPQSAPHGVVFLHVTYVPAQEKNFTTAPAICHDGKAHFPREGVFVSNGTHWFVTQRNFYEPQIITTDNTFVSGNCDVVIGIVNNTVYDPLQPELDSFKEELDKYFKNHTSPDVDLGDISGINASVVNIQKEIDRLNEVAKNLNESLIDLQELGKYEQYIKGGGSGGGQIYEGKLTAEGLRFGIVASRFNHALVDRLVEGAIDAIVRHGGREEDITLVRVPGSWEIPVAAGELARKEDIDAVIAIGVLIRGATPHFDYIASEVSKGLADLSLELRKPITFGVITADTLEQAIERAGTKHGNKGWEAALSAIEMANLFKSLR

SEQ ID NO: 4218 - protein, 1371 aa, Artificial Sequence
  SARS-CoV-2/Congo/158/2020__EPI_ISL_417950 spike protein (1-1211)(G889C_L1034C) LumSynth construct
MFVFLVLLPLVSSQCVNLTTRTQLPPAYTNSFTRGVYYPDKVFRSSVLHSTQDLFLPFFSNVTWFHAIHVSGTNGTKRFDNPVLPFNDGVYFASTEKSNIIRGWIFGTTLDSKTQSLLIVNNATNVVIKVCEFQFCNDPFLGVYYHKNNKSWMESEFRVYSSANNCTFEYVSQPFLMDLEGKQGNFKNLREFVFKNIDGYFKIYSKHTPINLVRDLPQGFSALEPLVDLPIGINITRFQTLLALHRSYLTPGDSSSGWTAGAAAYYVGYLQPRTFLLKYNENGTITDAVDCALDPLSETKCTLKSFTVEKGIYQTSNFRVQPTESIVRFPNITNLCPFGEVFNATRFASVYAWNRKRISNCVADYSVLYNSASFSTFKCYGVSPTKLNDLCFTNVYADSFVIRGDEVRQIAPGQTGKIADYNYKLPDDFTGCVIAWNSNNLDSKVGGNYNYLYRLFRKSNLKPFERDISTEIYQAGSTPCNGVEGFNCYFPLQSYGFQPTNGVGYQPYRVVVLSFELLHAPATVCGPKKSTNLVKNKCVNFNFNGLTGTGVLTESNKKFLPFQQFGRDIADTTDAVRDPQTLEILDITPCSFGGVSVITPGTNTSNQVAVLYQDVNCTEVPVAIHADQLTPTWRVYSTGSNVFQTRAGCLIGAEHVNNSYECDIPIGAGICASYQTQTNSPRRARSVASQSIIAYTMSLGAENSVAYSNNSIAIPTNFTISVTTEILPVSMTKTSVDCTMYICGDSTECSNLLLQYGSFCTQLNRALTGIAVEQDKNTQEVFAQVKQIYKTPPIKDFGGFNFSQILPDPSKPSKRSFIEDLLFNKVTLADAGFIKQYGDCLGDIAARDLICAQKFNGLTVLPPLLTDEMIAQYTSALLAGTITSGWTFCAGAALQIPFAMQMAYRFNGIGVTQNVLYENQKLIANQFNSAIGKIQDSLSSTASALGKLQDVVNQNAQALNTLVKQLSSNFGAISSVLNDILSRLDKVEAEVQIDRLITGRLQSLQTYVTQQLIRAAEIRASANLAATKMSECVCGQSKRVDFCGKGYHLMSFPQSAPHGVVFLHVTYVPAQEKNFTTAPAICHDGKAHFPREGVFVSNGTHWFVTQRNFYEPQIITTDNTFLSGNCDVVIGIVNNTVYDPLQPELDSFKEELDKYFKNHTSPDVDLGDISGINASVVNIQKEIDRLNEVAKNLNESLIDLQELGKYEQYIKGGGSGGGQIYEGKLTAEGLRFGIVASRFNHALVDRLVEGAIDAIVRHGGREEDITLVRVPGSWEIPVAAGELARKEDIDAVIAIGVLIRGATPHFDYIASEVSKGLADLSLELRKPITFGVITADTLEQAIERAGTKHGNKGWEAALSAIEMANLFKSLR

SEQ ID NO: 4219 - protein, 1371 aa, Artificial Sequence
  SARS-CoV-2/USA/UT-00034/2020__EPI_ISL_417977 spike protein (1-1211)(G889C_L1034C) LumSynth construct
MFVFLVLLPLVSSQCVNLTTRTQLPPAYTNSFTRGVYYPDKVFRSSVLHSTQDLFLPFFSNVTWFHAIHVSGTNGTKRFDNPVLPFNDGVYFASTEKSNIIRGWIFGTTLDSKTQSLLIVNNATNVVIKVCEFQFCNDPFLGVYYYKNNKSWMESEFRVYSSANNCTFEYVSQPFLMDLEGKQGNFKNLREFVFKNIDGYFKIYSKHTPINLVRDLPQGFSALEPLVDLPIGINITRFQTLLALHRSYLTPGDSSSGWTAGAAAYYVGYLQPRTFLLKYNENGTITDAVDCALDPLSETKCTLKSFTVEKGIYQTSNFRVQPTESIVRFPNITNLCPFGEVFNATRFASVYAWNRKRISNCVADYSVLYNSASFSTFKCYGVSPTKLNDLCFTNVYADSFVIRGDEVRQIAPGQTGKIADYNYKLPDDFTGCVIAWNSNNLDSKVGGNYNYLYRLFRKSNLKPFERDISTEIYQAGSTPCNGVEGFNCYFPLQSYGFQPTNGVGYQPYRVVVLSFELLHAPATVCGPKKSTNLVKNKCVNFNFNGLTGTGVLTESNKKFLPFQQFGRDIADTTDAVRDPQTLEILDITPCSFGGVSVITPGTNTSNQVAVLYQGVNCTEVPVAIHADQLTPTWRVYSTGSNVFQTRAGCLIGAEHVNNSYECDIPIGAGICASYQTQTNSPRRARSVASQSIIAYTMSLGAENSVAYSNNSIAIPTNFTISVTTEILPVSMTKTSVDCTMYICGDSTECSNLLLQYGSFCTQLNRALTGIAVEQDKNTQEVFAQVKQIYKTPPIKDFGGFNFSQILPDPSKPSKRSFIEDLLFNKVTLADAGFIKQYGDCLGDIAARDLICAQKFNGLTVLPPLLTDEMIAQYTSALLAGTITSGWTFCAGAALQIPFAMQMAYRFNGIGVTQNVLYENQKLIANQFNSAIGKIQDSLSSTASALGKLQDVVNQNAQALNTLVKQLSSNFGAISSVLNDILSRLDKVEAEVQIDRLITGRLQSLQTYVTQQLIRAAEIRASANLAATKMSECVCGQSKRVDFCGKGYHLMSFPQSAPHGVVFLHVTYVPAQEKNFTTAPAICHDGKAHFPREGVFVSNGTHWFVTQRNFYEPQIITTDNTFVSGNCDVVIGIVNNTVYDPLQPELDSFKEELDKYFKNHTSPDVDLGDISGINASVVNIQKEIDRLNEVAKNLNESLIDLQELGKYEQYIKGGGSGGGQIYEGKLTAEGLRFGIVASRFNHALVDRLVEGAIDAIVRHGGREEDITLVRVPGSWEIPVAAGELARKEDIDAVIAIGVLIRGATPHFDYIASEVSKGLADLSLELRKPITFGVITADTLEQAIERAGTKHGNKGWEAALSAIEMANLFKSLR

SEQ ID NO: 4220 - protein, 1371 aa, Artificial Sequence
  SARS-CoV-2/USA/UT-00033/2020__EPI_ISL_417976 spike protein (1-1211)(G889C_L1034C) LumSynth construct
MFVFLVLLPLVSSQCVNLTTRTQLPPAYTNSFTRGVYYPDKVFRSSVLHSTQDLFLPFFSNVTWFHAIHVSGTNGTKRFDNPVLPFNDGVYFASTEKSNIIRGWIFGTTLDSKTQSLLIVNNATNVVIKVCEFQFCNDPFLGVYYHKNNKSWMESEFRVYSSANNCTFEYVSQPFLMDLEGKQGNFKNLREFVFKNIDGYFKIYSKHTPINLVRDLPQGFSALEPLVDLPIGINITRFQTLLALHRSYLTPGDSSSGLTAGAAAYYVGYLQPRTFLLKYNENGTITDAVDCALDPLSETKCTLKSFTVEKGIYQTSNFRVQPTESIVRFPNITNLCPFGEVFNATRFASVYAWNRKRISNCVADYSVLYNSASFSTFKCYGVSPTKLNDLCFTNVYADSFVIRGDEVRQIAPGQTGKIADYNYKLPDDFTGCVIAWNSNNLDSKVGGNYNYLYRLFRKSNLKPFERDISTEIYQAGSTPCNGVEGFNCYFPLQSYGFQPTNGVGYQPYRVVVLSFELLHAPATVCGPKKSTNLVKNKCVNFNFNGLTGTGVLTESNKKFLPFQQFGRDIADTTDAVRDPQTLEILDITPCSFGGVSVITPGTNTSNQVAVLYQGVNCTEVPVAIHADQLTPTWRVYSTGSNVFQTRAGCLIGAEHVNNSYECDIPIGAGICASYQTQTNSPRRARSVASQSIIAYTMSLGAENSVAYSNNSIAIPTNFTISVTTEILPVSMTKTSVDCTMYICGDSTECSNLLLQYGSFCTQLNRALTGIAVEQDKNTQEVFAQVKQIYKTPPIKDFGGFNFSQILPDPSKPSKRSFIEDLLFNKVTLADAGFIKQYGDCLGDIAARDLICAQKFNGLTVLPPLLTDEMIAQYTSALLAGTITSGWTFCAGAALQIPFAMQMAYRFNGIGVTQNVLYENQKLIANQFNSAIGKIQDSLSSTASALGKLQDVVNQNAQALNTLVKQLSSNFGAISSVLNDILSRLDKVEAEVQIDRLITGRLQSLQTYVTQQLIRAAEIRASANLAATKMSECVCGQSKRVDFCGKGYHLMSFPQSAPHGVVFLHVTYVPAQEKNFTTAPAICHDGKAHFPREGVFVSNGTHWFVTQRNFYEPQIITTDNTFVSGNCDVVIGIVNNTVYDPLQPELDSFKEELDKYFKNHTSPDVDLGDISGINASVVNIQKEIDRLNEVAKNLNESLIDLQELGKYEQYIKGGGSGGGQIYEGKLTAEGLRFGIVASRFNHALVDRLVEGAIDAIVRHGGREEDITLVRVPGSWEIPVAAGELARKEDIDAVIAIGVLIRGATPHFDYIASEVSKGLADLSLELRKPITFGVITADTLEQAIERAGTKHGNKGWEAALSAIEMANLFKSLR

SEQ ID NO: 4221 - protein, 1371 aa, Artificial Sequence
  SARS-CoV-2/USA/WI-13/2020__EPI_ISL_417516 spike protein (1-1211)(G889C_L1034C) LumSynth construct
MFVFLVLLPLVSSQCVNLTTRTQLPPAYTNSFTRGVYYPDKVFRSSVLHSTQDLFLPFFSNVTWFHAIHVSGTNGTKRFDNPVLPFNDGVYFASTEKSNIIRGWIFGTTLDSKTQSLLIVNNATNVVIKVCEFQFCNDPFLGVYYHKNNKSWMESEFRVYSSANNCTFEYVSQPFLMDLEGKQGNFKNLREFVFKNIDGYFKIYSKHTPINLVRDLPQGFSALEPLVDLPIGINITRFQTLLALHRSYLTPGDSSSGWTAGAAAYYVGYLQPRTFLLKYNENGTITDAVDCALDPLSETKCTLKSFTVEKGIYQTSNFRVLPTESIVRFPNITNLCPFGEVFNATRFASVYAWNRKRISNCVADYSVLYNSASFSTFKCYGVSPTKLNDLCFTNVYADSFVIRGDEVRQIAPGQTGKIADYNYKLPDDFTGCVIAWNSNNLDSKVGGNYNYLYRLFRKSNLKPFERDISTEIYQAGSTPCNGVEGFNCYFPLQSYGFQPTNGVGYQPYRVVVLSFELLHAPATVCGPKKSTNLVKNKCVNFNFNGLTGTGVLTESNKKFLPFQQFGRDIADTTDAVRDPQTLEILDITPCSFGGVSVITPGTNTSNQVAVLYQGVNCTEVPVAIHADQLTPTWRVYSTGSNVFQTRAGCLIGAEHVNNSYECDIPIGAGICASYQTQTNSPRRARSVASQSIIAYTMSLGAENSVAYSNNSIAIPTNFTISVTTEILPVSMTKTSVDCTMYICGDSTECSNLLLQYGSFCTQLNRALTGIAVEQDKNTQEVFAQVKQIYKTPPIKDFGGFNFSQILPDPSKPSKRSFIEDLLFNKVTLADAGFIKQYGDCLGDIAARDLICAQKFNGLTVLPPLLTDEMIAQYTSALLAGTITSGWTFCAGAALQIPFAMQMAYRFNGIGVTQNVLYENQKLIANQFNSAIGKIQDSLSSTASALGKLQDVVNQNAQALNTLVKQLSSNFGAISSVLNDILSRLDKVEAEVQIDRLITGRLQSLQTYVTQQLIRAAEIRASANLAATKMSECVCGQSKRVDFCGKGYHLMSFPQSAPHGVVFLHVTYVPAQEKNFTTAPAICHDGKAHFPREGVFVSNGTHWFVTQRNFYEPQIITTDNTFVSGNCDVVIGIVNNTVYDPLQPELDSFKEELDKYFKNHTSPDVDLGDISGINASVVNIQKEIDRLNEVAKNLNESLIDLQELGKYEQYIKGGGSGGGQIYEGKLTAEGLRFGIVASRFNHALVDRLVEGAIDAIVRHGGREEDITLVRVPGSWEIPVAAGELARKEDIDAVIAIGVLIRGATPHFDYIASEVSKGLADLSLELRKPITFGVITADTLEQAIERAGTKHGNKGWEAALSAIEMANLFKSLR

SEQ ID NO: 4222 - protein, 1370 aa, Artificial Sequence
  SARS-CoV-2/India/1-27/2020__EPI_ISL_413522 spike protein (1-1210)(G888C_L1033C) LumSynth construct
MFVFLVLLPLVSSQCVNLTTRTQLPPAYTNSFTRGVYYPDKVFRSSVLHSTQDLFLPFFSNVTWFHAIHVSGTNGTKRFDNPVLPFNDGVYFASTEKSNIIRGWIFGTTLDSKTQSLLIVNNATNVVIKVCEFQFCNDPFLGVYHKNNKSWMESEFRVYSSANNCTFEYVSQPFLMDLEGKQGNFKNLREFVFKNIDGYFKIYSKHTPINLVRDLPQGFSALEPLVDLPIGINITRFQTLLALHRSYLTPGDSSSGWTAGAAAYYVGYLQPRTFLLKYNENGTITDAVDCALDPLSETKCTLKSFTVEKGIYQTSNFRVQPTESIVRFPNITNLCPFGEVFNATRFASVYAWNRKRISNCVADYSVLYNSASFSTFKCYGVSPTKLNDLCFTNVYADSFVIRGDEVIQIAPGQTGKIADYNYKLPDDFTGCVIAWNSNNLDSKVGGNYNYLYRLFRKSNLKPFERDISTEIYQAGSTPCNGVEGFNCYFPLQSYGFQPTNGVGYQPYRVVVLSFELLHAPATVCGPKKSTNLVKNKCVNFNFNGLTGTGVLTESNKKFLPFQQFGRDIADTTDAVRDPQTLEILDITPCSFGGVSVITPGTNTSNQVAVLYQDVNCTEVPVAIHADQLTPTWRVYSTGSNVFQTRAGCLIGAEHVNNSYECDIPIGAGICASYQTQTNSPRRARSVASQSIIAYTMSLGAENSVAYSNNSIAIPTNFTISVTTEILPVSMTKTSVDCTMYICGDSTECSNLLLQYGSFCTQLNRALTGIAVEQDKNTQEVFAQVKQIYKTPPIKDFGGFNFSQILPDPSKPSKRSFIEDLLFNKVTLADAGFIKQYGDCLGDIAARDLICAQKFNGLTVLPPLLTDEMIAQYTSALLAGTITSGWTFCAGAALQIPFAMQMAYRFNGIGVTQNVLYENQKLIANQFNSAIGKIQDSLSSTASALGKLQDVVNQNAQALNTLVKQLSSNFGAISSVLNDILSRLDKVEAEVQIDRLITGRLQSLQTYVTQQLIRAAEIRASANLAATKMSECVCGQSKRVDFCGKGYHLMSFPQSAPHGVVFLHVTYVPAQEKNFTTAPAICHDGKAHFPREGVFVSNGTHWFVTQRNFYEPQIITTDNTFVSGNCDVVIGIVNNTVYDPLQPELDSFKEELDKYFKNHTSPDVDLGDISGINASVVNIQKEIDRLNEVAKNLNESLIDLQELGKYEQYIKGGGSGGGQIYEGKLTAEGLRFGIVASRFNHALVDRLVEGAIDAIVRHGGREEDITLVRVPGSWEIPVAAGELARKEDIDAVIAIGVLIRGATPHFDYIASEVSKGLADLSLELRKPITFGVITADTLEQAIERAGTKHGNKGWEAALSAIEMANLFKSLR

SEQ ID NO: 4223 - protein, 1365 aa, Artificial Sequence
  SARS-CoV-2/pangolin/Guangxi/P4L/2017__EPI_ISL_410538 spike protein (1-1205)(G883C_L1028C) LumSynth construct
MFVFLFVLPLVSSQCVNLTTRTGIPPGYTNSSTRGVYYPDKVFRSSILHLTQDLFLPFFSNVTWFNTINYQGGFKKFDNPVLPFNDGVYFASTEKSNIIRGWIFGTTLDARTQSLLIVNNATNVVIKVCEFQFCTDPFLGVYYHNNNKTWVENEFRVYSSANNCTFEYISQPFLMDLEGKQGNFKNLREFVFKNVDGYFKIYSKHTPIDLVRDLPRGFAALEPLVDLPIGINITRFQTLLALHRSYLTPGNLESGWTTGAAAYYVGYLQQRTFLLSYNQNGTITDAVDCSLDPLSETKCTLKSLTVEKGIYQTSNFRVQPTISIVRFPNITNLCPFGEVFNASKFASVYAWNRKRISNCVADYSVLYNSTSFSTFKCYGVSPTKLNDLCFTNVYADSFVVKGDEVRQIAPGQTGVIADYNYKLPDDFTGCVIAWNSVKQDALTGGNYGYLYRLFRKSKLKPFERDISTEIYQAGSTPCNGQVGLNCYYPLERYGFHPTTGVNYQPFRVVVLSFELLNGPATVCGPKLSTTLVKDKCVNFNFNGLTGTGVLTTSKKQFLPFQQFGRDISDTTDAVRDPQTLEILDITPCSFGGVSVITPGTNTSNQVAVLYQDVNCTEVPMAIHAEQLTPAWRVYSAGANVFQTRAGCLVGAEHVNNSYECDIPVGAGICASYHSMSSLRSVNQRSIIAYTMSLGAENSVAYSNNSIAIPTNFTISVTTEILPVSMTKTSVDCTMYICGDSIECSNLLLQYGSFCTQLNRALTGIAVEQDKNTQEVFAQVKQIYKTPPIKDFGGFNFSQILPDPSKPSKRSFIEDLLFNKVTLADAGFIKQYGDCLGDIAARDLICAQKFNGLTVLPPLLTDEMIAQYTSALLAGTITSGWTFCAGAALQIPFAMQMAYRFNGIGVTQNVLYENQKLIANQFNSAIGKIQDSLSSTASALGKLQDVVNQNAQALNTLVKQLSSNFGAISSVLNDILSRLDKVEAEVQIDRLITGRLQSLQTYVTQQLIRAAEIRASANLAATKMSECVCGQSKRVDFCGKGYHLMSFPQSAPHGVVFLHVTYVPAQEKNFTTAPAICHEGKAHFPREGVFVSNGTHWFITQRNFYEPQIITTDNTFVSGSCDVVIGIVNNTVYDPLQPELDSFKEELDKYFKNHTSPDVDLGDISGINASVVNIQKEIDRLNEVAKNLNESPIDLQELGKYEQYIKGGGSGGGQIYEGKLTAEGLRFGIVASRFNHALVDRLVEGAIDAIVRHGGREEDITLVRVPGSWEIPVAAGELARKEDIDAVIAIGVLIRGATPHFDYIASEVSKGLADLSLELRKPITFGVITADTLEQAIERAGTKHGNKGWEAALSAIEMANLFKSLR

SEQ ID NO: 4224 - protein, 1365 aa, Artificial Sequence
  SARS-CoV-2/pangolin/Guangxi/P5L/2017__EPI_ISL_410540 spike protein (1-1205)(G883C_L1028C) LumSynth construct
MFVFLFVLPLVSSQCVNLTTRTGIPPGYTNSSTRGVYYPDKVFRSSILHLTQDLFLPFFSNVTWFNTINYQGGFKKFDNPVLPFNDGVYFASTEKSNIIRGWIFGTTLDARTQSLLIVNNATNVVIKVCEFQFCTDPFLGVYYHNNNKTWVENEFRVYSSANNCTFEYISQPFLMDLEGKQGNFKNLREFVFKNVDGYFKIYSKHTPIDLVRDLPRGFAALEPLVDLPIGINITRFQTLLALHRSYLTPGKLESGWTTGAAAYYVGYLQQRTFLLSYNQNGTITDAVDCSLDPLSETKCTLKSLTVEKGIYQTSNFRVQPTISIVRFPNITNLCPFGEVFNASKFASVYAWNRKRISNCVADYSVLYNSTSFSTFKCYGVSPTKLNDLCFTNVYADSFVVKGDEVRQIAPGQTGVIADYNYKLPDDFTGCVIAWNSVKQDALTGGNYGYLYRLFRKSKLKPFERDISTEIYQAGSTPCNGQVGLNCYYPLERYGFHPTTGVNYQPFRVVVLSFELLNGPATVCGPKLSTTLVKDKCVNFNFNGLTGTGVLTTSKKQFLPFQQFGRDISDTTDAVRDPQTLEILDITPCSFGGVSVITPGTNTSNQVAVLYQDVNCTEVPMAIHAEQLTPAWRVYSAGANVFQTRAGCLVGAEHVNNSYECDIPVGAGICASYHSMSSFRSVNQRSIIAYTMSLGAENSVAYSNNSIAIPTNFTISVTTEILPVSMTKTSVDCTMYICGDSIECSNLLLQYGSFCTQLNRALTGIAVEQDKNTQEVFAQVKQIYKTPPIKDFGGFNFSQILPDPSKPSKRSFIEDLLFNKVTLADAGFIKQYGDCLGDIAARDLICAQKFNGLTVLPPLLTDEMIAQYTSALLAGTITSGWTFCAGAALQIPFAMQMAYRFNGIGVTQNVLYENQKLIANQFNSAIGKIQDSLSSTASALGKLQDVVNQNAQALNTLVKQLSSNFGAISSVLNDILSRLDKVEAEVQIDRLITGRLQSLQTYVTQQLIRAAEIRASANLAATKMSECVCGQSKRVDFCGKGYHLMSFPQSAPHGVVFLHVTYVPAQEKNFTTAPAICHEGKAHFPREGVFVSNGTHWFITQRNFYEPQIITTDNTFVSGSCDVVIGIVNNTVYDPLQPELDSFKEELDKYFKNHTSPDVDLGDISGINASVVNIQKEIDRLNEVAKNLNESLIDLQELGKYEQYIKGGGSGGGQIYEGKLTAEGLRFGIVASRFNHALVDRLVEGAIDAIVRHGGREEDITLVRVPGSWEIPVAAGELARKEDIDAVIAIGVLIRGATPHFDYIASEVSKGLADLSLELRKPITFGVITADTLEQAIERAGTKHGNKGWEAALSAIEMANLFKSLR

SEQ ID NO: 4225 - protein, 1365 aa, Artificial Sequence
  SARS-CoV-2/pangolin/Guangxi/P5E/2017__EPI_ISL_410541 spike protein (1-1205)(G883C_L1028C) LumSynth construct
MFVFLFVLPLVSSQCVNLTTRTGIPPGYTNSSTRGVYYPDKVFRSSILHLTQDLFLPFFSNVTWFNTITYQGGSKKFDNPVLPFNDGVYFASTEKSNIIRGWIFGTTLDARTQSLLIVNNATNVVIKVCEFQFCTDPFLGVYYHNNNKTWVENEFRVYSSANNCTFEYISQPFLMDLEGKQGNFKNLREFVFKNVDGYFKIYSKHTPIDLVRDLPRGFAALEPLVDLPIGINITRFQTLLALHRSYLTPGKLESGWTTGAAAYYVGYLQQRTFLLSYNQNGTITDAVDCSLDPLSETKCTLKSLTVEKGIYQTSNFRVQPTISIVRFPNITNLCPFGEVFNASKFASVYAWNRKRISNCVADYSVLYNSTSFSTFKCYGVSPTKLNDLCFTNVYADSFVVKGDEVRQIAPGQTGVIADYNYKLPDDFTGCVIAWNSVKQDALTGDNYGYLYRLFRKSKLKPFERDISTEIYQAGSTPCNGQVGLNCYYPLERYGFHPTTGVNYQPFRVVVLSFELLNGPATVCGPKLSTTLVKDKCVNFNFNGLTGTGVLTTSKKQFLPFQQFGRDISDTTDAVRDPQTLEILDITPCSFGGVSVITPGTNTSNQVAVLYQDVNCTEVPMAIHAEQLTPAWRVYSAGANVFQTRAGCLVGAEHVNNSYECDIPVGAGICASYHSMSSFRSVNQRSIIAYTMSLGAENSVAYSNNSIAIPTNFTISVTTEILPVSMTKTSVDCTMYICGDSIECSNLLLQYGSFCTQLNRALTGIAVEQDKNTQEVFAQVKQIYKTPPIKDFGGFNFSQILPDPSKPSKRSFIEDLLFNKVTLADAGFIKQYGDCLGDIAARDLICAQKFNGLTVLPPLLTDEMIAQYTSALLAGTITSGWTFCAGAALQIPFAMQMAYRFNGIGVTQNVLYENQKLIANQFNSAIGKIQDSLSSTASALGKLQDVVNQNAQALNTLVKQLSSNFGAISSVLNDILSRLDKVEAEVQIDRLITGRLQSLQTYVTQQLIRAAEIRASANLAATKMSECVCGQSKRVDFCGKGYHLMSFPQSAPHGVVFLHVTYVPAQEKNFTTAPAICHEGKAHFPREGVFVSNGTHWFITQRNFYEPQIITTDNTFVSGSCDVVIGIVNNTVYDPLQPELDSFKEELDKYFKNHTSPDVDLGDISGINASVVNIQKEIDRLNEVAKNLNESLIDLQELGKYEQYIKGGGSGGGQIYEGKLTAEGLRFGIVASRFNHALVDRLVEGAIDAIVRHGGREEDITLVRVPGSWEIPVAAGELARKEDIDAVIAIGVLIRGATPHFDYIASEVSKGLADLSLELRKPITFGVITADTLEQAIERAGTKHGNKGWEAALSAIEMANLFKSLR

SEQ ID NO: 4226 - protein, 1363 aa, Artificial Sequence
  SARS-CoV-2/pangolin/Guangxi/P1E/2017__EPI_ISL_410539 spike protein (1-1203)(G881C_L1026C) LumSynth construct
MFVFLFVLPLVSSQCVNLTTRTGIQPGYTNSSTRGVYYPDKVFRSSILHLTQDLFLPFFSNVTWFNTINYQGGFKKFDNPVLPFNDGVYFASTEKSNIIRGWIFGTTLDARTQSLLIVNNATNVVIKVCEFQFCTDPFLGVYYHNNNKTWVENEFRVYSSANNCTFEYISQPFLMDLEGKQGNFKNLREFVFKNVDGYFKIYSKHTPIDLVRDLPRGFAALEPLVDLPIGINITRFQTLLALHRSYLTPGKLESGWTTGAAAYYVGYLQQRTFLLSYNQNGTITDAVDCSLDPLSETKCTLKSLTVEKGIYQTSNFRVQPTISIVRFPNITNLCPFGEVFNASKFASVYAWNRKRISNCVADYSVLYNSTSFSTFKCYGVSPTKLNDLCFTNVYADSFVVKGDEVRQIAPGQTGVIADYNYKLPDDFTGCVIAWNSVKQDALTGGNYLYRLFRKSKLKPFERDISTEIYQAGSTPCNGQVGLNCYYPLERYGFHPTTGVNYQPFRVVVLSFELLNGPATVCGPKLSTTLVKDKCVNFNFNGLTGTGVLTTSKKQFLPFQQFGRDISDTTDAVRDPQTLEILDITPCSFGGVSVITPGTNTSNQVAVLYQDVNCTEVPMAIHAEQLTPAWRVYSAGANVFQTRAGCLVGAEHVNNSYECDIPVGAGICASYHSMSSLRSVNQRSIIAYTMSLGAENSVAYSNNSIAIPTNFTISVTTEILPVSMTKTSVDCTMYICGDSIECSNLLLQYGSFCTQLNRALTGIAVEQDKNTQEVFAQVKQIYKTPPIKDFGGFNFSQILPDPSKPSKRSFIEDLLFNKVTLADAGFIKQYGDCLGDIAARDLICAQKFNGLTVLPPLLTDEMIAQYTSALLAGTITSGWTFCAGAALQIPFAMQMAYRFNGIGVTQNVLYENQKLIANQFNSAIGKIQDSLSSTASALGKLQDVVNQNAQALNTLVKQLSSNFGAISSVLNDILSRLDKVEAEVQIDRLITGRLQSLQTYVTQQLIRAAEIRASANLAATKMSECVCGQSKRVDFCGKGYHLMSFPQSAPHGVVFLHVTYVPAQEKNFTTAPAICHEGKAHFPREGVFVSNGTHWFITQRNFYEPQIITTDNTFVSGSCDVVIGIVNNTVYDPLQPELDSFKEELDKYFKNHTSPDVDLGDISGINASVVNIQKEIDRLNEVAKNLNESLIDLQELGKYEQYIKGGGSGGGQIYEGKLTAEGLRFGIVASRFNHALVDRLVEGAIDAIVRHGGREEDITLVRVPGSWEIPVAAGELARKEDIDAVIAIGVLIRGATPHFDYIASEVSKGLADLSLELRKPITFGVITADTLEQAIERAGTKHGNKGWEAALSAIEMANLFKSLR

SEQ ID NO: 4227 - protein, 1371 aa, Artificial Sequence
  SARS-CoV-2/Wuhan/WIV05/2019__EPI_ISL_402128 spike protein (1-1211)(I909C_Y1047C) LumSynth construct
MFVFLVLLPLVSSQCVNLTTRTQLPPAYTNSFTRGVYYPDKVFRSSVLHSTQDLFLPFFSNVTWFHAIHVSGTNGTKRFDNPVLPFNDGVYFASTEKSNIIRGWIFGTTLDSKTQSLLIVNNATNVVIKVCEFQFCNDPFLGVYYHKNNKSWMESEFRVYSSANNCTFEYVSQPFLMDLEGKQGNFKNLREFVFKNIDGYFKIYSKHTPINLVRDLPQGFSALEPLVDLPIGINITRFQTLLALHRSYLTPGDSSSGWTAGAAAYYVGYLQPRTFLLKYNENGTITDAVDCALDPLSETKCTLKSFTVEKGIYQTSNFRVQPTESIVRFPNITNLCPFGEVFNATRFASVYAWNRKRISNCVADYSVLYNSASFSTFKCYGVSPTKLNDLCFTNVYADSFVIRGDEVRQIAPGQTGKIADYNYKLPDDFTGCVIAWNSNNLDSKVGGNYNYLYRLFRKSNLKPFERDISTEIYQAGSTPCNGVEGFNCYFPLQSYGFQPTNGVGYQPYRVVVLSFELLHAPATVCGPKKSTNLVKNKCVNFNFNGLTGTGVLTESNKKFLPFQQFGRDIADTTDAVRDPQTLEILDITPCSFGGVSVITPGTNTSNQVAVLYQDVNCTEVPVAIHADQLTPTWRVYSTGSNVFQTRAGCLIGAEHVNNSYECDIPIGAGICASYQTQTNSPRRARSVASQSIIAYTMSLGAENSVAYSNNSIAIPTNFTISVTTEILPVSMTKTSVDCTMYICGDSTECSNLLLQYGSFCTQLNRALTGIAVEQDKNTQEVFAQVKQIYKTPPIKDFGGFNFSQILPDPSKPSKRSFIEDLLFNKVTLADAGFIKQYGDCLGDIAARDLICAQKFNGLTVLPPLLTDEMIAQYTSALLAGTITSGWTFGAGAALQIPFAMQMAYRFNGCGVTQNVLYENQKLIANQFNSAIGKIQDSLSSTASALGKLQDVVNQNAQALNTLVKQLSSNFGAISSVLNDILSRLDKVEAEVQIDRLITGRLQSLQTYVTQQLIRAAEIRASANLAATKMSECVLGQSKRVDFCGKGCHLMSFPQSAPHGVVFLHVTYVPAQEKNFTTAPAICHDGKAHFPREGVFVSNGTHWFVTQRNFYEPQIITTDNTFVSGNCDVVIGIVNNTVYDPLQPELDSFKEELDKYFKNHTSPDVDLGDISGINASVVNIQKEIDRLNEVAKNLNESLIDLQELGKYEQYIKGGGSGGGQIYEGKLTAEGLRFGIVASRFNHALVDRLVEGAIDAIVRHGGREEDITLVRVPGSWEIPVAAGELARKEDIDAVIAIGVLIRGATPHFDYIASEVSKGLADLSLELRKPITFGVITADTLEQAIERAGTKHGNKGWEAALSAIEMANLFKSLR

SEQ ID NO: 4228 - protein, 1367 aa, Artificial Sequence
  SARS-CoV-2/bat/Yunnan/RaTG13/2013__EPI_ISL_402131 spike protein (1-1207)(I905C_Y1043C) LumSynth construct
MFVFLVLLPLVSSQCVNLTTRTQLPPAYTNSSTRGVYYPDKVFRSSVLHLTQDLFLPFFSNVTWFHAIHVSGTNGIKRFDNPVLPFNDGVYFASTEKSNIIRGWIFGTTLDSKTQSLLIVNNATNVVIKVCEFQFCNDPFLGVYYHKNNKSWMESEFRVYSSANNCTFEYVSQPFLMDLEGKQGNFKNLREFVFKNIDGYFKIYSKHTPINLVRDLPPGFSALEPLVDLPIGINITRFQTLLALHRSYLTPGDSSSGWTAGAAAYYVGYLQPRTFLLKYNENGTITDAVDCALDPLSETKCTLKSFTVEKGIYQTSNFRVQPTDSIVRFPNITNLCPFGEVFNATTFASVYAWNRKRISNCVADYSVLYNSTSFSTFKCYGVSPTKLNDLCFTNVYADSFVITGDEVRQIAPGQTGKIADYNYKLPDDFTGCVIAWNSKHIDAKEGGNFNYLYRLFRKANLKPFERDISTEIYQAGSKPCNGQTGLNCYYPLYRYGFYPTDGVGHQPYRVVVLSFELLNAPATVCGPKKSTNLVKNKCVNFNFNGLTGTGVLTESNKKFLPFQQFGRDIADTTDAVRDPQTLEILDITPCSFGGVSVITPGTNASNQVAVLYQDVNCTEVPVAIHADQLTPTWRVYSTGSNVFQTRAGCLIGAEHVNNSYECDIPIGAGICASYQTQTNSRSVASQSIIAYTMSLGAENSVAYSNNSIAIPTNFTISVTTEILPVSMTKTSVDCTMYICGDSTECSNLLLQYGSFCTQLNRALTGIAVEQDKNTQEVFAQVKQIYKTPPIKDFGGFNFSQILPDPSKPSKRSFIEDLLFNKVTLADAGFIKQYGDCLGDIAARDLICAQKFNGLTVLPPLLTDEMIAQYTSALLAGTITSGWTFGAGAALQIPFAMQMAYRFNGCGVTQNVLYENQKLIANQFNSAIGKIQDSLSSTASALGKLQDVVNQNAQALNTLVKQLSSNFGAISSVLNDILSRLDKVEAEVQIDRLITGRLQSLQTYVTQQLIRAAEIRASANLAATKMSECVLGQSKRVDFCGKGCHLMSFPQSAPHGVVFLHVTYVPAQEKNFTTAPAICHDGKAHFPREGVFVSNGTHWFVTQRNFYEPQIITTDNTFVSGSCDVVIGIVNNTVYDPLQPELDSFKEELDKYFKNHTSPDVDLGDISGINASVVNIQKEIDRLNEVAKNLNESLIDLQELGKYEQYIKGGGSGGGQIYEGKLTAEGLRFGIVASRFNHALVDRLVEGAIDAIVRHGGREEDITLVRVPGSWEIPVAAGELARKEDIDAVIAIGVLIRGATPHFDYIASEVSKGLADLSLELRKPITFGVITADTLEQAIERAGTKHGNKGWEAALSAIEMANLFKSLR

SEQ ID NO: 4229 - protein, 1371 aa, Artificial Sequence
  SARS-CoV-2/Wuhan/HBCDC-HB-01/2019__EPI_ISL_402132 spike protein (1-1211)(I909C_Y1047C) LumSynth construct
MFVFLVLLPLVSSQCVNLTTRTQLPPAYTNSITRGVYYPDKVFRSSVLHSTQDLFLPFFSNVTWFHAIHVSGTNGTKRFDNPVLPFNDGVYFASTEKSNIIRGWIFGTTLDSKTQSLLIVNNATNVVIKVCEFQFCNDPFLGVYYHKNNKSWMESEFRVYSSANNCTFEYVSQPFLMDLEGKQGNFKNLREFVFKNIDGYFKIYSKHTPINLVRDLPQGFSALEPLVDLPIGINITRFQTLLALHRSYLTPGDSSSGWTAGAAAYYVGYLQPRTFLLKYNENGTITDAVDCALDPLSETKCTLKSFTVEKGIYQTSNFRVQPTESIVRFPNITNLCPFGEVFNATRFASVYAWNRKRISNCVADYSVLYNSASFSTFKCYGVSPTKLNDLCFTNVYADSFVIRGDEVRQIAPGQTGKIADYNYKLPDDFTGCVIAWNSNNLDSKVGGNYNYLYRLFRKSNLKPFERDISTEIYQAGSTPCNGVEGFNCYFPLQSYGFQPTNGVGYQPYRVVVLSFELLHAPATVCGPKKSTNLVKNKCVNFNFNGLTGTGVLTESNKKFLPFQQFGRDIADTTDAVRDPQTLEILDITPCSFGGVSVITPGTNTSNQVAVLYQDVNCTEVPVAIHADQLTPTWRVYSTGSNVFQTRAGCLIGAEHVNNSYECDIPIGAGICASYQTQTNSPRRARSVASQSIIAYTMSLGAENSVAYSNNSIAIPTNFTISVTTEILPVSMTKTSVDCTMYICGDSTECSNLLLQYGSFCTQLNRALTGIAVEQDKNTQEVFAQVKQIYKTPPIKDFGGFNFSQILPDPSKPSKRSFIEDLLFNKVTLADAGFIKQYGDCLGDIAARDLICAQKFNGLTVLPPLLTDEMIAQYTSALLAGTITSGWTFGAGAALQIPFAMQMAYRFNGCGVTQNVLYENQKLIANQFNSAIGKIQDSLSSTASALGKLQDVVNQNAQALNTLVKQLSSNFGAISSVLNDILSRLDKVEAEVQIDRLITGRLQSLQTYVTQQLIRAAEIRASANLAATKMSECVLGQSKRVDFCGKGCHLMSFPQSAPHGVVFLHVTYVPAQEKNFTTAPAICHDGKAHFPREGVFVSNGTHWFVTQRNFYEPQIITTDNTFVSGNCDVVIGIVNNTVYDPLQPELDSFKEELDKYFKNHTSPDVDLGDISGINASVVNIQKEIDRLNEVAKNLNESLIDLQELGKYEQYIKGGGSGGGQIYEGKLTAEGLRFGIVASRFNHALVDRLVEGAIDAIVRHGGREEDITLVRVPGSWEIPVAAGELARKEDIDAVIAIGVLIRGATPHFDYIASEVSKGLADLSLELRKPITFGVITADTLEQAIERAGTKHGNKGWEAALSAIEMANLFKSLR

SEQ ID NO: 4230 - protein, 1371 aa, Artificial Sequence
  SARS-CoV-2/Guangdong/20SF028/2020__EPI_ISL_403936 spike protein (1-1211)(I909C_Y1047C) LumSynth construct
MFVFLVLLPLVSSQCVNLTTRTQLPPAYTNSFTRGVYYPDKVFRSSVLYSTQDLFLPFFSNVTWFHAIHVSGTNGTKRFDNPVLPFNDGVYFASTEKSNIIRGWIFGTTLDSKTQSLLIVNNATNVVIKVCEFQFCNDPFLGVYYHKNNKSWMESEFRVYSSANNCTFEYVSQPFLMDLEGKQGNFKNLREFVFKNIDGYFKIYSKHTPINLVRDLPQGFSALEPLVDLPIGINITRFQTLLALHRSYLTPGDSSSGWTAGAAAYYVGYLQPRTFLLKYNENGTITDAVDCALDPLSETKCTLKSFTVEKGIYQTSNFRVQPTESIVRFPNITNLCPFGEVFNATRFASVYAWNRKRISNCVADYSVLYNSASFSTFKCYGVSPTKLNDLCFTNVYADSFVIRGDEVRQIAPGQTGKIADYNYKLPDDFTGCVIAWNSNNLDSKVGGNYNYLYRLFRKSNLKPFERDISTEIYQAGSTPCNGVEGFNCYFPLQSYGFQPTNGVGYQPYRVVVLSFELLHAPATVCGPKKSTNLVKNKCVNFNFNGLTGTGVLTESNKKFLPFQQFGRDIADTTDAVRDPQTLEILDITPCSFGGVSVITPGTNTSNQVAVLYQDVNCTEVPVAIHADQLTPTWRVYSTGSNVFQTRAGCLIGAEHVNNSYECDIPIGAGICASYQTQTNSPRRARSVASQSIIAYTMSLGAENSVAYSNNSIAIPTNFTISVTTEILPVSMTKTSVDCTMYICGDSTECSNLLLQYGSFCTQLNRALTGIAVEQDKNTQEVFAQVKQIYKTPPIKDFGGFNFSQILPDPSKPSKRSFIEDLLFNKVTLADAGFIKQYGDCLGDIAARDLICAQKFNGLTVLPPLLTDEMIAQYTSALLAGTITSGWTFGAGAALQIPFAMQMAYRFNGCGVTQNVLYENQKLIANQFNSAIGKIQDSLSSTASALGKLQDVVNQNAQALNTLVKQLSSNFGAISSVLNDILSRLDKVEAEVQIDRLITGRLQSLQTYVTQQLIRAAEIRASANLAATKMSECVLGQSKRVDFCGKGCHLMSFPQSAPHGVVFLHVTYVPAQEKNFTTAPAICHDGKAHFPREGVFVSNGTHWFVTQRNFYEPQIITTDNTFVSGNCDVVIGIVNNTVYDPLQPELDSFKEELDKYFKNHTSPDVDLGDISGINASVVNIQKEIDRLNEVAKNLNESLIDLQELGKYEQYIKGGGSGGGQIYEGKLTAEGLRFGIVASRFNHALVDRLVEGAIDAIVRHGGREEDITLVRVPGSWEIPVAAGELARKEDIDAVIAIGVLIRGATPHFDYIASEVSKGLADLSLELRKPITFGVITADTLEQAIERAGTKHGNKGWEAALSAIEMANLFKSLR

SEQ ID NO: 4231 - protein, 1371 aa, Artificial Sequence
  SARS-CoV-2/Shenzhen/SZTH-001/2020__EPI_ISL_406592 spike protein (1-1211)(I909C_Y1047C) LumSynth construct
MFVFLVLLPLVSSQCVNLTTRTQLPPAYTNSFTRGVYYPDKVFRSSVLHSTQDLFLPFFSNVTWFHAIHVSGTNGTKRFDNPVLPFNDGVYFASTEKSNIIRGWIFGTTLDSKTQSLLIVNNATNVVIKVCEFQFCNDPFLGVYYHKNNKSWMESEFRVYSSANNCTFEYVSQPFLMDLEGKQGNFKNLREFVFKNIDGYFKIYSKHTPINLVRDLPQGFSALEPLVDLPIGINITRFQTLLALHRSYLTPGDSSSGWTAGAAAYYVGYLQPRTFLLKYNENGTITDAVDCALDPLSETKCTLKSFTVEKGIYQTSNFRVQPTESIVRFPNITNLCPFGEVFNATRFASVYAWNRKRISNCVADYSVLYNSASFSTFKCYGVSPTKLNDLCFTNVYADSFVIRGDEVRQIAPGQTGKIADYNYKLPDDFTGCVIAWNSNNLDSKVGGNYNYLYRLFRKSNLKPFERDISTEIYQAGSTPCNGVEGFNCYFPLQSYGFQPTNGVGYQPYRVVVLSFELLHAPATVCGPKKSTNLVKNKCVNFNFNGLTGTGVLTESNKKFLPFQQFGRDIADTTDAVRDPQTLEILDITPCSFGGVSVITPGTNTSNQVAVLYQDVNCTEVPVAIHADQLTPTWRVYSTGSNVFQTRAGCLIGAEHVNNSYECDIPIGAGICASYQTQTNSPRRARSVASQSIIAYTMSLGAENSVAYSNNSIAIPTNFTISVTTEILPVSMTKTSVDCTMYICGDSTECSNLLLQYGSFCTQLNRALTGIAVEQDKNTQEVFAQVKQIYKTPPIKDFGGFNFSQILPDPSKPSKRSFIEDLLFNKVTLADAGFIKQYGDCLGDIAARDLICAQKFNGLTVLPPLLTDEMIAQYTSALLAGTITSGWTFGAGAALQIPFAMQMAYRFNGCGVTQNVLYENQKLIANQFNSAIGKIQDSLSSTASALGKLQDVVNQNAQALNTLVKQLSSNFGAISSVLNDILSRLDKVEAEVQIDRLITGRLQSLQTYVTQQLIRAAEIRASANLAATKMSECVLGQSKRVDFCGKGCHLMSFPQSAPHGVVFLHVTYVPAQEKNFTTAPAICHDGKAHFPREGVFVSNGTHWFVTQRNFYEPQIITTDNTFVSGNCDVLIGIVNNTVYDPLQPELDSFKEELDKYFKNHTSPDVDLGDISGINASVVNIQKEIDRLNEVAKNLNESLIDLQELGKYEQYIKGGGSGGGQIYEGKLTAEGLRFGIVASRFNHALVDRLVEGAIDAIVRHGGREEDITLVRVPGSWEIPVAAGELARKEDIDAVIAIGVLIRGATPHFDYIASEVSKGLADLSLELRKPITFGVITADTLEQAIERAGTKHGNKGWEAALSAIEMANLFKSLR

SEQ ID NO: 4232 - protein, 1371 aa, Artificial Sequence
  SARS-CoV-2/Shenzhen/SZTH-004/2020__EPI_ISL_406595 spike protein (1-1211)(I909C_Y1047C) LumSynth construct
MFVFLVLLPLVSSQCVNLTTRTQLPPAYTNSFTRGVYYPDKVFRSSVLHSTQDLFLPFFSNVTWFHAIHVSGTNGTKRFDNPVLPFNDGVYFASTEKSNIIRGWIFGTTLDSKTQSLLIVNNATNVVIKVCEFQFCNDPFLGVYYHKNNKSWMESEFRVYSSANNCTFEYVSQPFLMDLEGKQGNFKNLREFVFKNIDGYFKIYSKHTPINLVRDLPQGFSALEPLVDLPIGINITRFQTLLALHRSYLTPGDSSSGWTAGAAAYYVGYLQPRTFLLKYNENGTITDAVDCALDPLSETKCTLKSFTVEKGIYQTSNFRVQPTESIVRFPNITNLCPFGEVFNATRFASVYAWDRKRISNCVAYYSVLYNSASFSTFKCYGVSPTKLNDLCFTNVYADSFVIRGDEVRQIAPGQTGKIADYNYKLPDDFTGCVIAWNSNNLDSKVGGNYNYLYRLFRKSNLKPFERDISTEIYQAGSTPCNGVEGFNCYFPLQSYGFQPTNGVGYQPYRVVVLSFELLHAPATVCGPKKSTNLVKNKCVNFNFNGLTGTGVLTESNKKFLPFQQFGRDIADTTDAVRDPQTLEILDITPCSFGGVSVITPGTNTSNQVAVLYQDVNCTEVPVAIHADQLTPTWRVYSTGSNVFQTRAGCLIGAEHVNNSYECDIPIGAGICASYQTQTNSPRRARSVASQSIIAYTMSLGAENSVAYSNNSIAIPTNFTISVTTEILPVSMTKTSVDCTMYICGDSTECSNLLLQYGSFCTQLNRALTGIAVEQDKNTQEVFAQVKQIYKTPPIKDFGGFNFSQILPDPSKPSKRSFIEDLLFNKVTLADAGFIKQYGDCLGDIAARDLICAQKFNGLTVLPPLLTDEMIAQYTSALLAGTITSGWTFGAGAALQIPFAMQMAYRFNGCGVTQNVLYENQKLIANQFNSAIGKIQDSLSSTASALGKLQDVVNQNAQALNTLVKQLSSNFGAISSVLNDILSRLDKVEAEVQIDRLITGRLQSLQTYVTQQLIRAAEIRASANLAATKMSECVLGQSKRVDFCGKGCHLMSFPQSAPHGVVFLHVTYVPAQEKNFTTAPAICHDGKAHFPREGVFVSNGTHWFVTQRNFYEPQIITTDNTFVSGNCDVVIGIVNNTVYDPLQPELDSFKEELDKYFKNHTSPDVDLGDISGINASVVNIQKEIDRLNEVAKNLNESLIDLQELGKYEQYIKGGGSGGGQIYEGKLTAEGLRFGIVASRFNHALVDRLVEGAIDAIVRHGGREEDITLVRVPGSWEIPVAAGELARKEDIDAVIAIGVLIRGATPHFDYIASEVSKGLADLSLELRKPITFGVITADTLEQAIERAGTKHGNKGWEAALSAIEMANLFKSLR

SEQ ID NO: 4233 - protein, 1371 aa, Artificial Sequence
  SARS-CoV-2/France/IDF0372/2020__EPI_ISL_406596 spike protein (1-1211)(I909C_Y1047C) LumSynth construct
MFVFLVLLPLVSSQCVNLTTRTQLPPAYTNSFTRGVYYPDKVFRSSVLHSTQDLFLPFFSNVTWFHAIHVSGTNGTKRFDNPVLPFNDGVYFASTEKSNIIRGWIFGTTLDSKTQSLLIVNNATNVVIKVCEFQFCNDPFLGVYYHKNNKSWMESEFRVYSSANNCTFEYVSQPFLMDLEGKQGNFKNLREFVFKNIDGYFKIYSKHTPINLVRDLPQGFSALEPLVDLPIGINITRFQTLLALHRSYLTPGDSSSGWTAGAAAYYVGYLQPRTFLLKYNENGTITDAVDCALDPLSETKCTLKSFTVEKGIYQTSNFRVQPTESIVRFPNITNLCPFGEVFNATRFASVYAWNRKRISNCVADYSFLYNSASFSTFKCYGVSPTKLNDLCFTNVYADSFVIRGDEVRQIAPGQTGKIADYNYKLPDDFTGCVIAWNSNNLDSKVGGNYNYLYRLFRKSNLKPFERDISTEIYQAGSTPCNGVEGFNCYFPLQSYGFQPTNGVGYQPYRVVVLSFELLHAPATVCGPKKSTNLVKNKCVNFNFNGLTGTGVLTESNKKFLPFQQFGRDIADTTDAVRDPQTLEILDITPCSFGGVSVITPGTNTSNQVAVLYQDVNCTEVPVAIHADQLTPTWRVYSTGSNVFQTRAGCLIGAEHVNNSYECDIPIGAGICASYQTQTNSPRRARSVASQSIIAYTMSLGAENSVAYSNNSIAIPTNFTISVTTEILPVSMTKTSVDCTMYICGDSTECSNLLLQYGSFCTQLNRALTGIAVEQDKNTQEVFAQVKQIYKTPPIKDFGGFNFSQILPDPSKPSKRSFIEDLLFNKVTLADAGFIKQYGDCLGDIAARDLICAQKFNGLTVLPPLLTDEMIAQYTSALLAGTITSGWTFGAGAALQIPFAMQMAYRFNGCGVTQNVLYENQKLIANQFNSAIGKIQDSLSSTASALGKLQDVVNQNAQALNTLVKQLSSNFGAISSVLNDILSRLDKVEAEVQIDRLITGRLQSLQTYVTQQLIRAAEIRASANLAATKMSECVLGQSKRVDFCGKGCHLMSFPQSAPHGVVFLHVTYVPAQEKNFTTAPAICHDGKAHFPREGVFVSNGTHWFVTQRNFYEPQIITTDNTFVSGNCDVVIGIVNNTVYDPLQPELDSFKEELDKYFKNHTSPDVDLGDISGINASVVNIQKEIDRLNEVAKNLNESLIDLQELGKYEQYIKGGGSGGGQIYEGKLTAEGLRFGIVASRFNHALVDRLVEGAIDAIVRHGGREEDITLVRVPGSWEIPVAAGELARKEDIDAVIAIGVLIRGATPHFDYIASEVSKGLADLSLELRKPITFGVITADTLEQAIERAGTKHGNKGWEAALSAIEMANLFKSLR

SEQ ID NO: 4234 - protein, 1371 aa, Artificial Sequence
  SARS-CoV-2/Australia/VIC01/2020__EPI_ISL_406844 spike protein (1-1211)(I909C_Y1047C) LumSynth construct
MFVFLVLLPLVSSQCVNLTTRTQLPPAYTNSFTRGVYYPDKVFRSSVLHSTQDLFLPFFSNVTWFHAIHVSGTNGTKRFDNPVLPFNDGVYFASTEKSNIIRGWIFGTTLDSKTQSLLIVNNATNVVIKVCEFQFCNDPFLGVYYHKNNKSWMESEFRVYSSANNCTFEYVSQPFLMDLEGKQGNFKNLREFVFKNIDGYFKIYSKHTPINLVRDLPQGFSALEPLVDLPIGINITRFQTLLALHRRYLTPGDSSSGWTAGAAAYYVGYLQPRTFLLKYNENGTITDAVDCALDPLSETKCTLKSFTVEKGIYQTSNFRVQPTESIVRFPNITNLCPFGEVFNATRFASVYAWNRKRISNCVADYSVLYNSASFSTFKCYGVSPTKLNDLCFTNVYADSFVIRGDEVRQIAPGQTGKIADYNYKLPDDFTGCVIAWNSNNLDSKVGGNYNYLYRLFRKSNLKPFERDISTEIYQAGSTPCNGVEGFNCYFPLQSYGFQPTNGVGYQPYRVVVLSFELLHAPATVCGPKKSTNLVKNKCVNFNFNGLTGTGVLTESNKKFLPFQQFGRDIADTTDAVRDPQTLEILDITPCSFGGVSVITPGTNTSNQVAVLYQDVNCTEVPVAIHADQLTPTWRVYSTGSNVFQTRAGCLIGAEHVNNSYECDIPIGAGICASYQTQTNSPRRARSVASQSIIAYTMSLGAENSVAYSNNSIAIPTNFTISVTTEILPVSMTKTSVDCTMYICGDSTECSNLLLQYGSFCTQLNRALTGIAVEQDKNTQEVFAQVKQIYKTPPIKDFGGFNFSQILPDPSKPSKRSFIEDLLFNKVTLADAGFIKQYGDCLGDIAARDLICAQKFNGLTVLPPLLTDEMIAQYTSALLAGTITSGWTFGAGAALQIPFAMQMAYRFNGCGVTQNVLYENQKLIANQFNSAIGKIQDSLSSTASALGKLQDVVNQNAQALNTLVKQLSSNFGAISSVLNDILSRLDKVEAEVQIDRLITGRLQSLQTYVTQQLIRAAEIRASANLAATKMSECVLGQSKRVDFCGKGCHLMSFPQSAPHGVVFLHVTYVPAQEKNFTTAPAICHDGKAHFPREGVFVSNGTHWFVTQRNFYEPQIITTDNTFVSGNCDVVIGIVNNTVYDPLQPELDSFKEELDKYFKNHTSPDVDLGDISGINASVVNIQKEIDRLNEVAKNLNESLIDLQELGKYEQYIKGGGSGGGQIYEGKLTAEGLRFGIVASRFNHALVDRLVEGAIDAIVRHGGREEDITLVRVPGSWEIPVAAGELARKEDIDAVIAIGVLIRGATPHFDYIASEVSKGLADLSLELRKPITFGVITADTLEQAIERAGTKHGNKGWEAALSAIEMANLFKSLR

SEQ ID NO: 4235 - protein, 1371 aa, Artificial Sequence
  SARS-CoV-2/Germany/BavPat1/2020__EPI_ISL_406862 spike protein (1-1211)(I909C_Y1047C) LumSynth construct
MFVFLVLLPLVSSQCVNLTTRTQLPPAYTNSFTRGVYYPDKVFRSSVLHSTQDLFLPFFSNVTWFHAIHVSGTNGTKRFDNPVLPFNDGVYFASTEKSNIIRGWIFGTTLDSKTQSLLIVNNATNVVIKVCEFQFCNDPFLGVYYHKNNKSWMESEFRVYSSANNCTFEYVSQPFLMDLEGKQGNFKNLREFVFKNIDGYFKIYSKHTPINLVRDLPQGFSALEPLVDLPIGINITRFQTLLALHRSYLTPGDSSSGWTAGAAAYYVGYLQPRTFLLKYNENGTITDAVDCALDPLSETKCTLKSFTVEKGIYQTSNFRVQPTESIVRFPNITNLCPFGEVFNATRFASVYAWNRKRISNCVADYSVLYNSASFSTFKCYGVSPTKLNDLCFTNVYADSFVIRGDEVRQIAPGQTGKIADYNYKLPDDFTGCVIAWNSNNLDSKVGGNYNYLYRLFRKSNLKPFERDISTEIYQAGSTPCNGVEGFNCYFPLQSYGFQPTNGVGYQPYRVVVLSFELLHAPATVCGPKKSTNLVKNKCVNFNFNGLTGTGVLTESNKKFLPFQQFGRDIADTTDAVRDPQTLEILDITPCSFGGVSVITPGTNTSNQVAVLYQGVNCTEVPVAIHADQLTPTWRVYSTGSNVFQTRAGCLIGAEHVNNSYECDIPIGAGICASYQTQTNSPRRARSVASQSIIAYTMSLGAENSVAYSNNSIAIPTNFTISVTTEILPVSMTKTSVDCTMYICGDSTECSNLLLQYGSFCTQLNRALTGIAVEQDKNTQEVFAQVKQIYKTPPIKDFGGFNFSQILPDPSKPSKRSFIEDLLFNKVTLADAGFIKQYGDCLGDIAARDLICAQKFNGLTVLPPLLTDEMIAQYTSALLAGTITSGWTFGAGAALQIPFAMQMAYRFNGCGVTQNVLYENQKLIANQFNSAIGKIQDSLSSTASALGKLQDVVNQNAQALNTLVKQLSSNFGAISSVLNDILSRLDKVEAEVQIDRLITGRLQSLQTYVTQQLIRAAEIRASANLAATKMSECVLGQSKRVDFCGKGCHLMSFPQSAPHGVVFLHVTYVPAQEKNFTTAPAICHDGKAHFPREGVFVSNGTHWFVTQRNFYEPQIITTDNTFVSGNCDVVIGIVNNTVYDPLQPELDSFKEELDKYFKNHTSPDVDLGDISGINASVVNIQKEIDRLNEVAKNLNESLIDLQELGKYEQYIKGGGSGGGQIYEGKLTAEGLRFGIVASRFNHALVDRLVEGAIDAIVRHGGREEDITLVRVPGSWEIPVAAGELARKEDIDAVIAIGVLIRGATPHFDYIASEVSKGLADLSLELRKPITFGVITADTLEQAIERAGTKHGNKGWEAALSAIEMANLFKSLR

SEQ ID NO: 4236 - protein, 1371 aa, Artificial Sequence
  SARS-CoV-2/Wuhan/HBCDC-HB-02/2020__EPI_ISL_412978 spike protein (1-1211)(I909C_Y1047C) LumSynth construct
MFVFLVLLPLVSSQCVNLTTRTQLPPAYTNSFTRGVYYPDKVFRSSVLHSTQDLFLPFFSNVTWFHAIHVSGTNGTKRFDNPVLPFNDGVYFASTEKSNIIRGWIFGTTLDSKTQSLLIVNNATNVVIKVCEFQFCNDPFLGVYYHKNNKSWMESEFRVYSSANNCTFEYVSQPFLMDLEGKQGNFKNLREFVFKNIDGYFKIYSKHTPINLVRDLPQGFSALEPLVDLPIGINITRFQTLLALHRSYLTPGDSSSGWTAGAAAYYVGYLQPRTFLLKYNENGTITDAVDCALDPLSETKCTLKSFTVEKGIYQTSNFRVQPTESIVRFPNITNLCPFGEVFNATRFASVYAWNRKRISNCVADYSVLYNSASFSTFKCYGVSPTKLNDLCFTNVYADSFVIRGDEVRQIAPGQTGKIADYNYKLPDDFTGCVIAWNSNNLDSKVGGNYNYLYRLFRKSNLKPFERDISTEIYQAGSTPCNGVEGFNCYFPLQSYGFQPTNGVGYQPYRVVVLSFELLHAPATVCGPKKSTNLVKNKCVNFNFNGLTGTGVLTESNKKFLPFQQFGRDIADTTDAVRDPQTLEILDITPCSFGGVSVITPGTNTSNQVAVLYQDVNCTEVPVAIHADQLTPTWRVYSTGSNVFQTRAGCLIGAEHVNNSYECDIPIGAGICASYQTQTNSPRRARSVASQSIIAYTMSLGAENSVAYSNNSIAIPTNFTISVTTEILPVSMTKTSVDCTMYICGDSTECSNFLLQYGSFCTQLNRALTGIAVEQDKNTQEVFAQVKQIYKTPPIKDFGGFNFSQILPDPSKPSKRSFIEDLLFNKVTLADAGFIKQYGDCLGDIAARDLICAQKFNGLTVLPPLLTDEMIAQYTSALLAGTITSGWTFGAGAALQIPFAMQMAYRFNGCGVTQNVLYENQKLIANQFNSAIGKIQDSLSSTASALGKLQDVVNQNAQALNTLVKQLSSNFGAISSVLNDILSRLDKVEAEVQIDRLITGRLQSLQTYVTQQLIRAAEIRASANLAATKMSECVLGQSKRVDFCGKGCHLMSFPQSAPHGVVFLHVTYVPAQEKNFTTAPAICHDGKAHFPREGVFVSNGTHWFVTQRNFYEPQIITTDNTFVSGNCDVVIGIVNNTVYDPLQPELDSFKEELDKYFKNHTSPDVDLGDISGINASVVNIQKEIDRLNEVAKNLNESLIDLQELGKYEQYIKGGGSGGGQIYEGKLTAEGLRFGIVASRFNHALVDRLVEGAIDAIVRHGGREEDITLVRVPGSWEIPVAAGELARKEDIDAVIAIGVLIRGATPHFDYIASEVSKGLADLSLELRKPITFGVITADTLEQAIERAGTKHGNKGWEAALSAIEMANLFKSLR

SEQ ID NO: 4237 - protein, 1371 aa, Artificial Sequence
  SARS-CoV-2/Australia/QLD02/2020__EPI_ISL_407896 spike protein (1-1211)(I909C_Y1047C) LumSynth construct
MFVFLVLLPLVSSQCVNLTTRTQLPPAYTNSFTRGVYYPDKVFRSSVLHSTQDLFLPFFSNVTWFHAIHVSGTNGTKRFDNPVLPFNDGVYFASTEKSNIIRGWIFGTTLDSKTQSLLIVNNATNVVIKVCEFQFCNDPFLGVYYHKNNKSWMESEFRVYSSANNCTFEYVSQPFLMDLEGKQGNFKNLREFVFKNIDGYFKIYSKHTPINLVRDLPQGFSALEPLVDLPIGINITRFQTLLALHRSYLTPGDSSSGWTAGAAAYYVGYLQPRTFLLKYNENGTITDAVDCALDPLSETKCTLKSFTVEKGIYQTSNFRVQPTESIVRFPNITNLCPFGEVFNATRFASVYAWNRKRISNCVADYSVLYNSASFSTFKCYGVSPTKLNDLCFTNVYADSFVIRGDEVRQIAPGQTGKIADYNYKLPDDFTGCVIAWNSNNLDSKVGGNYNYLYRLFRKSNLKPFERDISTEIYQAGSTPCNGVEGFNCYFPLQSYGFQPTNGVGYQPYRVVVLSFELLHAPATVCGPKKSTNLVKNKCVNFNFNGLTGTGVLTESNKKFLPFQQFGRDIADTTDAVRDPQTLEILDITPCSFGGVSVITPGTNTSNQVAVLYQDVNCTEVPVAIHADQLTPTWRVYSTGSNVFQTRAGCLIGAEHVNNSYECDIPIGAGICASYQTQTNSPRRARSVASQSIIAYTMSLGAENSVAYSNNSIAIPTNFTISVTTEILPVSMTKTSVDCTMYICGDSTECSNLLLQYGSFCTQLNRALTGIAVEQDKNTQEVFAQVKQIYKTPPIKDFGGFNFSQILPDPSKPSKRSFIEDLLFNKVTLADAGFIKQYGDCLGDIAARDLICAQKFNGLTVLPPLLTDEMIAQYTSALLAGTITSGWTFGAGAALQIPFAMQMAYRFNGCGVTQNVLYENQKLIANQFNSAIGKIQDSLSSTASALGKLQDVVNQNAQALNTLVKQLSSNFGAISSVLNDILSRLDKVEAEVQIDRLITGRLQSLQTYVTQQLIRAAEIRASANLAATKMSECVLGQSKRVDFCGKGCHLMSFPQSAPHGVVFLHVTYVPAQEKNFTTAPAICHDGKAHFPREGVFVSNGTHWFVTQRNFYEPQIITTDNTFVSGNCDVVIGIVNNTVYDPLQLELDSFKEELDKYFKNHTSPDVDLGDISGINASVVNIQKEIDRLNEVAKNLNESLIDLQELGKYEQYIKGGGSGGGQIYEGKLTAEGLRFGIVASRFNHALVDRLVEGAIDAIVRHGGREEDITLVRVPGSWEIPVAAGELARKEDIDAVIAIGVLIRGATPHFDYIASEVSKGLADLSLELRKPITFGVITADTLEQAIERAGTKHGNKGWEAALSAIEMANLFKSLR

SEQ ID NO: 4238 - protein, 1371 aa, Artificial Sequence
  SARS-CoV-2/India/1-31/2020__EPI_ISL_413523 spike protein (1-1211)(I909C_Y1047C) LumSynth construct
MFVFLVLLPLVSSQCVNLTTRTQLPPAYTNSFTRGVYYPDKVFRSSVLHSTQDLFLPFFSNVTWFHAIHVSGTNGTKRFDNPVLPFNDGVYFASTEKSNIIRGWIFGTTLDSKTQSLLIVNNATNVVIKVCEFQFCNDPFLGVYYHKNNKSWMESEFRVYSSANNCTFEYVSQPFLMDLEGKQGNFKNLREFVFKNIDGYFKIYSKHTPINLVRDLPQGFSALEPLVDLPIGINITRFQTLLALHRSYLTPGDSSSGWTAGAAAYYVGYLQPRTFLLKYNENGTITDAVDCALDPLSETKCTLKSFTVEKGIYQTSNFRVQPTESIVRFPNITNLCPFGEVFNATRFASVYAWNRKRISNCVADYSVLYNSASFSTFKCYGVSPTKLNDLCFTNVYADSFVIRGDEVRQIAPGQTGKIADYNYKLPDDFTGCVIAWNSNNLDSKVGGNYNYLYRLFRKSNLKPFERDISTEIYQAGSTPCNGVEGFNCYFPLQSYGFQPTNGVGYQPYRVVVLSFELLHAPATVCGPKKSTNLVKNKCVNFNFNGLTGTGVLTESNKKFLPFQQFGRDIADTTDAVRDPQTLEILDITPCSFGGVSVITPGTNTSNQVAVLYQDVNCTEVPVAIHADQLTPTWRVYSTGSNVFQTRAGCLIGAEHVNNSYECDIPIGAGICASYQTQTNSPRRARSVASQSIIAYTMSLGAENSVAYSNNSIAIPTNFTISVTTEILPVSMTKTSVDCTMYICGDSTECSNLLLQYGSFCTQLNRALTGIAVEQDKNTQEVFAQVKQIYKTPPIKDFGGFNFSQILPDPSKPSKRSFIEDLLFNKVTLADAGFIKQYGDCLGDIAARDLICAQKFNGLTVLPPLLTDEMIAQYTSALLAGTITSGWTFGAGAALQIPFAMQMAYRFNGCGVTQNVLYENQKLIANQFNSVIGKIQDSLSSTASALGKLQDVVNQNAQALNTLVKQLSSNFGAISSVLNDILSRLDKVEAEVQIDRLITGRLQSLQTYVTQQLIRAAEIRASANLAATKMSECVLGQSKRVDFCGKGCHLMSFPQSAPHGVVFLHVTYVPAQEKNFTTAPAICHDGKAHFPREGVFVSNGTHWFVTQRNFYEPQIITTDNTFVSGNCDVVIGIVNNTVYDPLQPELDSFKEELDKYFKNHTSPDVDLGDISGINASVVNIQKEIDRLNEVAKNLNESLIDLQELGKYEQYIKGGGSGGGQIYEGKLTAEGLRFGIVASRFNHALVDRLVEGAIDAIVRHGGREEDITLVRVPGSWEIPVAAGELARKEDIDAVIAIGVLIRGATPHFDYIASEVSKGLADLSLELRKPITFGVITADTLEQAIERAGTKHGNKGWEAALSAIEMANLFKSLR

SEQ ID NO: 4239 - protein, 1371 aa, Artificial Sequence
  SARS-CoV-2/Guangdong/GD2020087-P0008/2020__EPI_ISL_413863 spike protein (1-1211)(I909C_Y1047C) LumSynth construct
MFVFLVLLPLVSSQCVNLTTRTQLPPAYTNSFTRGVYYPDKVFRSSVLHSTQDLFLPFFSNVTWFHAIHVSGTNGTKRFDNPVLPFNDGVYFASTEKSNIIRGWIFGTTLDSKTQSLLIVNNATNVVIKVCEFQFCNDPFLGVYYHKNNKSWMESEFRVYSSANNCTFEYVSQPFLMDLEGKQGNFKNLREFVFKNIDGYFKIYSKHTPINLVRDLPQGFSALEPLVDLPIGINITRFQTLLALHRSYLTPGDSSSGWTAGAAAYYVGYLQPRTFLLKYNENGTITDAVDCALDPLSETKCTLKSFTVEKGIYQTSNFRVQPTESIVRFPNITNLCPFGEVFNATRFASVYAWNRKRISNCVADYSVLYNSASFSTFKCYGVSPTKLNDLCFTNVYADSFVIRGDEVREIAPGQTGKIADYNYKLPDDFTGCVIAWNSNNLDSKVGGNYNYLYRLFRKSNLKPFERDISTEIYQAGSTPCNGVEGFNCYFPLQSYGFQPTNGVGYQPYRVVVLSFELLHAPATVCGPKKSTNLVKNKCVNFNFNGLTGTGVLTESNKKFLPFQQFGRDIADTTDAVRDPQTLEILDITPCSFGGVSVITPGTNTSNQVAVLYQDVNCTEVPVAIHADQLTPTWRVYSTGSNVFQTRAGCLIGAEHVNNSYECDIPIGAGICASYQTQTNSPRRARSVASQSIIAYTMSLGAENSVAYSNNSIAIPTNFTISVTTEILPVSMTKTSVDCTMYICGDSTECSNLLLQYGSFCTQLNRALTGIAVEQDKNTQEVFAQVKQIYKTPPIKDFGGFNFSQILPDPSKPSKRSFIEDLLFNKVTLADAGFIKQYGDCLGDIAARDLICAQKFNGLTVLPPLLTDEMIAQYTSALLAGTITSGWTFGAGAALQIPFAMQMAYRFNGCGVTQNVLYENQKLIANQFNSAIGKIQDSLSSTASALGKLQDVVNQNAQALNTLVKQLSSNFGAISSVLNDILSRLDKVEAEVQIDRLITGRLQSLQTYVTQQLIRAAEIRASANLAATKMSECVLGQSKRVDFCGKGCHLMSFPQSAPHGVVFLHVTYVPAQEKNFTTAPAICHDGKAHFPREGVFVSNGTHWFVTQRNFYEPQIITTDNTFVSGNCDVVIGIVNNTVYDPLQPELDSFKEELDKYFKNHTSPDVDLGDISGINASVVNIQKEIDRLNEVAKNLNESLIDLQELGKYEQYIKGGGSGGGQIYEGKLTAEGLRFGIVASRFNHALVDRLVEGAIDAIVRHGGREEDITLVRVPGSWEIPVAAGELARKEDIDAVIAIGVLIRGATPHFDYIASEVSKGLADLSLELRKPITFGVITADTLEQAIERAGTKHGNKGWEAALSAIEMANLFKSLR

SEQ ID NO: 4240 - protein, 1371 aa, Artificial Sequence
  SARS-CoV-2/Sweden/01/2020__EPI_ISL_411951 spike protein (1-1211)(I909C_Y1047C) LumSynth construct
MFVFLVLLPLVSSQCVNLTTRTQLPPAYTNSFTRGVYYPDKVFRSSVLHSTQDLFLPFFSNVTWFHAIHVSGTNGTKRFDNPVLPFNDGVYFASTEKSNIIRGWIFGTTLDSKTQSLLIVNNATNVVIKVCEFQFCNDPFLGVYYHKNNKSWMESEFRVYSSANNCTFEYVSQPFLMDLEGKQGNFKNLREFVFKNIDGYFKIYSKHTPINLVRDLPQGFSALEPLVDLPIGINITRFQTLLALHRSYLTPGDSSSGWTAGAAAYYVGYLQPRTFLLKYNENGTITDAVDCALDPLSETKCTLKSFTVEKGIYQTSNFRVQPTESIVRFPNITNLCPFGEVFNATRFASVYAWNRKRISNCVADYSVLYNSASFSTFKCYGVSPTKLNDLCFTNVYADSFVIRGDEVRQIAPGQTGKIADYNYKLPDDFTGCVIAWNSNNLDSKVGGNYNYLYRLFRKSNLKPFERDISTEIYQAGSTPCNGVEGFNCYFPLQSYGFQPTNGVGYQPYRVVVLSFELLHAPATVCGPKKSTNLVKNKCVNFNFNGLTGTGVLTESNKKFLPFQQFGRDIADTTDAVRDPQTLEILDITPCSFGGVSVITPGTNTSNQVAVLYQDVNCTEVPVAIHADQLTPTWRVYSTGSNVFQTRAGCLIGAEHVNNSYECDIPIGAGICASYQTQTNSPRRARSVASQSIIAYTMSLGAENSVAYSNNSIAIPTNFTISVTTEILPVSMTKTSVDCTMYICGDSTECSNLLLQYGSFCTQLNRALTGIAVEQDKNTQEVFAQVKQIYKTPPIKDCGGFNFSQILPDPSKPSKRSFIEDLLFNKVTLADAGFIKQYGDCLGDIAARDLICAQKFNGLTVLPPLLTDEMIAQYTSALLAGTITSGWTFGAGAALQIPFAMQMAYRFNGCGVTQNVLYENQKLIANQFNSAIGKIQDSLSSTASALGKLQDVVNQNAQALNTLVKQLSSNFGAISSVLNDILSRLDKVEAEVQIDRLITGRLQSLQTYVTQQLIRAAEIRASANLAATKMSECVLGQSKRVDFCGKGCHLMSFPQSAPHGVVFLHVTYVPAQEKNFTTAPAICHDGKAHFPREGVFVSNGTHWFVTQRNFYEPQIITTDNTFVSGNCDVVIGIVNNTVYDPLQPELDSFKEELDKYFKNHTSPDVDLGDISGINASVVNIQKEIDRLNEVAKNLNESLIDLQELGKYEQYIKGGGSGGGQIYEGKLTAEGLRFGIVASRFNHALVDRLVEGAIDAIVRHGGREEDITLVRVPGSWEIPVAAGELARKEDIDAVIAIGVLIRGATPHFDYIASEVSKGLADLSLELRKPITFGVITADTLEQAIERAGTKHGNKGWEAALSAIEMANLFKSLR

SEQ ID NO: 4241 - protein, 1371 aa, Artificial Sequence
  SARS-CoV-2/Tianmen/HBCDC-HB-07/2020__EPI_ISL_412983 spike protein (1-1211)(I909C_Y1047C) LumSynth construct
MFVFLVLLPLVSSQCVNLTTRTQLPPAYTNSFTRGVYYPDKVFRSSVLHSTQDLFLPFFSNVTWFHAIHVSGTNGTKRFDNPVLPFNDGVYFASTEKSNIIRGWIFGTTLDSKTQSLLIVNNATNVVIKVCEFQFCNDPFLGVYYHKNNKSWMESEFRVYSSANNCTFEYVSQPFLMDLEGKQGNFKNLREFVFKNIDGYFKIYSKHTPINLVRDLPQGFSALEPLVDLPIGINITRFQTLLALHRSYLTPGDSSSGWTAGAAAYYVGYLQPRTFLLKYNENGTITDAVDCALDPLSETKCTLKSFTVEKGIYQTSNFRVQPTESIVRFPNITNLCPFGEVFNATRFASVYAWNRKRISNCVADYSVLYNSASFSTFKCYGVSPTKLNDLCFTNVYADSFVIRGDEVRQIAPGQTGKIADYNYKLPDDFTGCVIAWNSNNLDSKVGGNYNYLYRLFRKSNLKPFERDISTEIYQAGSTPCNGVEGFNCYFPLQSYGFQPTNGVGYQPYRVVVLSFELLHAPATVCGPKKSTNLVKNKCVNFNFNGLTGTGVLTESNKKFLPFQQFGRDIADTTDAVRDPQTLEILDITPCSFGGVSVITPGTNTSNQVAVLYQDLNCTEVPVAIHADQLTPTWRVYSTGSNVFQTRAGCLIGAEHVNNSYECDIPIGAGICASYQTQTNSPRRARSVASQSIIAYTMSLGAENSVAYSNNSIAIPTNFTISVTTEILPVSMTKTSVDCTMYICGDSTECSNLLLQYGSFCTQLNRALTGIAVEQDKNTQEVFAQVKQIYKTPPIKDFGGFNFSQILPDPSKPSKRSFIEDLLFNKVTLADAGFIKQYGDCLGDIAARDLICAQKFNGLTVLPPLLTDEMIAQYTSALLAGTITSGWTFGAGAALQIPFAMQMAYRFNGCGVTQNVLYENQKLIANQFNSAIGKIQDSLSSTASALGKLQDVVNQNAQALNTLVKQLSSNFGAISSVLNDILSRLDKVEAEVQIDRLITGRLQSLQTYVTQQLIRAAEIRASANLAATKMSECVLGQSKRVDFCGKGCHLMSFPQSAPHGVVFLHVTYVPAQEKNFTTAPAICHDGKAHFPREGVFVSNGTHWFVTQRNFYEPQIITTDNTFVSGNCDVVIGIVNNTVYDPLQPELDSFKEELDKYFKNHTSPDVDLGDISGINASVVNIQKEIDRLNEVAKNLNESLIDLQELGKYEQYIKGGGSGGGQIYEGKLTAEGLRFGIVASRFNHALVDRLVEGAIDAIVRHGGREEDITLVRVPGSWEIPVAAGELARKEDIDAVIAIGVLIRGATPHFDYIASEVSKGLADLSLELRKPITFGVITADTLEQAIERAGTKHGNKGWEAALSAIEMANLFKSLR

SEQ ID NO: 4242 - protein, 1371 aa, Artificial Sequence
  SARS-CoV-2/Hong Kong/case42_VM20002493/2020__EPI_ISL_414527 spike protein (1-1211)(I909C_Y1047C) LumSynth construct
MFVFLVLLPLVSSQCVNLTTRTQLPPAYTNSFTRGVYYPDKVFRSSVLHSTQDLFLPFFSNVTWFHAIHVSGTNGTKRFDNPVLPFNDGVYFASTEKSNIIRGWIFGTTLDSKTQSLLIVNNATNVVIKVCEFQFCNDPFLGVYYHKNNKSWMESEFRVYSSANNCTFEYVSQPFLMDLEGKQGNFKNLREFVFKNIDGYFKIYSKHTPINLVRDLPQGFSALEPLVDLPIGINITRFQTLLALHRSYLTPGDSSSGWTAGAAAYYVGYLQPRTFLLKYNENGTITDAVDCALDPLSETKCTLKSFTVEKGIYQTSNFRVQPTESIVRFPNITNLCPFGEVFNATRFASVYAWNRKRISNCVADYSVLYNSASFSTFKCYGVSPTKLNDLCFTNVYADSFVIRGDEVRQIAPGQTGKIADYNYKLPDDFTGCVIAWNSNNLDSKVGGNYNYLYRLFRKSNLKPFERDISTEIYQAGSTPCNGVEGFNCYFPLQSYGFQPTNGVGYQPYRVVVLSFELLHAPATVCGPKKSTNLVKNKCVNFNFNGLTGTGVLTESNKKFLPFQQFGRDIADTTDAVRDPQTLEILDITPCSFGGVSVITPGTNTSNQVAVLYQDVNCTEVPVAIHADQLTPTWRVYSTGSNVFQTRAGCLIGAEHVNNSYECDIPIGAGICASYQTQTNSPRRARSVASQSIIAYTMSLGAENSVAYSNNSIAIPTNFAISVTTEILPVSMTKTSVDCTMYICGDSTECSNLLLQYGSFCTQLNRALTGIAVEQDKNTQEVFAQVKQIYKTPPIKDFGGFNFSQILPDPSKPSKRSFIEDLLFNKVTLADAGFIKQYGDCLGDIAARDLICAQKFNGLTVLPPLLTDEMIAQYTSALLAGTITSGWTFGAGAALQIPFAMQMAYRFNGCGVTQNVLYENQKLIANQFNSAIGKIQDSLSSTASALGKLQDVVNQNAQALNTLVKQLSSNFGAISSVLNDILSRLDKVEAEVQIDRLITGRLQSLQTYVTQQLIRAAEIRASANLAATKMSECVLGQSKRVDFCGKGCHLMSFPQSAPHGVVFLHVTYVPAQEKNFTTAPAICHDGKAHFPREGVFVSNGTHWFVTQRNFYEPQIITTDNTFVSGNCDVVIGIVNNTVYDPLQPELDSFKEELDKYFKNHTSPDVDLGDISGINASVVNIQKEIDRLNEVAKNLNESLIDLQELGKYEQYIKGGGSGGGQIYEGKLTAEGLRFGIVASRFNHALVDRLVEGAIDAIVRHGGREEDITLVRVPGSWEIPVAAGELARKEDIDAVIAIGVLIRGATPHFDYIASEVSKGLADLSLELRKPITFGVITADTLEQAIERAGTKHGNKGWEAALSAIEMANLFKSLR

SEQ ID NO: 4243 - protein, 1371 aa, Artificial Sequence
  SARS-CoV-2/USA/CruiseA-23/2020__EPI_ISL_414482 spike protein (1-1211)(I909C_Y1047C) LumSynth construct
MFVFLVLLPLVSSQCVNLTTRTQLPPAYTNSFTRGVYYPDKVFRSSVLHSTQDLFLPFFSNVTWFHAIHVSGTNGTKRFDNPVLPFNDGVYFASTEKSNIIRGWIFGTTLDSKTQSLLIVNNATNVVIKVCEFQFCNDPFLGVYYHKNNKSWMESEFRVYSSANNCTFEYVSQPFLMDLEVKQGNFKNLREFVFKNIDGYFKIYSKHTPINLVRDLPQGFSALEPLVDLPIGINITRFQTLLALHRSYLTPGDSSSGWTAGAAAYYVGYLQPRTFLLKYNENGTITDAVDCALDPLSETKCTLKSFTVEKGIYQTSNFRVQPTESIVRFPNITNLCPFGEVFNATRFASVYAWNRKRISNCVADYSVLYNSASFSTFKCYGVSPTKLNDLCFTNVYADSFVIRGDEVRQIAPGQTGKIADYNYKLPDDFTGCVIAWNSNNLDSKVGGNYNYLYRLFRKSNLKPFERDISTEIYQAGSTPCNGVEGFNCYFPLQSYGFQPTNGVGYQPYRVVVLSFELLHAPATVCGPKKSTNLVKNKCVNFNFNGLTGTGVLTESNKKFLPFQQFGRDIADTTDAVRDPQTLEILDITPCSFGGVSVITPGTNTSNQVAVLYQDVNCTEVPVAIHADQLTPTWRVYSTGSNVFQTRAGCLIGAEHVNNSYECDIPIGAGICASYQTQTNSPRRARSVASQSIIAYTMSLGAENSVAYSNNSIAIPTNFTISVTTEILPVSMTKTSVDCTMYICGDSTECSNLLLQYGSFCTQLNRALTGIAVEQDKNTQEVFAQVKQIYKTPPIKDFGGFNFSQILPDPSKPSKRSFIEDLLFNKVTLADAGFIKQYGDCLGDIAARDLICAQKFNGLTVLPPLLTDEMIAQYTSALLAGTITSGWTFGAGAALQIPFAMQMAYRFNGCGVTQNVLYENQKLIANQFNSAIGKIQDSLSSTASALGKLQDVVNQNAQALNTLVKQLSSNFGAISSVLNDILSRLDKVEAEVQIDRLITGRLQSLQTYVTQQLIRAAEIRASANLAATKMSECVLGQSKRVDFCGKGCHLMSFPQSAPHGVVFLHVTYVPAQEKNFTTAPAICHDGKAHFPREGVFVSNGTHWFVTQRNFYEPQIITTDNTFVSGNCDVVIGIVNNTVYDPLQPELDSFKEELDKYFKNHTSPDVDLGDISGINASVVNIQKEIDRLNEVAKNLNESLIDLQELGKYEQYIKGGGSGGGQIYEGKLTAEGLRFGIVASRFNHALVDRLVEGAIDAIVRHGGREEDITLVRVPGSWEIPVAAGELARKEDIDAVIAIGVLIRGATPHFDYIASEVSKGLADLSLELRKPITFGVITADTLEQAIERAGTKHGNKGWEAALSAIEMANLFKSLR

SEQ ID NO: 4244 - protein, 1371 aa, Artificial Sequence
  SARS-CoV-2/Hong Kong/case85_VM20002868/2020__EPI_ISL_414519 spike protein (1-1211)(I909C_Y1047C) LumSynth construct
MFVFLVLVPLVSSQCVNLTTRTQLPPAYTNSFTRGVYYPDKVFRSSVLHSTQDLFLPFFSNVTWFHAIHVSGTNGTKRFDNPVLPFNDGVYFASTEKSNIIRGWIFGTTLDSKTQSLLIVNNATNVVIKVCEFQFCNDPFLGVYYHKNNKSWMESEFRVYSSANNCTFEYVSQPFLMDLEGKQGNFKNLREFVFKNIDGYFKIYSKHTPINLVRDLPQGFSALEPLVDLPIGINITRFQTLLALHRSYLTPGDSSSGWTAGAAAYYVGYLQPRTFLLKYNENGTITDAVDCALDPLSETKCTLKSFTVEKGIYQTSNFRVQPTESIVRFPNITNLCPFGEVFNATRFASVYAWNRKRISNCVADYSVLYNSASFSTFKCYGVSPTKLNDLCFTNVYADSFVIRGDEVRQIAPGQTGKIADYNYKLPDDFTGCVIAWNSNNLDSKVGGNYNYLYRLFRKSNLKPFERDISTEIYQAGSTPCNGVEGFNCYFPLQSYGFQPTNGVGYQPYRVVVLSFELLHAPATVCGPKKSTNLVKNKCVNFNFNGLTGTGVLTESNKKFLPFQQFGRDIADTTDAVRDPQTLEILDITPCSFGGVSVITPGTNTSNQVAVLYQDVNCTEVPVAIHADQLTPTWRVYSTGSNVFQTRAGCLIGAEHVNNSYECDIPIGAGICASYQTQTNSPRRARSVASQSIIAYTMSLGAENSVAYSNNSIAIPTNFTISVTTEILPVSMTKTSVDCTMYICGDSTECSNLLLQYGSFCTQLNRALTGIAVEQDKNTQEVFAQVKQIYKTPPIKDFGGFNFSQILPDPSKPSKRSFIEDLLFNKVTLADAGFIKQYGDCLGDIAARDLICAQKFNGLTVLPPLLTDEMIAQYTSALLAGTITSGWTFGAGAALQIPFAMQMAYRFNGCGVTQNVLYENQKLIANQFNSAIGKIQDSLSSTASALGKLQDVVNQNAQALNTLVKQLSSNFGAISSVLNDILSRLDKVEAEVQIDRLITGRLQSLQTYVTQQLIRAAEIRASANLAATKMSECVLGQSKRVDFCGKGCHLMSFPQSAPHGVVFLHVTYVPAQEKNFTTAPAICHDGKAHFPREGVFVSNGTHWFVTQRNFYEPQIITTDNTFVSGNCDVVIGIVNNTVYDPLQPELDSFKEELDKYFKNHTSPDVDLGDISGINASVVNIQKEIDRLNEVAKNLNESLIDLQELGKYEQYIKGGGSGGGQIYEGKLTAEGLRFGIVASRFNHALVDRLVEGAIDAIVRHGGREEDITLVRVPGSWEIPVAAGELARKEDIDAVIAIGVLIRGATPHFDYIASEVSKGLADLSLELRKPITFGVITADTLEQAIERAGTKHGNKGWEAALSAIEMANLFKSLR

SEQ ID NO: 4245 - protein, 1371 aa, Artificial Sequence; identical to SEQ ID NO: 4235
  SARS-CoV-2/England/200990660/2020__EPI_ISL_414523 spike protein (1-1211)(I909C_Y1047C) LumSynth construct

SEQ ID NO: 4246 - protein, 1371 aa, Artificial Sequence
  SARS-CoV-2/Australia/NSW09/2020__EPI_ISL_413595 spike protein (1-1211)(I909C_Y1047C) LumSynth construct
MFVFLVLLPLVSSQCVNLTTRTQLPPAYTNSFTRGVYYPDKVFRSSVLHSTQDLFLPFFSNVTWFHAIHVSGTNGTKRFDNPVLPFNDGVYFASTEKSNIIRGWIFGTTLDSKTQSLLIVNNATNVVIKVCEFQFCNDPFLGVYYHKNNKSWMESEFRVYSSANNCTFEYVSQPFLMDLEGKQGNFKNLREFVFKNIDGYFKIYSKHTPINLVRDLPQGFSALEPLVDLPIGINITRFQTLLALHRSYLTPGDSSSGWTAGAAAYYVGYLQPRTFLLKYNENGTITDAVDCALDPLSETKCTLKSFTVEKGIYQTSNFRVQPTESIVRFPNITNLCPFGEVFNATRFASVYAWNRKRISNCVADYSVLYNSASFSTFKCYGVSPTKLNDLCFTNVYADSFVIRGDEVRQIAPGQTGKIADYNYKLPDDFTGCVIAWNSNNLDSKVGGNYNYLYRLFRKSNLKPFERDISTEIYQAGSTPCNGVEGFNCYFPLQSYGFQPTNGVGYQPYRVVVLSFELLHAPATVCGPKKSTNLVKNKCVNFNFNGLTGTGVLTESNKKFLPFQQFGRDIADTTDAVRDPQTLEILDITPCSFGGVSVITPGTNTSNQVAVLYQDVNCTEVPVAIHADQLTPTWRVYSTGSNVFQTRAGCLIGAEHVNNSYECDIPIGAGICASYQTQTNSPRRARSVASQSIIAYTMSLGAENSVAYSNNSIAIPTNFTISVTTEILPVSMTKTSVDCTMYICGDSTECSNLLLQYGSFCTQLNRALTGIAVEQDKNTQEVFAQVKQIYKTPPIKDFGGFNFSQILPDPSKPSKRSFIEDLLFNKVTLADAGFIKQYGDCLGDIAARDLICAQKFNGLTVLPPLLTDEMIAQYTSALLAGTITSGWTFGAGAALQIPFAMQMAYRFNGCGVTQNVLYENQKLIANQFNSAIGKIQDSLSFTASALGKLQDVVNQNAQALNTLVKQLSSNFGAISSVLNDILSRLDKVEAEVQIDRLITGRLQSLQTYVTQQLIRAAEIRASANLAATKMSECVLGQSKRVDFCGKGCHLMSFPQSAPHGVVFLHVTYVPAQEKNFTTAPAICHDGKAHFPREGVFVSNGTHWFVTQRNFYEPQIITTDNTFVSGNCDVVIGIVNNTVYDPLQPELDSFKEELDKYFKNHTSPDVDLGDISGINASVVNIQKEIDRLNEVAKNLNESLIDLQELGKYEQYIKGGGSGGGQIYEGKLTAEGLRFGIVASRFNHALVDRLVEGAIDAIVRHGGREEDITLVRVPGSWEIPVAAGELARKEDIDAVIAIGVLIRGATPHFDYIASEVSKGLADLSLELRKPITFGVITADTLEQAIERAGTKHGNKGWEAALSAIEMANLFKSLR

SEQ ID NO: 4247 - protein, 1371 aa, Artificial Sequence; identical to SEQ ID NO: 4227
  SARS-CoV-2/Australia/NSW10/2020__EPI_ISL_413596 spike protein (1-1211)(I909C_Y1047C) LumSynth construct

SEQ ID NO: 4248 - protein, 1371 aa, Artificial Sequence
  SARS-CoV-2/Switzerland/1000477797/2020__EPI_ISL_413023 spike protein (1-1211)(I909C_Y1047C) LumSynth construct
MFVFLVLLPLVSSQCVNLTTRTQLPPAYTNSFTRGVYYPDKVFRSSVLHSTQDLFLPFFSNVTWFHAIHVSGTNGTKRFDNPVLPFNDGVYFASTEKSNIIRGWIFGTTLDSKTQSLLIVNNATNVVIKVCEFQFCNDPFLGVYYHKNNKSWMESEFRVYSSANNCTFEYVSQPFLMDLEGKQGNFKNLREFVFKNIDGYFNIYSKHTPINLVRDLPQGFSALEPLVDLPIGINITRFQTLLALHRSYLTPGDSSSGWTAGAAAYYVGYLQPRTFLLKYNENGTITDAVDCALDPLSETKCTLKSFTVEKGIYQTSNFRVQPTESIVRFPNITNLCPFGEVFNATRFASVYAWNRKRISNCVADYSVLYNSASFSTFKCYGVSPTKLNDLCFTNVYADSFVIRGDEVRQIAPGQTGKIADYNYKLPDDFTGCVIAWNSNNLDSKVGGNYNYLYRLFRKSNLKPFERDISTEIYQAGSTPCNGVEGFNCYFPLQSYGFQPTNGVGYQPYRVVVLSFELLHAPATVCGPKKSTNLVKNKCVNFNFNGLTGTGVLTESNKKFLPFQQFGRDIADTTDAVRDPQTLEILDITPCSFGGVSVITPGTNTSNQVAVLYQGVNCTEVPVAIHADQLTPTWRVYSTGSNVFQTRAGCLIGAEHVNNSYECDIPIGAGICASYQTQTNSPRRARSVASQSIIAYTMSLGAENSVAYSNNSIAIPTNFTISVTTEILPVSMTKTSVDCTMYICGDSTECSNLLLQYGSFCTQLNRALTGIAVEQDKNTQEVFAQVKQIYKTPPIKDFGGFNFSQILPDPSKPSKRSFIEDLLFNKVTLADAGFIKQYGDCLGDIAARDLICAQKFNGLTVLPPLLTDEMIAQYTSALLAGTITSGWTFGAGAALQIPFAMQMAYRFNGCGVTQNVLYENQKLIANQFNSAIGKIQDSLSSTASALGKLQDVVNQNAQALNTLVKQLSSNFGAISSVLNDILSRLDKVEAEVQIDRLITGRLQSLQTYVTQQLIRAAEIRASANLAATKMSECVLGQSKRVDFCGKGCHLMSFPQSAPHGVVFLHVTYVPAQEKNFTTAPAICHDGKAHFPREGVFVSNGTHWFVTQRNFYEPQIITTDNTFVSGNCDVVIGIVNNTVYDPLQPELDSFKEELDKYFKNHTSPDVDLGDISGINASVVNIQKEIDRLNEVAKNLNESLIDLQELGKYEQYIKGGGSGGGQIYEGKLTAEGLRFGIVASRFNHALVDRLVEGAIDAIVRHGGREEDITLVRVPGSWEIPVAAGELARKEDIDAVIAIGVLIRGATPHFDYIASEVSKGLADLSLELRKPITFGVITADTLEQAIERAGTKHGNKGWEAALSAIEMANLFKSLR

SEQ ID NO: 4249 - protein, 1371 aa, Artificial Sequence
  SARS-CoV-2/Belgium/BA-02291/2020__EPI_ISL_415159 spike protein (1-1211)(I909C_Y1047C) LumSynth construct
MFVFLVLLPLVSSQCVNLTTRTQLPPAYTNSFTRGVYYPDKVFRSSVLHSTQDLFLPFFSNVTWFHAIHVSGTNGTKRFDNPVLPFNDGVYFASTEKSNIIRGWIFGTTLDSKTQSLLIVNNATNVVIKVCEFQFCNDPFLGVYYHKNNKSWMESEFRVYSSANNCTFEYVSQPFLMDLEGKQGNFKNLREFVFKNIDGYFKIYSKHTPINLVRDLPQGFSALEPLVDLPIGINITRFQTLLALHRSYLTPGDSSSGWTAGAAAYYVGYLQPRTFLLKYNENGTITDAVDCALDPLSETKCTLKSFTVEKGIYQTSNFRVQPTESIVRFPNITNLCPFGEVFNATRFASVYAWNRKRISNCVADYSVLYNSASFSTFKCYGVSPTKLNDLCFTNVYADSFVIRGDEVRQIAPGQTGKIADYNYKLPDDFTGCVIAWNSNNLDSKVGGNYNYLYRLFRRSNLKPFERDISTEIYQAGSTPCNGVEGFNCYFPLQSYGFQPTNGVGYQPYRVVVLSFELLPAPATVCGPKKSTNLVKNKCVNFNFNGLTGTGVLTESNKKFLPFQQFGRDIADTTDAVRDPQTLEILDITPCSFGGVSVITPGTNTSNQVAVLYQGVNCTEVPVAIHADQLTPTWRVYSTGSNVFQTRAGCLIGAEHVNNSYECDIPIGAGICASYQTQTNSPRRARSVASQSIIAYTMSLGAENSVAYSNNSIAIPTNFTISVTTEILPVSMTKTSVDCTMYICGDSTECSNLLLQYGSFCTQLNRALTGIAVEQDKNTQEVFAQVKQIYKTPPIKDFGGFNFSQILPDPSKPSKRSFIEDLLFNKVTLADAGFIKQYGDCLGDIAARDLICAQKFNGLTVLPPLLTDEMIAQYTSALLAGTITSGWTFGAGAALQIPFAMQMAYRFNGCGVTQNVLYENQKLIANQFNSAIGKIQDSLSSAAPALGKLQDVVNQNAQALNTLVKQLSSNFGAISSVLNDILSRLDKVEAEVQIDRLITGRLQSLQTYVTQQLIRAAEIRASANLAATKMSECVLGQSKRVDFCGKGCHLMSFPQSAPHGVVFLHVTYVPAQEKNFTTAPAICHDGKAHFPREGVFVSNGTHWFVTQRNFYEPQIITTDNTFVSGNCDVVIGIVNNTVYDPLQPELDSFKEELDKYFKNHTSPDVDLGDISGINASVVNIQKEIDRLNEVAKNLNESLIDLQELGKYEQYIKGGGSGGGQIYEGKLTAEGLRFGIVASRFNHALVDRLVEGAIDAIVRHGGREEDITLVRVPGSWEIPVAAGELARKEDIDAVIAIGVLIRGATPHFDYIASEVSKGLADLSLELRKPITFGVITADTLEQAIERAGTKHGNKGWEAALSAIEMANLFKSLR

SEQ ID NO: 4250 - protein, 1371 aa, Artificial Sequence
  SARS-CoV-2/USA/WA8-UW5/2020__EPI_ISL_413486 spike protein (1-1211)(I909C_Y1047C) LumSynth construct
MFVFLVLLPLVSSQCVNLTTRTQLPPAYTNSFTRGVYYPDKVFRSSVLHSTQDLFLPFFSNVTWFHAIHVSGTNGTKRFDNPVLPFNDGVYFASTEKSNIIRGWIFGTTLDSKTQSLLIVNNATNVVIKVCEFQFCNDPFLGVYYHKNNKSWMESEFRVYSSANNCTFEYVSQPFLMDLEGKQGNFKNLREFVFKNIDGYFKIYSKHTPINLVRDLPQGFSALEPLVDLPIGINITRFQTLLALHRSYLTPGDSSSGWTAGAAAYYVGYLQPRTFLLKYNENGTITDAVDCALDPLSETKCTLKSFTVEKGIYQTSNFRVQPTESIVRFPNITNLCPFGEVFNATRFASVYAWNRKRISNCVADYSVLYNSASFSTFKCYGVSPTKLNDLCFTNVYADSFVIRGDEVRQIAPGQTGKIADYNYKLPDDFTGCVIAWNSNNLDSKVGGNYNYLYRLFRKSNLKPFERDISTEIYQAGSTPCNGVEGFNCYFPLQSYGFQPTNGVGYQPYRVVVLSFELLHAPATVCGPKKSTNLVKNKCVNFNFNGLTGTGVLTESNKKFLPFQQFGRDIADTTDAVRDPQTLEILDITPCSFGGVSVITPGTNTSNQVAVLYQDVNCTEVPVAIHADQLTPTWRVYSTGSNVFQTRAGCLIGAEYVNNSYECDIPIGAGICASYQTQTNSPRRARSVASQSIIAYTMSLGAENSVAYSNNSIAIPTNFTISVTTEILPVSMTKTSVDCTMYICGDSTECSNLLLQYGSFCTQLNRALTGIAVEQDKNTQEVFAQVKQIYKTPPIKDFGGFNFSQILPDPSKPSKRSFIEDLLFNKVTLADAGFIKQYGDCLGDIAARDLICAQKFNGLTVLPPLLTDEMIAQYTSALLAGTITSGWTFGAGAALQIPFAMQMAYRFNGCGVTQNVLYENQKLIANQFNSAIGKIQDSLSSTASALGKLQDVVNQNAQALNTLVKQLSSNFGAISSVLNDILSRLDKVEAEVQIDRLITGRLQSLQTYVTQQLIRAAEIRASANLAATKMSECVLGQSKRVDFCGKGCHLMSFPQSAPHGVVFLHVTYVPAQEKNFTTAPAICHDGKAHFPREGVFVSNGTHWFVTQRNFYEPQIITTDNTFVSGNCDVVIGIVNNTVYDPLQPELDSFKEELDKYFKNHTSPDVDLGDISGINASVVNIQKEIDRLNEVAKNLNESLIDLQELGKYEQYIKGGGSGGGQIYEGKLTAEGLRFGIVASRFNHALVDRLVEGAIDAIVRHGGREEDITLVRVPGSWEIPVAAGELARKEDIDAVIAIGVLIRGATPHFDYIASEVSKGLADLSLELRKPITFGVITADTLEQAIERAGTKHGNKGWEAALSAIEMANLFKSLR

SEQ ID NO: 4251 - protein, 1371 aa, Artificial Sequence
  SARS-CoV-2/England/20102000506/2020__EPI_ISL_415147 spike protein (1-1211)(I909C_Y1047C) LumSynth construct
MFVFLVLLPLVSSQCVNLTTRTQLPPAYTNSFTRGVYYPDKVFRSSVLHSTQDLFLPFFSNVTWFHAIHVSGTNGTKRFDNPVLPFNDGVYFASTEKSNIIRGWIFGTTLDSKTQSLLIVNNATNVVIKVCEFQFCNDPFLGVYYHKNNKSWMESEFRVYSSANNCTFEYVSQPFLMDLEGKQGNFKNLREFVFKNIDGYFKIYSKHTPINLVRDLPQGFSALEPLVDLPIGINITRFQTLLALHRSYLTPGDSSSGWTAGAAAYYVGYLQPRTFLLKYNENGTITDAVDCALDPLSETKCTLKSFTVEKGIYQTSNFRVQPTESIVRFPNITNLCPFGEVFNATRFASVYAWNRKRISNCVADYSVLYNSASFSTFKCYGVSPTKLNDLCFTNVYADSFVIRGDEVRQIAPGQTGKIADYNYKLPDDFTGCVIAWNSNNLDSKVGGNYNYLYRLFRKSNLKPFERDISTEIYQAGSTPCNGVEGFNCYFPLQSYGFQPTNGVGYQPYRVVVLSFELLHAPATVCGPKKSTNLVKNKCVNFNFNGLTGTGVLTESNKKFLPFQQFGRDIADTTDAVRDPQTLEILDITPCSFGGVSVITPGTNTSNQVAVLYQGVNCTEVPVAIHADQLTPTWRVYSTGSNVFQTRAGCLIGAEHVNNSYECDIPIGAGICASYQTQTNSPRRARSVASQSIIAYTMSLGAENSVAYSNNSIAIPTNFTISVTTEILPVSMTKTSVDCTMYICGDSTECSNLLLQYGSFCTQLNRALTGIAVEQDKNTQEVFAQVKQIYKTPPIKDFGGFNFSQILPDPSKPSKRSFIEDLLFNKVTLADAGFIKQYGYCLGDIAARDLICAQKFNGLTVLPPLLTDEMIAQYTSALLAGTITSGWTFGAGAALQIPFAMQMAYRFNGCGVTQNVLYENQKLIANQFNSAIGKIQDSLSSTASALGKLQDVVNQNAQALNTLVKQLSSNFGAISSVLNDILSRLDKVEAEVQIDRLITGRLQSLQTYVTQQLIRAAEIRASANLAATKMSECVLGQSKRVDFCGKGCHLMSFPQSAPHGVVFLHVTYVPAQEKNFTTAPAICHDGKAHFPREGVFVSNGTHWFVTQRNFYEPQIITTDNTFVSGNCDVVIGIVNNTVYDPLQPELDSFKEELDKYFKNHTSPDVDLGDISGINASVVNIQKEIDRLNEVAKNLNESLIDLQELGKYEQYIKGGGSGGGQIYEGKLTAEGLRFGIVASRFNHALVDRLVEGAIDAIVRHGGREEDITLVRVPGSWEIPVAAGELARKEDIDAVIAIGVLIRGATPHFDYIASEVSKGLADLSLELRKPITFGVITADTLEQAIERAGTKHGNKGWEAALSAIEMANLFKSLR

SEQ ID NO: 4252 - protein, 1371 aa, Artificial Sequence
  SARS-CoV-2/Belgium/VAG-03013/2020__EPI_ISL_415155 spike protein (1-1211)(I909C_Y1047C) LumSynth construct
MFVFLVLLPLVSSQCVNLTTRTQLPPAYTNSFTRGVYYPDKVFRSSVLHSTQDLFLPFFSNVTWFHAIHVSGTNGTKRFDNPVLPFNDGVYFASTEKSNIIRGWIFGTTLDSKTQSLLIVNNATNVVIKVCEFQFCNDPFLGVYYHKNNKSWMESEFRVYSSANNCTFEYVSQPFLMDLEGKQGNFKNLREFVFKNIDGYFKIYSKHTPINLVRDLPQGFSALEPLVDLPIGINITRFQTLLALHRSYLTPGDSSSGWTAGAAAYYVGYLQPRTFLLKYNENGTITDAVDCALDPLSETKCTLKSFTVEKGIYQTSNFRVQPTESIVRFPNITNLCPFGEVFNATRFASVYAWNRKRISNCVADYSVLYNSASFSTFKCYGVSPTKLNDLCFTNVYADSFVIRGDEVRQIAPGQTGKIADYNYKLPDDFTGCVIAWNSNNLDSKVGGNYNYLYRLFRKSNLKPFERDISTEIYQAGSTPCNGVEGFNCYFPLQSYGFQPTNGVGYQPYRVVVLSFELLHAPATVCGPKKSTNLVKNKCVNFNFNGLTGTGVLTESNKKFLPFQQFGRDIADTTDAVRDPQTLEILDITPCSFGGVSVITPGTNTSNQVAVLYQGVNCTEVPVAIHADQLTPTWRVYSTGSNVFQTRAGCLIGAEHVNNSYECDIPIGAGICASYQTQTNSPRRARSVASQSIIAYTMSLGAENSVAYSNNSIAIPTNFTISVTTEILPVSMTKTSVDCTMYICGDSTECSNLLLQYGSFCTQLNRALTGIAVEQDKNTQEVFAQVKQIYKTPPIKDFGGFNFSQILPDPSKPSKRSFIEDLLFNKVTLADAGFIKQYGDCLGDIAARDLICAQKFNGLTVLPPLLTDEMIAQYTSALLAGTITSGWTFGAGAALQIPFAMQMAYRFNGCGVTQNVLYENQKLIANQFNSAIGKIQDSLSSTATALGKLQDVVNQNAQALNTLVKQLSSNFGAISSVLNDILSRLDKVEAEVQIDRLITGRLQSLQTYVTQQLIRAAEIRASANLAATKMSECVLGQSKRVDFCGKGCHLMSFPQSAPHGVVFLHVTYVPAQEKNFTTAPAICHDGKAHFPREGVFVSNGTHWFVTQRNFYEPQIITTDNTFVSGNCDVVIGIVNNTVYDPLQPELDSFKEELDKYFKNHTSPDVDLGDISGINASVVNIQKEIDRLNEVAKNLNESLIDLQELGKYEQYIKGGGSGGGQIYEGKLTAEGLRFGIVASRFNHALVDRLVEGAIDAIVRHGGREEDITLVRVPGSWEIPVAAGELARKEDIDAVIAIGVLIRGATPHFDYIASEVSKGLADLSLELRKPITFGVITADTLEQAIERAGTKHGNKGWEAALSAIEMANLFKSLR

SEQ ID NO: 4253 - protein, 1371 aa, Artificial Sequence
  SARS-CoV-2/Belgium/BC-03016/2020__EPI_ISL_415157 spike protein (1-1211)(I909C_Y1047C) LumSynth construct
MFVFLVLLPLVSSQCVNLTTRTQLPPAYTNSFTRGVYYPDKVFRSSVLHSTQDLFLPFFSNVTWFHAIHVSGTNGTKRFDNPVLPFNDGVYFASTEKSNIIRGWIFGTTLDSKTQSLLIVNNATNVVIKVCEFQFCNDPFLGVYYHKNNKSWMESEFRVYSSANNCTFEYVSQPFLMDLEGKQGNFKNLREFVFKNIDGYFKIYSKHTPINLVRDLPQGFSALEPLVDLPIGINITRFQTLLALHRSYLTPGDSSSGWTAGAAAYYVGYLQPRTFLLKYNENGTITDAVDCALDPLSETKCTLKSFTVEKGIYQTSNFRVQPTESIVRFPNITNLCPFGEVFNATRFASVYAWNRKRISNCVADYSVLYNSASFSTFKCYGVSPTKLNDLCFTNVYADSFVIRGDEVRQIAPGQTGKIADYNYKLPDDFTGCVIAWNSNNLDSKVGGNYNYLYRLFRKSNLKPFERDISTEIYQAGSTPCNGVEGFNCYFPLQSYGFQPTNGVGYQPYRVVVLSFELLHAPATVCGPKKSTNLVKNKCVNFNFNGLTGTGVLTESNKKFLPFQQFGRDIADTTDAVRDPQTLEILDITPCSFGGVSVITPGTNTSNQVAVLYQGVNCTEVPVAIHADQLTPTWRVYSTGSNVFQTRAGCLIGAEHVNNSYECDIPIGAGICASYQTQTNSPRRARSVASQSIIAYTMSLGAENSVAYSNNSIAIPTNFTISVTTEILPVSMTKTSVDCTMYICGDSTECSNLLLQYGSFCTQLNRALTGIAVEQDKNTQEVFAQVKQIYKTPPIKDFGGFNFSQILPDPSKPSKRSFIEDLLFNKVTLADAGFIKQYGDCLGDIAARDLICAQKFNGLTVLPPLLTDEMIAQYTSALLAGTITSGWTFGAGAALQIPFAMQMAYRFNGCGVTQNVLYENQKLIANQFNSAIGKIQDSLSSTAPALGKLQDVVNQNAQALNTLVKQLSSNFGAISSVLNDILSRLDKVEAEVQIDRLITGRLQSLQTYVTQQLIRAAEIRASANLAATKMSECVLGQSKRVDFCGKGCHLMSFPQSAPHGVVFLHVTYVPAQEKNFTTAPAICHDGKAHFPREGVFVSNGTHWFVTQRNFYEPQIITTDNTFVSGNCDVVIGIVNNTVYDPLQPELDSFKEELDKYFKNHTSPDVDLGDISGINASVVNIQKEIDRLNEVAKNLNESLIDLQELGKYEQYIKGGGSGGGQIYEGKLTAEGLRFGIVASRFNHALVDRLVEGAIDAIVRHGGREEDITLVRVPGSWEIPVAAGELARKEDIDAVIAIGVLIRGATPHFDYIASEVSKGLADLSLELRKPITFGVITADTLEQAIERAGTKHGNKGWEAALSAIEMANLFKSLR

SEQ ID NO: 4254 - protein, 1371 aa, Artificial Sequence
  SARS-CoV-2/Germany/BavPat3/2020__EPI_ISL_414521 spike protein (1-1211)(I909C_Y1047C) LumSynth construct
MFVFLVLLPLVSSQCVNLTTRTQLPPAYTNSFTRGVYYPDKVFRSSVLHSTQDLFLPFFSNVTWFHAIHVSGTNGTKRFDNPVLPFNDGVYFASTEKSNIIRGWIFGTTLDSKTQSLLIVNNATNVVIKVCEFQFCNDPFLGVYYHKNNKSWMESEFRVYSSANNCTFEYVSQPFLMDLEGKQGNFKNLREFVFKNIDGYFKIYSKHTPINLVRDLPQGFSALEPLVDLPIGINITRFQTLLALHRSYLTPGDSSSGWTAGAAAYYVGYLQPRTFLLKYNENGTITDAVDCALDPLSETKCTLKSFTVEKGIYQTSNFRVQPTESIVRFPNITNLCPFGEVFNATRFASVYAWNRKRISNCVADYSVLYNSASFSTFKCYGVSPTKLNDLCFTNVYADSFVIRGDEVRQIAPGQTGKIADYNYKLPDDFTGCVIAWNSNNLDSKVGGNYNYLYRLFRKSNLKPFERDISTEIYQAGSTPCNGVEGFNCYFPLQSYGFQPTNGVGYQPYRVVVLSFELLHAPATVCGPKKSTNLVKNKCVNFNFNGLTGTGVLTESNKKFLPFQQFGRDIADTTDAVRDPQTLEILDITPCSFGGVSVITPGTNTSNQVAVLYQDVNCTEVPVAIHADQLTPTWRVYSTGSNVFQTRAGCLIGAEHVNNSYECDIPIGAGICASYQTQTNSPRRARSVASQSIIAYTMSLGAENSVAYSNNSIAIPTNFTISVTTEILPVSMTKTSVDCTMYICGDSTECSNLLLQYGSFCTQLNRALTGIAVEQDKNTQQVFAQVKQIYKTPPIKDFGGFNFSQILPDPSKPSKRSFIEDLLFNKVTLADAGFIKQYGDCLGDIAARDLICAQKFNGLTVLPPLLTDEMIAQYTSALLAGTITSGWTFGAGAALQIPFAMQMAYRFNGCGVTQNVLYENQKLIANQFNSAIGKIQDSLSSTASALGKLQDVVNQNAQALNTLVKQLSSNFGAISSVLNDILSRLDKVEAEVQIDRLITGRLQSLQTYVTQQLIRAAEIRASANLAATKMSECVLGQSKRVDFCGKGCHLMSFPQSAPHGVVFLHVTYVPAQEKNFTTAPAICHDGKAHFPREGVFVSNGTHWFVTQRNFYEPQIITTDNTFVSGNCDVVIGIVNNTVYDPLQPELDSFKEELDKYFKNHTSPDVDLGDISGINASVVNIQKEIDRLNEVAKNLNESLIDLQELGKYEQYIKGGGSGGGQIYEGKLTAEGLRFGIVASRFNHALVDRLVEGAIDAIVRHGGREEDITLVRVPGSWEIPVAAGELARKEDIDAVIAIGVLIRGATPHFDYIASEVSKGLADLSLELRKPITFGVITADTLEQAIERAGTKHGNKGWEAALSAIEMANLFKSLR

SEQ ID NO: 4255 - protein, 1371 aa, Artificial Sequence
  SARS-CoV-2/France/HF1805/2020__EPI_ISL_414628 spike protein (1-1211)(I909C_Y1047C) LumSynth construct
MFVFLVLLPLVSSQCVNLTTRTQLPPAYTNSFTRGVYYPDKVFRSSVLHSTQDLFLPFFSNVTWFHAIHVSGTNGTKRFDNPVLPFNDGVYFASTEKSNIIRGWIFGTTLDSKTQSLLIVNNATNVVIKVCEFQFCNDPFLGVYYHKNNKSWMESEFRVYSSANNCTFEYVSQPFLMDLEGKQGNFKNLREFVFKNIDGYFKIYSKHTPINLVRDLPQGFSALEPLVDLPIGINITRFQTLLALHRSYLTPGDSSSGWTAGAAAYYVGYLQPRTFLLKYNENGTITDAVDCALDPLSETKCTLKSFTVEKGIYQTSNFRVQPTESIVRFPNITNLCPFGEVFNATRFASVYAWNRKRISNCVADYSVLYNSASFSTFKCYGVSPTKLNDLCFTNVYADSFVIRGDEVRQIAPGQTGKIADYNYKLPDDFTGCVIAWNSNNLDSKVGGNYNYLYRLFRKSNLKPFERDISTEIYQAGSTPCNGVEGFNCYFPLQSYGFQPTNGVGYQPYRVVVLSFELLHAPATVCGPKKSTNLVKNKCVNFNFNGLTGTGVLTESNKKFLPFQQFGRDIADTTDAVRDPQTLEILDITPCSFGGVSVITPGTNTSNQVAVLYQGVNCTEVPVAIHADQLTPTWRVYSTGSNVFQTRAGCLIGAEHVNNSYECDIPIGAGICASYQTQTNSPRRARSVASQSIIAYTMSLGAENSVAYSNNSIAIPTNFTISVTTEILPVSMTKTSVDCTMYICGDSTECSNLLLQYGSFCTQLNRALTGIAVEQDKNTQEVFAQVKQIYKTPPIKDFGGFNFSQILPDPSKPSKRSFIEDLLFNKVTLADAGFIKQYGDCLGDIAARDLICAQKFNGLTVLPPLLTDEMIAQYTSALLAGTITSGWTFGAGAALQIPFAMQMAYRFNGCGVTQNVLYENQKLIANQFNSAIGKIQDSLSSTASALGKLQDVVNQNAQALNTLVKQLSSNFGAISSVLNDILSRLDKVEAEVQIDRLITGRLQSLQTYVTQQLIRAAEIRASANLAATKMSECVLGQSKRVDFCGKGCHLMSFPQSAPHGVVFLHVTYVPAQEKNFTTAPAICHDGKAHFPREGVFVSNGTHWFVTQRNFYEPQIITTDNTFVSGNCDVVIGVVNNTVYDPLQPELDSFKEELDKYFKNHTSPDVDLGDISGINASVVNIQKEIDRLNEVAKNLNESLIDLQELGKYEQYIKGGGSGGGQIYEGKLTAEGLRFGIVASRFNHALVDRLVEGAIDAIVRHGGREEDITLVRVPGSWEIPVAAGELARKEDIDAVIAIGVLIRGATPHFDYIASEVSKGLADLSLELRKPITFGVITADTLEQAIERAGTKHGNKGWEAALSAIEMANLFKSLR

SEQ ID NO: 4256 - protein, 1371 aa, Artificial Sequence
  SARS-CoV-2/Netherlands/ZuidHolland_9/2020__EPI_ISL_414445 spike protein (1-1211)(I909C_Y1047C) LumSynth construct
MFVFLVLLPLVSSQCVNLTTRTQLPPAYTNSFTRGVYYPDKVFRSSVLHSTQDLFLPFFSNVTWFHAIHVSGTNGTKRFDNPVLPFNDGVYFASTEKSNIIRGWIFGTTLDSKTQSLLIVNNATNVVIKVCEFQFCNDPFLGVYYHKNNKSWMESEFRVYSSANNCTFEYVSQPFLMDLEGKQGNFKNLREFVFKNIDGYFKIYSKHTPINLVRDLPQGFSALEPLVDLPIGINITRFQTLLALHRSYLTPGDSSSGWTAGAAAYYVGYLQPRTFLLKYNENGTITDAVDCALDPLSETKCTLKSFTVEKGIYQTSNFRVQPTESIVRFPNITNLCPFGEVFNATRFASVYAWNRKRISNCVADYSVLYNSASFSTFKCYGVSPTKLNDLCFTNVYADSFVIRGDEVRQIAPGQTGKIADYNYKLPDDFTGCVIAWNSNNLDSKVGGNYNYLYRLFRKSNLKPFERDISTEIYQAGSTPCNGVEGFNCYFPLQSYGFQPTNGVGYQPYRVVVLSFELLHAPATVCGPKKSTNLVKNKCVNFNFNGLTGTGVLTESNKKFLPFQQFGRDIADTTDAVRDPQTLEILDITPCSFGGVSVITPGTNTSNQVAVLYQGVNCTEVPVAIHADQLTPTWRVYSTGSNVFQTRAGCLIGAEHVNNSYECDIPIGAGICASYQTQTNSPRRARSVASQSIIAYTMSLGAENSVAYSNNSIAIPTNFTISVTTEILPVSMTKTSVDCTMYICGDSTECSNLLLQYGSFCTQLNRALTGIAVEQDKNTQEVFAQVKQIYKTPPIKDFGGFNFSQILPDPSKPSKRSFIEDLLFNKVTLADAGFIKQYGDCLGDIAARDLICVQKFNGLTVLPPLLTDEMIAQYTSALLAGTITSGWTFGAGAALQIPFAMQMAYRFNGCGVTQNVLYENQKLIANQFNSAIGKIQDSLSSTASALGKLQDVVNQNAQALNTLVKQLSSNFGAISSVLNDILSRLDKVEAEVQIDRLITGRLQSLQTYVTQQLIRAAEIRASANLAATKMSECVLGQSKRVDFCGKGCHLMSFPQSAPHGVVFLHVTYVPAQEKNFTTAPAICHDGKAHFPREGVFVSNGTHWFVTQRNFYEPQIITTDNTFVSGNCDVVIGIVNNTVYDPLQPELDSFKEELDKYFKNHTSPDVDLGDISGINASVVNIQKEIDRLNEVAKNLNESLIDLQELGKYEQYIKGGGSGGGQIYEGKLTAEGLRFGIVASRFNHALVDRLVEGAIDAIVRHGGREEDITLVRVPGSWEIPVAAGELARKEDIDAVIAIGVLIRGATPHFDYIASEVSKGLADLSLELRKPITFGVITADTLEQAIERAGTKHGNKGWEAALSAIEMANLFKSLR

SEQ ID NO: 4257 - protein, 1371 aa, Artificial Sequence
  SARS-CoV-2/Finland/FIN03032020A/2020__EPI_ISL_413602 spike protein (1-1211)(I909C_Y1047C) LumSynth construct
MFVFLVLLPLVSSQCVNLTTRTQLPPAYTNSFTRGVYYPDKVFRSSVLHSTQDLFLPFFSNVTWFHAIHVSGTNGTKRFDNPVLPFNDGVYFASTEKSNIIRGWIFGTTLDSKTQSLLIVNNATNVVIKVCEFQFCNDPFLGVYYHKNNKSWMESEFRVYSSANNCTFEYVSQPFLMDLEGKQGNFKNLREFVFKNIDGYFKIYSKHTPINLVRDLPQGFSALEPLVDLPIGINITRFQTLLALHRSYLTPGDSSSGWTAGAAAYYVGYLQPRTFLLKYNENGTITDAVDCALDPLSETKCTLKSFTVEKGIYQTSNFRVQPTESIVRFPNITNLCPFGEVFNATRFASVYAWNRKRISNCVADYSVLYNSASFSTFKCYGVSPTKLNDLCFTNVYADSFVIRGDEVRQIAPGQTGKIADYNYKLPDDFTGCVISWNSNNLDSKVGGNYNYLYRLFRKSNLKPFERDISTEIYQAGSTPCNGVEGFNCYFPLQSYGFQPTNGVGYQPYRVVVLSFELLHAPATVCGPKKSTNLVKNKCVNFNFNGLTGTGVLTESNKKFLPFQQFGRDIADTTDAVRDPQTLEILDITPCSFGGVSVITPGTNTSNQVAVLYQGVNCTEVPVAIHADQLTPTWRVYSTGSNVFQTRAGCLIGAEHVNNSYECDIPIGAGICASYQTQTNSPRRARSVASQSIIAYTMSLGAENSVAYSNNSIAIPTNFTISVTTEILPVSMTKTSVDCTMYICGDSTECSNLLLQYGSFCTQLNRALTGIAVEQDKNTQEVFAQVKQIYKTPPIKDFGGFNFSQILPDPSKPSKRSFIEDLLFNKVTLADAGFIKQYGDCLGDIAARDLICAQKFNGLTVLPPLLTDEMIAQYTSALLAGTITSGWTFGAGAALQIPFAMQMAYRFNGCGVTQNVLYENQKLIANQFNSAIGKIQDSLSSTASALGKLQDVVNQNAQALNTLVKQLSSNFGAISSVLNDILSRLDKVEAEVQIDRLITGRLQSLQTYVTQQLIRAAEIRASANLAATKMSECVLGQSKRVDFCGKGCHLMSFPQSAPHGVVFLHVTYVPAQEKNFTTAPAICHDGKAHFPREGVFVSNGTHWFVTQRNFYEPQIITTDNTFVSGNCDVVIGIVNNTVYDPLQPELDSFKEELDKYFKNHTSPDVDLGDISGINASVVNIQKEIDRLNEVAKNLNESLIDLQELGKYEQYIKGGGSGGGQIYEGKLTAEGLRFGIVASRFNHALVDRLVEGAIDAIVRHGGREEDITLVRVPGSWEIPVAAGELARKEDIDAVIAIGVLIRGATPHFDYIASEVSKGLADLSLELRKPITFGVITADTLEQAIERAGTKHGNKGWEAALSAIEMANLFKSLR

SEQ ID NO: 4258 - protein, 1371 aa, Artificial Sequence
  SARS-CoV-2/France/GE1977/2020__EPI_ISL_414632 spike protein (1-1211)(I909C_Y1047C) LumSynth construct
MFVFLVLLPLVSSQCVNLTTRTQLPPAYTNSFTRGVYYPDKVFRSSVLHSTQDLFLPFFSNVTWFHAIHVSGTNGTKRFDNPVLPFNDGVYFASTEKSNIIRGWIFGTTLDSKTQSLLIVNNATNVVIKVCEFQFCNDPFLGVYYHKNNKSWMESEFRVYSSANNCTFEYVSQPFLMDLEGKQGNFKNLREFVFKNIDGYFKIYSKHTPINLVRDLPQGFSALEPLVDLPIGINITRFQTLLALHRSYLTPGDSSSGWTAGAAAYYVGYLQPRTFLLKYNENGTITDAVDCALDPLSETKCTLKSFTVEKGIYQTSNFRVQPTESIVRFPNITNLCPFGEVFNATRFASVYAWNRKRISNCVADYSVLYNSASFSTFKCYGVSPTKLNDLCFTNVYADSFVIRGDEVRQIAPGQTGKIADYNYKLPDDFTGCVIAWNSNNLDSKVGGNYNYLYRLFRKSNLKPFERDISTEIYQAGSTPCNGVEGFNCYFPLQSYGFQPTNGVGYQPYRVVVLSFELLHAPATVCGPKKSTNLVKNKCVNFNFNGLTGTGVLTESNKKFLPFQQFGRDIADTTDAVRDPQTLEILDITPCSFGGVSVITPGTNTSNQVAVLYQGVNCTEVPVAIHADQLTPTWRVYSTGSNVFQTRAGCLIGAEHVNNSYECDIPIGAGICASYQTQTNSPRRARSVASQSIIAYTMSLGAENSVAYSNNSIAIPTNFTISVTTEILPVSMTKTSVDCTMYICGDSTECSNLLLQYGSFCTQLNRALTGIAVEQDKNTQEVFAQVKQIYKTPPIKDFGGFNFSQILPDPSKPSKRSFIEDLLFNKVTLADAGFIKQYGDCLGDIAARDLICAQKFNGLTVLPPLLTDEMIAQYTSALLAGTITSGWTFGAGAALQIPFAMQMAYRFNGCGVTQNVLYENQKLIANQFNSAIGKIQDSLFSTASALGKLQDVVNQNAQALNTLVKQLSSNFGAISSVLNDILSRLDKVEAEVQIDRLITGRLQSLQTYVTQQLIRAAEIRASANLAATKMSECVLGQSKRVDFCGKGCHLMSFPQSAPHGVVFLHVTYVPAQEKNFTTAPAICHDGKAHFPREGVFVSNGTHWFVTQRNFYEPQIITTDNTFVSGNCDVVIGIVNNTVYDPLQPELDSFKEELDKYFKNHTSPDVDLGDISGINASVVNIQKEIDRLNEVAKNLNESLIDLQELGKYEQYIKGGGSGGGQIYEGKLTAEGLRFGIVASRFNHALVDRLVEGAIDAIVRHGGREEDITLVRVPGSWEIPVAAGELARKEDIDAVIAIGVLIRGATPHFDYIASEVSKGLADLSLELRKPITFGVITADTLEQAIERAGTKHGNKGWEAALSAIEMANLFKSLR

SEQ ID NO: 4259 - protein, 1371 aa, Artificial Sequence
  SARS-CoV-2/Finland/FIN-313/2020__EPI_ISL_414641 spike protein (1-1211)(I909C_Y1047C) LumSynth construct
MFVFLVLLPLVSSQCVNLTTRTQLPPAYTNSFTRGVYYPDKVFRSSVLHSTQDLFLPFFSNVTWFHAIHVSGTNGTKRFDNPVLPFNDGVYFASTEKSNIIRGWIFGTTLDSKTQSLLIVNNATNVVIKVCEFQFCNDPFLGVYYHKNNKSWMESEFRVYSSANNCTFEYVSQPFLMDLEGKQGNFKNLREFVFKNIDGYFKIYSKHTPINLVRDLPQGFSALEPLVDLPIGINITRFKTLLALHRSYLTPGDSSSGWTAGAAAYYVGYLQPRTFLLKYNENGTITDAVDCALDPLSETKCTLKSFTVEKGIYQTSNFRVQPTESIVRFPNITNLCPFGEVFNATRFASVYAWNRKRISNCVADYSVLYNSASFSTFKCYGVSPTKLNDLCFTNVYADSFVIRGDEVRQIAPGQTGKIADYNYKLPDDFTGCVIAWNSNNLDSKVGGNYNYLYRLFRKSNLKPFERDISTEIYQAGSTPCNGVEGFNCYFPLQSYGFQPTNGVGYQPYRVVVLSFELLHAPATVCGPKKSTNLVKNKCVNFNFNGLTGTGVLTESNKKFLPFQQFGRDIADTTDAVRDPQTLEILDITPCSFGGVSVITPGTNTSNQVAVLYQGVNCTEVPVAIHADQLTPTWRVYSTGSNVFQTRAGCLIGAEHVNNSYECDIPIGAGICASYQTQTNSPRRARSVASQSIIAYTMSLGAENSVAYSNNSIAIPTNFTISVTTEILPVSMTKTSVDCTMYICGDSTECSNLLLQYGSFCTQLNRALTGIAVEQDKNTQEVFAQVKQIYKTPPIKDFGGFNFSQILPDPSKPSKRSFIEDLLFNKVTLADAGFIKQYGDCLGDIAARDLICAQKFNGLTVLPPLLTDEMIAQYTSALLAGTITSGWTFGAGAALQIPFAMQMAYRFNGCGVTQNVLYENQKLIANQFNSAIGKIQDSLSSTASALGKLQDVVNQNAQALNTLVKQLSSNFGAISSVLNDILSRLDKVEAEVQIDRLITGRLQSLQTYVTQQLIRAAEIRASANLAATKMSECVLGQSKRVDFCGKGCHLMSFPQSAPHGVVFLHVTYVPAQEKNFTTAPAICHDGKAHFPREGVFVSNGTHWFVTQRNFYEPQIITTDNTFVSGNCDVVIGIVNNTVYDPLQPELDSFKEELDKYFKNHTSPDVDLGDISGINASVVNIQKEIDRLNEVAKNLNESLIDLQELGKYEQYIKGGGSGGGQIYEGKLTAEGLRFGIVASRFNHALVDRLVEGAIDAIVRHGGREEDITLVRVPGSWEIPVAAGELARKEDIDAVIAIGVLIRGATPHFDYIASEVSKGLADLSLELRKPITFGVITADTLEQAIERAGTKHGNKGWEAALSAIEMANLFKSLR

SEQ ID NO: 4260 - protein, 1371 aa, Artificial Sequence
  SARS-CoV-2/Netherlands/ZuidHolland_2/2020__EPI_ISL_414556 spike protein (1-1211)(I909C_Y1047C) LumSynth construct
MFVFLVLLPLVSSQCVNLTTRTQLPPAYTNSFTRGVYYPDKVFRSSVLHSTQDLFLPFFSNVTWFHAIHVSGTNGTKRFDNPVLPFNDGVYFASTEKSNIIRGWIFGTTLDSKTQSLLIVNNATNVVIKVCEFQFCNDPFLGVYYHKNNKSWMESEFRVYSSANNCTFEYVSQPFLMDLEGKQGNFKNLREFVFKNIDGYFKIYSKHTPINLVRDLPQGFSALEPLVDLPIGINITRFQTLLALHRSYLTPGDSSSGWTAGAAAYYVGYLQPRTFLLKYNENGTITDAVDCALDPLSETKCTLKSFTVEKGIYQTSNFRVQPTESIVRFPNITNLCPFGEVFNATRFASVYAWNRKRISNCVADYSVLYNSASFSTFKCYGVSPTKLNDLCFTNVYADSFVIRGDEVRQIAPGQTGKIADYNYKLPDDFTGCVIAWNSNNLDSKVGGNYNYLYRLFRKSNLKPFERDISTEIYQAGSTPCNGVEGFNCYFPLQSYGFQPTNGVGYQPYRVVVLSFELLHAPATVCGPKKSTNLVKNKCVNFNFNGLTGTGVLTESNKKFLPFQQFGRDIADTTDAVRDPQTLEILDITPCSFGGVSVITPGTNTSNQVAVLYQGVNCTEVPVAIHADQLTPTWRVYSTGSNVFQTRAGCLIGAEHVNNSYECDIPIGAGICASYQTQTNSPRRARSVASQSIIAYTMSLGAENSVAYSNNSIAIPTNFTISVTTEILPVSMTKTSVDCTMYICGDSTECSNLLLQYGSFCTQLNRALTGIALEQDKNTQEVFAQVKQIYKTPPIKDFGGFNFSQILPDPSKPSKRSFIEDLLFNKVTLADAGFIKQYGDCLGDIAARDLICAQKFNGLTVLPPLLTDEMIAQYTSALLAGTITSGWTFGAGAALQIPFAMQMAYRFNGCGVTQNVLYENQKLIANQFNSAIGKIQDSLSSTASALGKLQDVVNQNAQALNTLVKQLSSNFGAISSVLNDILSRLDKVEAEVQIDRLITGRLQSLQTYVTQQLIRAAEIRASANLAATKMSECVLGQSKRVDFCGKGCHLMSFPQSAPHGVVFLHVTYVPAQEKNFTTAPAICHDGKAHFPREGVFVSNGTHWFVTQRNFYEPQIITTDNTFVSGNCDVVIGIVNNTVYDPLQPELDSFKEELDKYFKNHTSPDVDLGDISGINASVVNIQKEIDRLNEVAKNLNESLIDLQELGKYEQYIKGGGSGGGQIYEGKLTAEGLRFGIVASRFNHALVDRLVEGAIDAIVRHGGREEDITLVRVPGSWEIPVAAGELARKEDIDAVIAIGVLIRGATPHFDYIASEVSKGLADLSLELRKPITFGVITADTLEQAIERAGTKHGNKGWEAALSAIEMANLFKSLR

SEQ ID NO: 4261 - protein, 1371 aa, Artificial Sequence
  SARS-CoV-2/USA/WA-UW31/2020__EPI_ISL_414618 spike protein (1-1211)(I909C_Y1047C) LumSynth construct
MFVFLVLLPLVSSQCVNLTTRTQLPPAYTNSFTRGVYYPDKVFRSSVLHSTQDLFLPFFSNVTWFHAIHVSGTNGTKRFDNPVLPFNDGVYFASTEKSNIIRGWIFGTTLDSKTQSLLIVNNATNVVIKVCEFQFCNDPFLGVYYHKNNKSWMESEFRVYSSANNCTFEYVSQPFLMDLEGKQGNFKNLREFVFKNIDGYFKIYSKHTPINLVRDLPQGFSALEPLVDLPIGINITRFQTLLALHRSYLTPGDSSSGWTAGAAAYYVGYLQPRTFLLKYNENGTITDAVDCALDPLSETKCTLKSFTVEKGIYQTSNFRVQPTESIVRFPNITNLCPFGEVFNATRFASVYAWNRKRISNCVADYSVLYNSASFSTFKCYGVSPTKLNDLCFTNVYADSFVIRGDEVRQIAPGQTGKIADYNYKLPDDFTGCVIAWNSNNLDSKVGGNYNYLYRLFRKSNLKPFERDISTEIYQAGSTPCNGAEGFNCYFPLQSYGFQPTNGVGYQPYRVVVLSFELLHAPATVCGPKKSTNLVKNKCVNFNFNGLTGTGVLTESNKKFLPFQQFGRDIADTTDAVRDPQTLEILDITPCSFGGVSVITPGTNTSNQVAVLYQDVNCTEVPVAIHADQLTPTWRVYSTGSNVFQTRAGCLIGAEHVNNSYECDIPIGAGICASYQTQTNSPRRARSVASQSIIAYTMSLGAENSVAYSNNSIAIPTNFTISVTTEILPVSMTKTSVDCTMYICGDSTECSNLLLQYGSFCTQLNRALTGIAVEQDKNTQEVFAQVKQIYKTPPIKDFGGFNFSQILPDPSKPSKRSFIEDLLFNKVTLADAGFIKQYGDCLGDIAARDLICAQKFNGLTVLPPLLTDEMIAQYTSALLAGTITSGWTFGAGAALQIPFAMQMAYRFNGCGVTQNVLYENQKLIANQFNSAIGKIQDSLSSTASALGKLQDVVNQNAQALNTLVKQLSSNFGAISSVLNDILSRLDKVEAEVQIDRLITGRLQSLQTYVTQQLIRAAEIRASANLAATKMSECVLGQSKRVDFCGKGCHLMSFPQSAPHGVVFLHVTYVPAQEKNFTTAPAICHDGKAHFPREGVFVSNGTHWFVTQRNFYEPQIITTDNTFVSGNCDVVIGIVNNTVYDPLQPELDSFKEELDKYFKNHTSPDVDLGDISGINASVVNIQKEIDRLNEVAKNLNESLIDLQELGKYEQYIKGGGSGGGQIYEGKLTAEGLRFGIVASRFNHALVDRLVEGAIDAIVRHGGREEDITLVRVPGSWEIPVAAGELARKEDIDAVIAIGVLIRGATPHFDYIASEVSKGLADLSLELRKPITFGVITADTLEQAIERAGTKHGNKGWEAALSAIEMANLFKSLR

SEQ ID NO: 4262 - protein, 1371 aa, Artificial Sequence
  SARS-CoV-2/South Korea/SNU01/2020__EPI_ISL_411929 spike protein (1-1211)(I909C_Y1047C) LumSynth construct
MFVFLVLLPLVSSQCVNLTTRTQLPPAYTNSFTRGVYYPDKVFRSSVLHSTQDLFLPFFSNVTWFHAIHVSGTNGTKRFDNPVLPFNDGVYFASTEKSNIIRGWIFGTTLDSKTQSLLIVNNATNVVIKVCEFQFCNDPFLGVYYHKNNKSWMESEFRVYSSANNCTFEYVSQPFLMDLEGKQGNFKNLREFVFKNIDGYFKIYSKHTPINLVRDLPQGFWALEPLVDLPIGINITRFQTLLALHRSYLTPGDSSSGWTAGAAAYYVGYLQPRTFLLKYNENGTITDAVDCALDPLSETKCTLKSFTVEKGIYQTSNFRVQPTESIVRFPNITNLCPFGEVFNATRFASVYAWNRKRISNCVADYSVLYNSASFSTFKCYGVSPTKLNDLCFTNVYADSFVIRGDEVRQIAPGQTGKIADYNYKLPDDFTGCVIAWNSNNLDSKVGGNYNYLYRLFRKSNLKPFERDISTEIYQAGSTPCNGVEGFNCYFPLQSYGFQPTNGVGYQPYRVVVLSFELLHAPATVCGPKKSTNLVKNKCVNFNFNGLTGTGVLTESNKKFLPFQQFGRDIADTTDAVRDPQTLEILDITPCSFGGVSVITPGTNTSNQVAVLYQDVNCTEVPVAIHADQLTPTWRVYSTGSNVFQTRAGCLIGAEHVNNSYECDIPIGAGICASYQTQTNSPRRARSVASQSIIAYTMSLGAENSVAYSNNSIAIPTNFTISVTTEILPVSMTKTSVDCTMYICGDSTECSNLLLQYGSFCTQLNRALTGIAVEQDKNTQEVFAQVKQIYKTPPIKDFGGFNFSQILPDPSKPSKRSFIEDLLFNKVTLADAGFIKQYGDCLGDIAARDLICAQKFNGLTVLPPLLTDEMIAQYTSALLAGTITSGWTFGAGAALQIPFAMQMAYRFNGCGVTQNVLYENQKLIANQFNSAIGKIQDSLSSTASALGKLQDVVNQNAQALNTLVKQLSSNFGAISSVLNDILSRLDKVEAEVQIDRLITGRLQSLQTYVTQQLIRAAEIRASANLAATKMSECVLGQSKRVDFCGKGCHLMSFPQSAPHGVVFLHVTYVPAQEKNFTTAPAICHDGKAHFPREGVFVSNGTHWFVTQRNFYEPQIITTDNTFVSGNCDVVIGIVNNTVYDPLQPELDSFKEELDKYFKNHTSPDVDLGDISGINASVVNIQKEIDRLNEVAKNLNESLIDLQELGKYEQYIKGGGSGGGQIYEGKLTAEGLRFGIVASRFNHALVDRLVEGAIDAIVRHGGREEDITLVRVPGSWEIPVAAGELARKEDIDAVIAIGVLIRGATPHFDYIASEVSKGLADLSLELRKPITFGVITADTLEQAIERAGTKHGNKGWEAALSAIEMANLFKSLR

SEQ ID NO: 4263 - protein, 1371 aa, Artificial Sequence
  SARS-CoV-2/China/WF0004/2020__EPI_ISL_413694 spike protein (1-1211)(I909C_Y1047C) LumSynth construct
MFVFLVLLPLVSSQCVNLTTRTQLPPAYTNSFTRGVYYPDKVFRSSVLHSTQDLFLPFFSNVTWFHAIHVSGTNGTKRFDNPVLPFNDGVYFASTEKSNIIRGWIFGTTLDSKTQSLLIVNNATNVVIKVCEFQFCNDPFLGVYYHKNNKSWTESEFRVYSSANNCTFEYVSQPFLMDLEGKQGNFKNLREFVFKNIDGYFKIYSKHTPINLVRDLPQGFSALEPLVDLPIGINITRFQTLLALHRSYLTPGDSSSGWTAGAAAYYVGYLQPRTFLLKYNENGTITDAVDCALDPLSETKCTLKSFTVEKGIYQTSNFRVQPTESIVRFPNITNLCPFGEVFNATRFASVYAWNRKRISNCVADYSVLYNSASFSTFKCYGVSPTKLNDLCFTNVYADSFVIRGDEVRQIAPGQTGKIADYNYKLPDDFTGCVIAWNSNNLDSKVGGNYNYLYRLFRKSNLKPFERDISTEIYQAGSTPCNGVEGFNCYFPLQSYGFQPTNGVGYQPYRVVVLSFELLHAPATVCGPKKSTNLVKNKCVNFNFNGLTGTGVLTESNKKFLPFQQFGRDIADTTDAVRDPQTLEILDITPCSFGGVSVITPGTNTSNQVAVLYQDVNCTEVPVAIHADQLTPTWRVYSTGSNVFQTRAGCLIGAEHVNNSYECDIPIGAGICASYQTQTNSPRRARSVASQSIIAYTMSLGAENSVAYSNNSIAIPTNFTISVTTEILPVSMTKTSVDCTMYICGDSTECSNLLLQYGSFCTQLNRALTGIAVEQDKNTQEVFAQVKQIYKTPPIKDFGGFNFSQILPDPSKPSKRSFIEDLLFNKVTLADAGFIKQYGDCLGDIAARDLICAQKFNGLTVLPPLLTDEMIAQYTSALLAGTITSGWTFGAGAALQIPFAMQMAYRFNGCGVTQNVLYENQKLIANQFNSAIGKIQDSLSSTASALGKLQDVVNQNAQALNTLVKQLSSNFGAISSVLNDILSRLDKVEAEVQIDRLITGRLQSLQTYVTQQLIRAAEIRASANLAATKMSECVLGQSKRFDFCGKGCHLMSFPQSAPHGVVFLHVTYVPAQEKNFTTAPAICHDGKAHFPREGVFVSNGTHWFVTQRNFYEPQIITTDNTFVSGNCDVVIGIVNNTVYDPLQPELDSFKEELDKYFKNHTSPDVDLGDISGINASVVNIQKEIDRLNEVAKNLNESLIDLQELGKYEQYIKGGGSGGGQIYEGKLTAEGLRFGIVASRFNHALVDRLVEGAIDAIVRHGGREEDITLVRVPGSWEIPVAAGELARKEDIDAVIAIGVLIRGATPHFDYIASEVSKGLADLSLELRKPITFGVITADTLEQAIERAGTKHGNKGWEAALSAIEMANLFKSLR

SEQ ID NO: 4264 - protein, 1371 aa, Artificial Sequence
  SARS-CoV-2/China/WF0028/2020__EPI_ISL_413791 spike protein (1-1211)(I909C_Y1047C) LumSynth construct
MFVFLVLLPLVSSQCVNLTTRTQLPPAYTNSFTRGVYYPDKVFRSSVLHSTQDLFLPFFSNVTWFHAIHVSGTNGTKRFDNPVLPFNDGVYFASTEKSNIIRGWIFGTTLDSKTQSLLIVNNATNVVIKVCEFQFCNDPFLGVYYHKNNKSWMESEFRVYSSANNCTFEYVSQPFLMDLEGKQGNFKNLREFVFKNIDGYFKIYSKHTPINLVRDLPQGFSALEPLVDLPIGINITRFQTLLALHRSYLTPGDSSSGWTAGAAAYYVGYLQPRTFLLKYNENGTITDAVDCALDPLSETKCTLKSFTVEKGIYQTSNFRVQPTESIVRFPNITNLCPFGEVFNATRFASVYAWNRKRISNCVADYSVLYNSASFSTFKCYGVSPTKLNDLCFTNVYADSFVIRGDEVRQIAPGQTGKIADYNYKLPDDFTGCVIAWNSNNLDSKVGGNYNYLYRLFRKSNLKPFERDISTEIYQAGSTPCNGVEGFNCYFPLQSYGFQPTNGVGYQPYRVVVLSFELLHAPATVCGPKKSTNLVKNKCVNFNFNGLTGTGVLTESNKKFLPFQQFGRDIADTTDAVRDPQTLEILDITPCSFGGVSVITPGTNTSNQVAVLYQDVNCTEVPVAIHADQLTPTWRVYSTGSNVFQTRAGCLIGAEHVNNSYECDIPIGAGICASYQTQTNSPRRARSVASQSIIAYTMSLGAENSVAYSNNSIAIPTNFTISVTTEILPVSMTKTSVDCTMYICGDSTECSNLLLQYGSFCTQLNRALTGIAVEQDKNTQEVFAQVKQIYKTPPIKDFGGFNFSQILPDPSKPSKRSFIEDLLFNKVTLADAGFIKQYGDCLGDIAARDLICAQKFNGLTVLPPLLTDEMIAQYTSALLAGTITSGWTFGAGAALQIPFAMQMAYRFNGCGVTQNVLYENQKLIANQFNSAIGKIQDSLSSTASALGKLQDVVNQNAQALNTLVKQLSSNFGAISSVLNDILSRLDKVEAEVQIDRLITGRLQSLQTYVTQQLIRAAEIRASANLAATKMSECVLGQSKRVDFCGKGCHLMSFPQSAPHGVVFLHVTYVPAQEKNFTTAPAICHDGKAHFPREGVFVSNGTHWFVTQRNFYEPQIITTDNTFVSGNCDVVIGIVNNTVYDPLQPELESFKEELDKYFKNHTSPDVDLGDISGINASVVNIQKEIDRLNEVAKNLNESLIDLQELGKYEQYIKGGGSGGGQIYEGKLTAEGLRFGIVASRFNHALVDRLVEGAIDAIVRHGGREEDITLVRVPGSWEIPVAAGELARKEDIDAVIAIGVLIRGATPHFDYIASEVSKGLADLSLELRKPITFGVITADTLEQAIERAGTKHGNKGWEAALSAIEMANLFKSLR

SEQ ID NO: 4265 - protein, 1371 aa, Artificial Sequence
  SARS-CoV-2/2019-nCoV/USA-CruiseA-18/2020__MT159716.1 spike protein (1-1211)(I909C_Y1047C) LumSynth construct
MFVFLVLLPLVSSQCVNLTTRTQLPPAYTNSFTRGVYYPDKVFRSSVLHSTQDLFLPFFSNVTWFHAIHVSGTNGTKRFDNPVLPFNDGVYFASTEKSNIIRGWIFGTTLDSKTQSLLIVNNATNVVIKVCEFQFCNDPFLGVYYHKNNKSWMESELRVYSSANNCTFEYVSQPFLMDLEGKQGNFKNLREFVFKNIDGYFKIYSKHTPINLVRDLPQGFSALEPLVDLPIGINITRFQTLLALHRSYLTPGDSSSGWTAGAAAYYVGYLQPRTFLLKYNENGTITDAVDCALDPLSETKCTLKSFTVEKGIYQTSNFRVQPTESIVRFPNITNLCPFGEVFNATRFASVYAWNRKRISNCVADYSVLYNSASFSTFKCYGVSPTKLNDLCFTNVYADSFVIRGDEVRQIAPGQTGKIADYNYKLPDDFTGCVIAWNSNNLDSKVGGNYNYLYRLFRKSNLKPFERDISTEIYQAGSTPCNGVEGFNCYFPLQSYGFQPTNGVGYQPYRVVVLSFELLHAPATVCGPKKSTNLVKNKCVNFNFNGLTGTGVLTESNKKFLPFQQFGRDIADTTDAVRDPQTLEILDITPCSFGGVSVITPGTNTSNQVAVLYQDVNCTEVPVAIHADQLTPTWRVYSTGSNVFQTRAGCLIGAEHVNNSYECDIPIGAGICASYQTQTNSPRRARSVASQSIIAYTMSLGAENSVAYSNNSIAIPTNFTISVTTEILPVSMTKTSVDCTMYICGDSTECSNLLLQYGSFCTQLNRALTGIAVEQDKNTQEVFAQVKQIYKTPPIKDFGGFNFSQILPDPSKPSKRSFIEDLLFNKVTLADAGFIKQYGDCLGDIAARDLICAQKFNGLTVLPPLLTDEMIAQYTSALLAGTITSGWTFGAGAALQIPFAMQMAYRFNGCGVTQNVLYENQKLIANQFNSAIGKIQDSLSSTASALGKLQDVVNQNAQALNTLVKQLSSNFGAISSVLNDILSRLDKVEAEVQIDRLITGRLQSLQTYVTQQLIRAAEIRASANLAATKMSECVLGQSKRVDFCGKGCHLMSFPQSAPHGVVFLHVTYVPAQEKNFTTAPAICHDGKAHFPREGVFVSNGTHWFVTQRNFYEPQIITTDNTFVSGNCDVVIGIVNNTVYDPLQPELDSFKEELDKYFKNHTSPDVDLGDISGINASVVNIQKEIDRLNEVAKNLNESLIDLQELGKYEQYIKGGGSGGGQIYEGKLTAEGLRFGIVASRFNHALVDRLVEGAIDAIVRHGGREEDITLVRVPGSWEIPVAAGELARKEDIDAVIAIGVLIRGATPHFDYIASEVSKGLADLSLELRKPITFGVITADTLEQAIERAGTKHGNKGWEAALSAIEMANLFKSLR

SEQ ID NO: 4266 - protein, 1371 aa, Artificial Sequence
  SARS-CoV-2/SARS-CoV-2/Yunnan-01/human/2020/CHN__MT049951.1 spike protein (1-1211)(I909C_Y1047C) LumSynth construct
MFVFLVLLPLVSSQCVNLTTRTQLPPANTNSFTRGVYYPDKVFRSSVLHSTQDLFLPFFSNVTWFHAIHVSGTNGTKRFDNPVLPFNDGVYFASTEKSNIIRGWIFGTTLDSKTQSLLIVNNATNVVIKVCEFQFCNDPFLGVYYHKNNKSWMESEFRVYSSANNCTFEYVSQPFLMDLEGKQGNFKNLREFVFKNIDGYFKIYSKHTPINLVRDLPQGFSALEPLVDLPIGINITRFQTLLALHRSYLTPGDSSSGWTAGAAAYYVGYLQPRTFLLKYNENGTITDAVDCALDPLSETKCTLKSFTVEKGIYQTSNFRVQPTESIVRFPNITNLCPFGEVFNATRFASVYAWNRKRISNCVADYSVLYNSASFSTFKCYGVSPTKLNDLCFTNVYADSFVIRGDEVRQIAPGQTGKIADYNYKLPDDFTGCVIAWNSNNLDSKVGGNYNYLYRLFRKSNLKPFERDISTEIYQAGSTPCNGVEGFNCYFPLQSYGFQPTNGVGYQPYRVVVLSFELLHAPATVCGPKKSTNLVKNKCVNFNFNGLTGTGVLTESNKKFLPFQQFGRDIADTTDAVRDPQTLEILDITPCSFGGVSVITPGTNTSNQVAVLYQDVNCTEVPVAIHADQLTPTWRVYSTGSNVFQTRAGCLIGAEHVNNSYECDIPIGAGICASYQTQTNSPRRARSVASQSIIAYTMSLGAENSVAYSNNSIAIPTNFTISVTTEILPVSMTKTSVDCTMYICGDSTECSNLLLQYGSFCTQLNRALTGIAVEQDKNTQEVFAQVKQIYKTPPIKDFGGFNFSQILPDPSKPSKRSFIEDLLFNKVTLADAGFIKQYGDCLGDIAARDLICAQKFNGLTVLPPLLTDEMIAQYTSALLAGTITSGWTFGAGAALQIPFAMQMAYRFNGCGVTQNVLYENQKLIANQFNSAIGKIQDSLSSTASALGKLQDVVNQNAQALNTLVKQLSSNFGAISSVLNDILSRLDKVEAEVQIDRLITGRLQSLQTYVTQQLIRAAEIRASANLAATKMSECVLGQSKRVDFCGKGCHLMSFPQSAPHGVVFLHVTYVPAQEKNFTTAPAICHDGKAHFPREGVFVSNGTHWFVTQRNFYEPQIITTDNTFVSGNCDVVIGIVNNTVYDPLQPELDSFKEELDKYFKNHTSPDVDLGDISGINASVVNIQKEIDRLNEVAKNLNESLIDLQELGKYEQYIKGGGSGGGQIYEGKLTAEGLRFGIVASRFNHALVDRLVEGAIDAIVRHGGREEDITLVRVPGSWEIPVAAGELARKEDIDAVIAIGVLIRGATPHFDYIASEVSKGLADLSLELRKPITFGVITADTLEQAIERAGTKHGNKGWEAALSAIEMANLFKSLR

SEQ ID NO: 4267 - protein, 1371 aa, Artificial Sequence
  SARS-CoV-2/USA/WA-UW292/2020__EPI_ISL_418077 spike protein (1-1211)(I909C_Y1047C) LumSynth construct
MFVFLVLLPLVSSQCVNLTTRTQLPPAYTNSFTRGVYYPDKVFRSSVLHSTQDLFLPFFSNVTWFHAIHVSGTNGTKRFDNPVLPFNDGVYFASTEKSNIIRGWIFGTTLDSKTQSLLIVNNATNVVIKVCEFQFCNDPFLGVYYHKNNKSWMESEFRVYSSANNCTFEYVSQPFLMDLEGKQGNFKNLREFVFKNIDGYFKIYSKHTPINLVRDLPQGFSALEPLVDLPIGINITRFQTLLALHRSYLTPGDSSSGWTAGAAAYYVGYLQPRTFLLKYNENGTITDAVDCALDPLSETKCTLKSFTVEKGIYQTSNFRVQPTESIVRFPNITNLCPFGEVFNATRFASVYAWNRKRISNCVADYSVLYNSASFSTFKCYGVSPTKLNDLCFTNVYADSFVIRGDEVRQIAPGQTGKIADYNYKLPDDFTGCVIAWNSNNLDSKVGGNYNYLYRLFRKSNLKPFERDISTEIYQASSTPCNGVEGFNCYFPLQSYGFQPTNGVGYQPYRVVVLSFELLHAPATVCGPKKSTNLVKNKCVNFNFNGLTGTGVLTESNKKFLPFQQFGRDIADTTDAVRDPQTLEILDITPCSFGGVSVITPGTNTSNQVAVLYQDVNCTEVPVAIHADQLTPTWRVYSTGSNVFQTRAGCLIGAEHVNNSYECDIPIGAGICASYQTQTNSPRRARSVASQSIIAYTMSLGAENSVAYSNNSIAIPTNFTISVTTEILPVSMTKTSVDCTMYICGDSTECSNLLLQYGSFCTQLNRALTGIAVEQDKNTQEVFAQVKQIYKTPPIKDFGGFNFSQILPDPSKPSKRSFIEDLLFNKVTLADAGFIKQYGDCLGDIAARDLICAQKFNGLTVLPPLLTDEMIAQYTSALLAGTITSGWTFGAGAALQIPFAMQMAYRFNGCGVTQNVLYENQKLIANQFNSAIGKIQDSLSSTASALGKLQDVVNQNAQALNTLVKQLSSNFGAISSVLNDILSRLDKVEAEVQIDRLITGRLQSLQTYVTQQLIRAAEIRASANLAATKMSECVLGQSKRVDFCGKGCHLMSFPQSAPHGVVFLHVTYVPAQEKNFTTAPAICHDGKAHFPREGVFVSNGTHWFVTQRNFYEPQIITTDNTFVSGNCDVVIGIVNNTVYDPLQPELDSFKEELDKYFKNHTSPDVDLGDISGINASVVNIQKEIDRLNEVAKNLNESLIDLQELGKYEQYIKGGGSGGGQIYEGKLTAEGLRFGIVASRFNHALVDRLVEGAIDAIVRHGGREEDITLVRVPGSWEIPVAAGELARKEDIDAVIAIGVLIRGATPHFDYIASEVSKGLADLSLELRKPITFGVITADTLEQAIERAGTKHGNKGWEAALSAIEMANLFKSLR

SEQ ID NO: 4268 - protein, 1371 aa, Artificial Sequence
  SARS-CoV-2/Iceland/192/2020__EPI_ISL_417819 spike protein (1-1211)(I909C_Y1047C) LumSynth construct
MFVFFVLLPLVSSQCVNLTTRTQLPPAYTNSFTRGVYYPDKVFRSSVLHSTQDLFLPFFSNVTWFHAIHVSGTNGTKRFDNPVLPFNDGVYFASTEKSNIIRGWIFGTTLDSKTQSLLIVNNATNVVIKVCEFQFCNDPFLGVYYHKNNKSWMESEFRVYSSANNCTFEYVSQPFLMDLEGKQGNFKNLREFVFKNIDGYFKIYSKHTPINLVRDLPQGFSALEPLVDLPIGINITRFQTLLALHRSYLTPGDSSSGWTAGAAAYYVGYLQPRTFLLKYNENGTITDAVDCALDPLSETKCTLKSFTVEKGIYQTSNFRVQPTESIVRFPNITNLCPFGEVFNATRFASVYAWNRKRISNCVADYSVLYNSASFSTFKCYGVSPTKLNDLCFTNVYADSFVIRGDEVRQIAPGQTGKIADYNYKLPDDFTGCVIAWNSNNLDSKVGGNYNYLYRLFRKSNLKPFERDISTEIYQAGSTPCNGVEGFNCYFPLQSYGFQPTNGVGYQPYRVVVLSFELLHAPATVCGPKKSTNLVKNKCVNFNFNGLTGTGVLTESNKKFLPFQQFGRDIADTTDAVRDPQTLEILDITPCSFGGVSVITPGTNTSNQVAVLYQGVNCTEVPVAIHADQLTPTWRVYSTGSNVFQTRAGCLIGAEHVNNSYECDIPIGAGICASYQTQTNSPRRARSVASQSIIAYTMSLGAENSVAYSNNSIAIPTNFTISVTTEILPVSMTKTSVDCTMYICGDSTECSNLLLQYGSFCTQLNRALTGIAVEQDKNTQEVFAQVKQIYKTPPIKDFGGFNFSQILPDPSKPSKRSFIEDLLFNKVTLADAGFIKQYGDCLGDIAARDLICAQKFNGLTVLPPLLTDEMIAQYTSALLAGTITSGWTFGAGAALQIPFAMQMAYRFNGCGVTQNVLYENQKLIANQFNSAIGKIQDSLSSTASALGKLQDVVNQNAQALNTLVKQLSSNFGAISSVLNDILSRLDKVEAEVQIDRLITGRLQSLQTYVTQQLIRAAEIRASANLAATKMSECVLGQSKRVDFCGKGCHLMSFPQSAPHGVVFLHVTYVPAQEKNFTTAPAICHDGKAHFPREGVFVSNGTHWFVTQRNFYEPQIITTDNTFVSGNCDVVIGIVNNTVYDPLQPELDSFKEELDKYFKNHTSPDVDLGDISGINASVVNIQKEIDRLNEVAKNLNESLIDLQELGKYEQYIKGGGSGGGQIYEGKLTAEGLRFGIVASRFNHALVDRLVEGAIDAIVRHGGREEDITLVRVPGSWEIPVAAGELARKEDIDAVIAIGVLIRGATPHFDYIASEVSKGLADLSLELRKPITFGVITADTLEQAIERAGTKHGNKGWEAALSAIEMANLFKSLR

SEQ ID NO: 4269 - protein, 1371 aa, Artificial Sequence
  SARS-CoV-2/Belgium/ULG-6939/2020__EPI_ISL_417020 spike protein (1-1211)(I909C_Y1047C) LumSynth construct
MFVFLVLLPLVSSQCVNLTTRTQLPPAYTNSFTRGVYYPDKVFRSSVLHSTQDLFLPFFSNVTWFHAIHVSGTNGTKRFDNPVLPFNDGVYFASTEKSNIIRGWIFGTTLDSKTQSLLIVNNATNVVIKVCEFQFCNDPFLGVYYHKNNKSWMESEFRVYSSANNCTFEYVSQPFLMDLEGKQGNFKNLREFVFKNIDGYFKIYSKHTPINLVRDLPQGFSALEPLVDLPIGINITRFQTLLALHRSYLTPGDSSSGWTAGAAAYYVGYLQPRTFLLKYNENGTITDAVDCALDPLSETKCTLKSFTVEKGIYQTSNFRVQPTESIVRFPNITNLCPFGEVFNATRFASVYAWNRKRISNCVADYSVLYNSASFSTFKCYGVSPTKLNDLCFTNVYADSFVIRGDEVRQIAPGQTGKIADYNYKLPDDFTGCVIAWNSNNLDSKVGGNYNYLYRLFRKSNLKPFERDISTEIYQAGSTPCNGVEGFNCYFPLQSYGFQPTNGVGYQPYRVVVLSFELLHAPATVCGPKKSTNLVKNKCVNFNFNGLTGTGVLTESNKKFLPFQQFGRDIADTTDAVRDPQTLEILDITPCSFGGVSVITPGTNTSNQVAVLYQGVNCTEVPVAIHADQLTPTWRVYSTGSNVFQTRAGCLIGAEHVNNSYECDIPIGAGICASYQTQTNSPRRARSVASQSIIAYTMSLGAENSVVYSNNSIAIPTNFTISVTTEILPVSMTKTSVDCTMYICGDSTECSNLLLQYGSFCTQLNRALTGIAVEQDKNTQEVFAQVKQIYKTPPIKDFGGFNFSQILPDPSKPSKRSFIEDLLFNKVTLADAGFIKQYGDCLGDIAARDLICAQKFNGLTVLPPLLTDEMIAQYTSALLAGTITSGWTFGAGAALQIPFAMQMAYRFNGCGVTQNVLYENQKLIANQFNSAIGKIQDSLSSTASALGKLQDVVNQNAQALNTLVKQLSSNFGAISSVLNDILSRLDKVEAEVQIDRLITGRLQSLQTYVTQQLIRAAEIRASANLAATKMSECVLGQSKRVDFCGKGCHLMSFPQSAPHGVVFLHVTYVPAQEKNFTTAPAICHDGKAHFPREGVFVSNGTHWFVTQRNFYEPQIITTDNTFVSGNCDVVIGIVNNTVYDPLQPELDSFKEELDKYFKNHTSPDVDLGDISGINASVVNIQKEIDRLNEVAKNLNESLIDLQELGKYEQYIKGGGSGGGQIYEGKLTAEGLRFGIVASRFNHALVDRLVEGAIDAIVRHGGREEDITLVRVPGSWEIPVAAGELARKEDIDAVIAIGVLIRGATPHFDYIASEVSKGLADLSLELRKPITFGVITADTLEQAIERAGTKHGNKGWEAALSAIEMANLFKSLR

SEQ ID NO: 4270 - protein, 1371 aa, Artificial Sequence
  SARS-CoV-2/France/HF2496/2020__EPI_ISL_418231 spike protein (1-1211)(I909C_Y1047C) LumSynth construct
MFVFLVLLPLVSSQCVNLTTRTQLPPAYTNSFTRGVYYPDKVFRSSVLHSTQDLFLPFFSNVTWFHAIHVSGTNGTKRFDNPVLPFNDGVYFASTEKSNIIRGWIFGTTLDSKTQSLLIVNNATNVVIKVCEFQFCNDPFLGVYYHKNNKSWMESEFRVYSSANNCTFEYVSQPFLMDLEGKQGNFKNLREFVFKNIDGYFKIYSKHTPINLVRDLPQGFSALEPLVDLPIGINITRFQTLLALHRSYLTPGDSSSGWTAGAAAYYVGYLQPRTFLLKYNENGTITDAVDCALDPLSETKCTLKSFTVEKGIYQTSNFRVQPTESIVRFPNITNLCPFGEVFNATRFASVYAWNRKRISNCVADYSVLYNSASFSTFKCYGVSPTKLNDLCFTNVYADSFVIRGDEVRQIAPGQTGKIADYNYKLPDDFTGCVIAWNSNNLDSKVGGNYNYLYRLFRKSNLKPFERDISTEIYQAGSTPCNGVEGFNCYFPLQSYGFQPTNGVGYQPYRVVVLSFELLHAPATVCGPKKSTNLVKNKCVNFNFNGLTGTGVLTESNKKFLPFQQFGRDIADTTDAVRDPQTLEILDITPCSFGGVSVITPGTNTSNQVAVLYQGVNCTEVPVAIHADQLTPTWRVYSTGSNVFQTRAGCLIGAEHVNNSYECDIPIGAGICASYQTQTNSPRRARSVASQSIIAYTMSLGAENSVAYSNNSIAIPTNFTISVTTEILPVSMTKTSVDCTMYICGDSTECSNLLLQYGSFCTQLNRALTGIAVEQDKNTQEVFAQVKQIYKTPPIKDFGGFNFSQILPDPSKPSKRSFIEDLLFNKVTLADAGFIKQYGDCLGDIVARDLICAQKFNGLTVLPPLLTDEMIAQYTSALLAGTITSGWTFGAGAALQIPFAMQMAYRFNGCGVTQNVLYENQKLIANQFNSAIGKIQDSLSSTASALGKLQDVVNQNAQALNTLVKQLSSNFGAISSVLNDILSRLDKVEAEVQIDRLITGRLQSLQTYVTQQLIRAAEIRASANLAATKMSECVLGQSKRVDFCGKGCHLMSFPQSAPHGVVFLHVTYVPAQEKNFTTAPAICHDGKAHFPREGVFVSNGTHWFVTQRNFYEPQIITTDNTFVSGNCDVVIGIVNNTVYDPLQPELDSFKEELDKYFKNHTSPDVDLGDISGINASVVNIQKEIDRLNEVAKNLNESLIDLQELGKYEQYIKGGGSGGGQIYEGKLTAEGLRFGIVASRFNHALVDRLVEGAIDAIVRHGGREEDITLVRVPGSWEIPVAAGELARKEDIDAVIAIGVLIRGATPHFDYIASEVSKGLADLSLELRKPITFGVITADTLEQAIERAGTKHGNKGWEAALSAIEMANLFKSLR

SEQ ID NO: 4271 - protein, 1371 aa, Artificial Sequence
  SARS-CoV-2/USA/WA-UW291/2020__EPI_ISL_418076 spike protein (1-1211)(I909C_Y1047C) LumSynth construct
MFVFLVLLPLVSSQCVNLTTRTQLPPAYTNSFTRGVYYPDKVFRSSVLHSTQDLFLPFFSNVTWFHAIHVSGTNGTKRFDNPVLPFNDGVYFASTEKSNIIRGWIFGTTLDSKTQSLLIVNNATNVVIKVCEFQFCNDPFLGVYYHKNNKSWMESEFRVYSSANNCTFEYVSQPFLMDLEGKQGNFKNLREFVFKNIDGYFKIYSKHTPINLVRDLPQGFSALEPLVDLPIGINITRFQTLLALHRSYLTPGDSSSGWTAGAAAYYVGYLQPRTFLLKYNENGTITDAVDCALDPLSETKCTLKSFTVEKGIYQTSNFRVQPTESIVRFPNITNLCPFGEVFNATRFASVYAWNRKRISNCVADYSVLYNSASFSTFKCYGVSPTKLNDLCFTNVYADSFVIRGDEVRQIAPGQTGKIADYNYKLPDDFTGCVIAWNSNNLDSKVGGNYNYLYRLFRKSNLKPFERDISTEIYQAGSTPCNGVEGFNCYFPLQSYGFQPTNGVGYQPYRVVVLSFELLHAPATVCGPKKSTNLVKNKCVNFNFNGLTGTGVLTESNKKFLPFQQFGRDIADTTDAVRDPQTLEILDITPCSFGGVSVITPGTNTSNQVAVLYQGVNCTEVPVAIHADQLTPTWRVYSTGSNVFQTRAGCLIGAEHVNNSYECDIPIGAGICASYQTQTNSPRRARSVASQSIIAYTMSLGAENSVAYSNNSIAIPTNFTISVTTEILPVSMTKTSVDCTMYICGDSTECSNLLLQYGSFCTQLNRALTGIAVEQDKNTQEVFAQVKQIYKTPPIKDFGGFNFSQILPDPSKPSKRSFIEDLLFNKVTLADAGFIKQYGDCLGDIAARDLICAQKFNGLTVLPPLLTDEMIAQYTSALLAGTITSGWTFGAGAALQIPFAMQMAYRFNGCGVTQNVLYENQKLIANQFNSAIGKIQYSLSSTASALGKLQDVVNQNAQALNTLVKQLSSNFGAISSVLNDILSRLDKVEAEVQIDRLITGRLQSLQTYVTQQLIRAAEIRASANLAATKMSECVLGQSKRVDFCGKGCHLMSFPQSAPHGVVFLHVTYVPAQEKNFTTAPAICHDGKAHFPREGVFVSNGTHWFVTQRNFYEPQIITTDNTFVSGNCDVVIGIVNNTVYDPLQPELDSFKEELDKYFKNHTSPDVDLGDISGINASVVNIQKEIDRLNEVAKNLNESLIDLQELGKYEQYIKGGGSGGGQIYEGKLTAEGLRFGIVASRFNHALVDRLVEGAIDAIVRHGGREEDITLVRVPGSWEIPVAAGELARKEDIDAVIAIGVLIRGATPHFDYIASEVSKGLADLSLELRKPITFGVITADTLEQAIERAGTKHGNKGWEAALSAIEMANLFKSLR

SEQ ID NO: 4272 - protein, 1371 aa, Artificial Sequence; identical to SEQ ID NO: 4235
  SARS-CoV-2/Portugal/PT0034/2020__EPI_ISL_418019 spike protein (1-1211)(I909C_Y1047C) LumSynth construct

SEQ ID NO: 4273 - protein, 1371 aa, Artificial Sequence
  SARS-CoV-2/Iceland/202/2020__EPI_ISL_417750 spike protein (1-1211)(I909C_Y1047C) LumSynth construct
MFVFLVLLPLVSSQCVNLTTRTQLPPAYTNSFTRGVYYPDKVFRSSVLHSTQDLFLPFFSNVTWFHAIHVSGTNGTKRFDNPVLPFNDGVYFASTEKSNIIRGWIFGTTLDSKTQSLLIVNNATNVVIKVCEFQFCNDPFLGVYYHKNNKSWMESEFRVYSSANNCTFEYVSQPFLMDLEGKQGNFKNLREFVFKNIDGYFKIYSKHTPINLVRDLPQGFSALEPLVDLPIGINITRFQTLLALHRSYLTPGDSSSGWTAGAAAYYVGYLQPRTFLLKYNENGTITDAVDCALDPLSETKCTLKSFTVEKGIYQTSNFRVQPTESIVRFPNITNLCPFGEVFNATRFASVYAWNRKRISNCVADYSVLYNSASFSTFKCYGVSPTKLNDLCFTNVYADSFVIRGDEVRQIAPGQTGKIADYNYKLPDDFTGCVIAWNSNNLDSKVGGNYNYLYRLFRKSNLKPFERDISTEIYQAGSTPCNGVEGFNCYFPLQSYGFQPTNGVGYQPYRVVVLSFELLHAPATVCGPKKSTNLVKNKCVNFNFNGLTGTGVLTESNKKFLPFQQFGRDIADTTDAVRDPQTLEILDITPCSFGGVSVITPGTNTSNQVAVLYQDVNCTEVPVAIHADQLTPTWRVYSTGSNVFQTRAGCLIGAEHVNNSYECDIPIGAGICASYQTQTNSPRRARSVASQSIIAYTMSLGAENSVAYSNNSIAIPTNFTISVTTEILPVSMTKTSVDCTMYICGDSTECSNLLLQYGSFCTQLNRALTGIAVEQDKNTQEVFAQVKQIYKTPPIKDFGGFNFSQILPDPSKPSKRSFIEDLLFNKVTLADAGFIKQYGDCLGDIAARDLICAQKFNGLTVLPPLLTDEMIAQYTSALLAGTITSGWTFGAGAALQIPFAMQMAYRFNGCGVTQNVLYENQKLIANQFNSAIGKIQDSLSSTASALGKLQDVVNQNAQALNTLVKQLSSNFGAISSVLNDILSRLDKVEAEVQIDRLITGRLQSLQTYVTQQLIRAAEIRASANLAATKMSECVLGQSKRVDFCGKGCHLMSFPQSAPHGVVFLHVTYVPAQEKNFTTAPAICHDGKAHFPREGVFVSNGTHWFVTQRNFYEPQIITTDNTFVSGNCDVVIGIVNNTVYDPLQPELDSFKEELDKYFKNHTSPDVDLGDIPGINASVVNIQKEIDRLNEVAKNLNESLIDLQELGKYEQYIKGGGSGGGQIYEGKLTAEGLRFGIVASRFNHALVDRLVEGAIDAIVRHGGREEDITLVRVPGSWEIPVAAGELARKEDIDAVIAIGVLIRGATPHFDYIASEVSKGLADLSLELRKPITFGVITADTLEQAIERAGTKHGNKGWEAALSAIEMANLFKSLR

SEQ ID NO: 4274 - protein, 1371 aa, Artificial Sequence
  SARS-CoV-2/USA/WA-UW261/2020__EPI_ISL_418046 spike protein (1-1211)(I909C_Y1047C) LumSynth construct
MFVFLVLLPLVSSQCVNLTTRTQLPPAYTNSFTRGVYYPDKVFRSSVLHSTQDLFLPFFSNVTWFHAIHVSGTNGTKRFDNPVLPFNDGVYFASTEKSNIIRGWIFGTTLDSKTQSLLIVNNATNVVIKVCEFQFCNDPFLGVYYHKNNKSWMESEFRVYSSANNCTFEYVSQPFLMDLEGKQGNFKNLREFVFKNIDGYFKIYSKHTPINLVRDLPQGFSALEPLVDLPIGINITRFQTLLALHRSYLTPGDSSSGWTAGAAAYYVGYLQPRTFLLKYNENGTITDAVDCALDPLSETKCTLKSFTVEKGIYQTSNFRVQPTESIVRFPNITNLCPFGEVFNATRFTSVYAWNRKRISNCVADYSVLYNSASFSTFKCYGVSPTKLNDLCFTNVYADSFVIRGDEVRQIAPGQTGKIADYNYKLPDDFTGCVIAWNSNNLDSKVGGNYNYLYRLFRKSNLKPFERDISTEIYQAGSTPCNGVEGFNCYFPLQSYGFQPTNGVGYQPYRVVVLSFELLHAPATVCGPKKSTNLVKNKCVNFNFNGLTGTGVLTESNKKFLPFQQFGRDIADTTDAVRDPQTLEILDITPCSFGGVSVITPGTNTSNQVAVLYQDVNCTEVPVAIHADQLTPTWRVYSTGSNVFQTRAGCLIGAEHVNNSYECDIPIGAGICASYQTQTNSPRRARSVASQSIIAYTMSLGAENSVAYSNNSIAIPTNFTISVTTEILPVSMTKTSVDCTMYICGDSTECSNLLLQYGSFCTQLNRALTGIAVEQDKNTQEVFAQVKQIYKTPPIKDFGGFNFSQILPDPSKPSKRSFIEDLLFNKVTLADAGFIKQYGDCLGDIAARDLICAQKFNGLTVLPPLLTDEMIAQYTSALLAGTITSGWTFGAGAALQIPFAMQMAYRFNGCGVTQNVLYENQKLIANQFNSAIGKIQDSLSSTASALGKLQDVVNQNAQALNTLVKQLSSNFGAISSVLNDILSRLDKVEAEVQIDRLITGRLQSLQTYVTQQLIRAAEIRASANLAATKMSECVLGQSKRVDFCGKGCHLMSFPQSAPHGVVFLHVTYVPAQEKNFTTAPAICHDGKAHFPREGVFVSNGTHWFVTQRNFYEPQIITTDNTFVSGNCDVVIGIVNNTVYDPLQPELDSFKEELDKYFKNHTSPDVDLGDISGINASVVNIQKEIDRLNEVAKNLNESLIDLQELGKYEQYIKGGGSGGGQIYEGKLTAEGLRFGIVASRFNHALVDRLVEGAIDAIVRHGGREEDITLVRVPGSWEIPVAAGELARKEDIDAVIAIGVLIRGATPHFDYIASEVSKGLADLSLELRKPITFGVITADTLEQAIERAGTKHGNKGWEAALSAIEMANLFKSLR

SEQ ID NO: 4275 - protein, 1371 aa, Artificial Sequence
  SARS-CoV-2/Portugal/PT0035/2020__EPI_ISL_418020 spike protein (1-1211)(I909C_Y1047C) LumSynth construct
MFVFLVLLPLVSSQCVNLTTRTQLPPAYTNSFTRGVYYPDKVFRSSVLHSTQDLFLPFFSNVTWFHAIHVSGTNGTKRFDNPVLPFNDGVYFASTEKSNIIRGWIFGTTLDSKTQSLLIVNNATNVVIKVCEFQFCNDPFLGVYYHKNNKSWMESEFRVYSSANNCTFEYVSQPFLMDLEGKQGNFKNLREFVFKNIDGYFKIYSKHTPINLVRDLPQGFSALEPLVDLPIGINITRFQTLLALHRSYLTPGDSSSGWTAGAAAYYVGYLQPRTFLLKYNENGTITDAVDCALDPLSETKCTLKSFTVEKGIYQTSNFRVQPTESIVRFPNITNLCPFGEVFNATRFASVYAWNRKRISNCVADYSVLYNSASFSTFKCYGVSPTKLNDLCFTNVYADSFVIRGDEVRQIAPGQTGKIADYNYKLPDDFTGCVIAWNSNNLDSKVGGNYNYLYRLFRKSNLKPFERDISTEIYQAGSTPCNGVEGFNCYFPLQSYGFQPTNGVGYQPYRVVVLSFELLHAPATVCGPKKSTNLVKNKCVNFNFNGLTGTGVLTESNKKFLPFQQFGRDIADTTDAVRDPQTLEILDITPCSFGGVSVITPGTNTSNQVAVLYQDVNCTEVPVAIHADQLTPTWRVYSTGSNVFQTRAGCLIGAEHVNNSYECDIPIGAGICASYQTQTNSPRRARSVASQSIIAYTMSLGAENSVAYSNNSIAIPTNFTISVTTEILPVSMTKTSVDCTMYICGDSTECSNLLLQYGSFCTQLNRALTGIAVEQDKNTQEVFAQVKQIYKTPPIKDFGGFNFSQILPDPSKPSKRSFIEDLLFNKVTLADAGFIKQYGDCLGDISARDLICAQKFNGLTVLPPLLTDEMIAQYTSALLAGTITSGWTFGAGAALQIPFAMQMAYRFNGCGVTQNVLYENQKLIANQFNSAIGKIQDSLSSTASALGKLQDVVNQNAQALNTLVKQLSSNFGAISSVLNDILSRLDKVEAEVQIDRLITGRLQSLQTYVTQQLIRAAEIRASANLAATKMSECVLGQSKRVDFCGKGCHLMSFPQSAPHGVVFLHVTYVPAQEKNFTTAPAICHDGKAHFPREGVFVSNGTHWFVTQRNFYEPQIITTDNTFVSGNCDVVIGIVNNTVYDPLQPELDSFKEELDKYFKNHTSPDVDLGDISGINASVVNIQKEIDRLNEVAKNLNESLIDLQELGKYEQYIKGGGSGGGQIYEGKLTAEGLRFGIVASRFNHALVDRLVEGAIDAIVRHGGREEDITLVRVPGSWEIPVAAGELARKEDIDAVIAIGVLIRGATPHFDYIASEVSKGLADLSLELRKPITFGVITADTLEQAIERAGTKHGNKGWEAALSAIEMANLFKSLR

SEQ ID NO: 4276 - protein, 1371 aa, Artificial Sequence
  SARS-CoV-2/USA/NY-NYUMC7/2020__EPI_ISL_418192 spike protein (1-1211)(I909C_Y1047C) LumSynth construct
MFVFLVLLPLVSSQCVNLTTRTQLPPAYTNSFTRGVYYPDKVFRSSVLHSTQDLFLPFFSNVTWFHAIHVSGTNGTKRFDNPVLPFNDGVYFASTEKSNIIRGWIFGTTLDSKTQSLLIVNNATNVVIKVCEFQFCNDPFLGVYHHKNNKSWMESEFRVYSSANNCTFEYVSQPFLMDLEGKQGNFKNLREFVFKNIDGYFKIYSKHTPINLVRDLPQGFSALEPLVDLPIGINITRFQTLLALHRSYLTPGDSSSGWTAGAAAYYVGYLQPRTFLLKYNENGTITDAVDCALDPLSETKCTLKSFTVEKGIYQTSNFRVQPTESIVRFPNITNLCPFGEVFNATRFASVYAWNRKRISNCVADYSVLYNSASFSTFKCYGVSPTKLNDLCFTNVYADSFVIRGDEVRQIAPGQTGKIADYNYKLPDDFTGCVIAWNSNNLDSKVGGNYNYLYRLFRKSNLKPFERDISTEIYQAGSTPCNGVEGFNCYFPLQSYGFQPTNGVGYQPYRVVVLSFELLHAPATVCGPKKSTNLVKNKCVNFNFNGLTGTGVLTESNKKFLPFQQFGRDIADTTDAVRDPQTLEILDITPCSFGGVSVITPGTNTSNQVAVLYQGVNCTEVPVAIHADQLTPTWRVYSTGSNVFQTRAGCLIGAEHVNNSYECDIPIGAGICASYQTQTNSPRRARSVASQSIIAYTMSLGAENSVAYSNNSIAIPTNFTISVTTEILPVSMTKTSVDCTMYICGDSTECSNLLLQYGSFCTQLNRALTGIAVEQDKNTQEVFAQVKQIYKTPPIKDFGGFNFSQILPDPSKPSKRSFIEDLLFNKVTLADAGFIKQYGDCLGDIAARDLICAQKFNGLTVLPPLLTDEMIAQYTSALLAGTITSGWTFGAGAALQIPFAMQMAYRFNGCGVTQNVLYENQKLIANQFNSAIGKIQDSLSSTASALGKLQDVVNQNAQALNTLVKQLSSNFGAISSVLNDILSRLDKVEAEVQIDRLITGRLQSLQTYVTQQLIRAAEIRASANLAATKMSECVLGQSKRVDFCGKGCHLMSFPQSAPHGVVFLHVTYVPAQEKNFTTAPAICHDGKAHFPREGVFVSNGTHWFVTQRNFYEPQIITTDNTFVSGNCDVVIGIVNNTVYDPLQPELDSFKEELDKYFKNHTSPDVDLGDISGINASVVNIQKEIDRLNEVAKNLNESLIDLQELGKYEQYIKGGGSGGGQIYEGKLTAEGLRFGIVASRFNHALVDRLVEGAIDAIVRHGGREEDITLVRVPGSWEIPVAAGELARKEDIDAVIAIGVLIRGATPHFDYIASEVSKGLADLSLELRKPITFGVITADTLEQAIERAGTKHGNKGWEAALSAIEMANLFKSLR

SEQ ID NO: 4277 - protein, 1371 aa, Artificial Sequence
  SARS-CoV-2/Iceland/189/2020__EPI_ISL_417709 spike protein (1-1211)(I909C_Y1047C) LumSynth construct
MFVFLVLLPLVSSQCVNLTTRTQLPPAYTNSFTRGVYYPDKVFRSSVLHSTQDLFLPFFSNVTWFHAIHVSGTNGTKRFDNPVLPFNDGVYFASTEKSNIIRGWIFGTTLDSKTQSLLIVNNATNVVIKVCEFQFCNDPFLGVYYHKNNKSWMESEFRVYSSANNCTFEYVSQPFLMDLEGKQGNFKNLREFVFKNIDGYFKIYSKHTPINLVRDLPQGFSALEPLVDLPIGINITRFQTLLALHRSYLTPGDSSSGWTAGAAAYYVGYLQPRTFLLKYNENGTITDAVDCALDPLSETKCTLKSFTVEKGIYQTSNFRVQPTESIVRFPNITNLCPFGEVFNATRFASVYAWNRKRISNCVADYSVLYNSASFSTFKCYGVSPTKLNDLCFTNVYADSFVIRGDEVRQIAPGQTGKIADYNYKLPDDFTGCVIAWNSNNLDSKVGGNYNYLYRLFRKSNLKPFERDISTEIYQAGSTPCNGVEGFNCYFPLQSYGFQPTNGVGYQPYRVVVLSFELLHAPATVCGPKKSTNLVKNKCVNFNFNGLTGTGVLTESNKKFLPFQQFGRDIADTTDAVRDPQTLEILDITPCSFGGVSVITPGTNTSNQVAVLYQGVNCTEVPVAIHADQLTPTWRVYSTGSNVFQTRAGCLIGAEHVNNSYECDIPIGAGICASYQTQTNSPRRARSVASQSIIAYTMSLGAENSVAYSNNSIAIPTNFTISVTTEILPVSMTKTSVDCTMYICGDSTECSNLLLQYGSFCTQLNRALTGIAVEQDKNTQEVFAQVKQIYKTPPIKDFGGFNFSQILPDPSKPSKRSFIEDLLFNKVTLADAGFTKQYGDCLGDIAARDLICAQKFNGLTVLPPLLTDEMIAQYTSALLAGTITSGWTFGAGAALQIPFAMQMAYRFNGCGVTQNVLYENQKLIANQFNSAIGKIQDSLSSTASALGKLQDVVNQNAQALNTLVKQLSSNFGAISSVLNDILSRLDKVEAEVQIDRLITGRLQSLQTYVTQQLIRAAEIRASANLAATKMSECVLGQSKRVDFCGKGCHLMSFPQSAPHGVVFLHVTYVPAQEKNFTTAPAICHDGKAHFPREGVFVSNGTHWFVTQRNFYEPQIITTDNTFVSGNCDVVIGIVNNTVYDPLQPELDSFKEELDKYFKNHTSPDVDLGDISGINASVVNIQKEIDRLNEVAKNLNESLIDLQELGKYEQYIKGGGSGGGQIYEGKLTAEGLRFGIVASRFNHALVDRLVEGAIDAIVRHGGREEDITLVRVPGSWEIPVAAGELARKEDIDAVIAIGVLIRGATPHFDYIASEVSKGLADLSLELRKPITFGVITADTLEQAIERAGTKHGNKGWEAALSAIEMANLFKSLR

SEQ ID NO: 4278 - protein, 1371 aa, Artificial Sequence
  SARS-CoV-2/Australia/NSW56/2020__EPI_ISL_417408 spike protein (1-1211)(I909C_Y1047C) LumSynth construct
MFVFLVLLPLVSSQCVNLTTRTQLPPAYTNSFTRGVYYPDKVFRSSVLHSTQDLFLPFFSNVTWFHAIHVSGTNGTKRFDNPVLPFNDGVYFASTEKSNIIRGWIFGTTLDSKTQSLLIVNNATNVVIKVCEFQFCNDPFLGVYYHKNNKSWMESEFRVYSSANNCTFEYVSQPFLMDLEGKQGNFKNLREFVFKNIDGYFKIYSKHTPINLVRDLPQGFSALEPLVDLPIGINITRFQTLLALHRSYLTPGDSSSGWTAGAAAYYVGYLQPRTFLLKYNENGTITDAVDCALDPLSETKCTLKSFTVEKGIYQTSNFRVQPTESIVRFPNITNLCPFGEVFNATRFASVYAWNRKRISNCVADYSVLYNSASFSTFKCYGVSPTKLNDLCFTNVYADSFVIRGDEVRQIAPGQTGKIADYNYKLPDDFTGCVIAWNSNNLDSKVGGNYNYLYRLFRKSNLKPFERDISTEIYQAGSTPCNGVEGFNCYFPLQSYGFQPTNGVGYQPYRVVVLSFELLHAPATVCGPKKSTNLVKNKCVNFNFNGLTGTGVLTESNKKFLPFQQFGRDIADTTDAVRDPQTLEILDITPCSFGGVSVITPGTNTSNQVAVLYQDVNCTEVPVAIHADQLTPTWRVYSTGSNVFQTRAGCLIGAEHVNNSYECDIPIGAGICASYQTQTNSPRRARSVASQSIIAYTMSLGAENSVAYSNNSIAIPTNFTISVTTEILPVSMTKTSVDCTMYICGDSTECSNLLLQYGSFCTQLNRALTGIAVEQDKNTQEVFAQVKQIYKTPPIKDFGGFNFSQILPDSSKPSKRSFIEDLLFNKVTLADAGFIKQYGDCLGDIAARDLICAQKFNGLTVLPPLLTDEMIAQYTSALLAGTITSGWTFGAGAALQIPFAMQMAYRFNGCGVTQNVLYENQKLIANQFNSAIGKIQDSLSSTASALGKLQDVVNQNAQALNTLVKQLSSNFGAISSVLNDILSRLDKVEAEVQIDRLITGRLQSLQTYVTQQLIRAAEIRASANLAATKMSECVLGQSKRVDFCGKGCHLMSFPQSAPHGVVFLHVTYVPAQEKNFTTAPAICHDGKAHFPREGVFVSNGTHWFVTQRNFYEPQIITTDNTFVSGNCDVVIGIVNNTVYDPLQPELDSFKEELDKYFKNHTSPDVDLGDISGINASVVNIQKEIDRLNEVAKNLNESLIDLQELGKYEQYIKGGGSGGGQIYEGKLTAEGLRFGIVASRFNHALVDRLVEGAIDAIVRHGGREEDITLVRVPGSWEIPVAAGELARKEDIDAVIAIGVLIRGATPHFDYIASEVSKGLADLSLELRKPITFGVITADTLEQAIERAGTKHGNKGWEAALSAIEMANLFKSLR

SEQ ID NO: 4279 - protein, 1371 aa, Artificial Sequence
  SARS-CoV-2/Iceland/280/2020__EPI_ISL_417608 spike protein (1-1211)(I909C_Y1047C) LumSynth construct
MFVFLVLLPLVSSQCVNLTTRTQLPPAYTNSFTRGVYYPDKVFRSSVLHSTQDLFLPFFSNVTWFHAIHVSGTNGTKRFDNPVLPFNDGVYFASTEKSNIIRGWIFGTTLDSKTQSLLIVNNATNVVIKVCEFQFCNDPFLGVYYHKNNKSWMESEFRVYSSANNCTFEYVSQPFLMDLEGKQGNFKNLREFVFKNIDGYFKIYSKHTPINLVRDLPQGFSALEPLVDLPIGINITRFQTLLALHRSYLTPGDSSSGWTAGAAAYYVGYLQPRTFLLKYNENGTITDAVDCALDPLSETKCTLKSFTVEKGIYQTSNFRVQPTESIVRFPNITNLCPFGEVFNATRFASVYAWNRKRISNCVADYSVLYNSASFSTFKCYGVSPTKLNDLCFTNVYADSFVIRGDEVRQIAPGQTGKIADYNYKLPDDFTGCVIAWNSNNLDSKVGGNYNYLYRLFRKSNLKPFERDISTEIYQAGSTPCNGVEGFNCYFPLQSYGFQPTNGVGYQPYRVVVLSFELLHAPATVCGPKKSTNLVKNKCVNFNFNGLTGTGVLTESNKKFLPFQQFGRDIADTTDAVRDPQTLEILDITPCSFGGVSVITPGTNTSNQVAVLYQGVNCTEVPVAIHADQLTPTWRVYSTGSNVFQTRAGCLIGAEHVNNSYECDIPIGAGICASYHTQTNSPRRARSVASQSIIAYTMSLGAENSVAYSNNSIAIPTNFTISVTTEILPVSMTKTSVDCTMYICGDSTECSNLLLQYGSFCTQLNRALTGIAVEQDKNTQEVFAQVKQIYKTPPIKDFGGFNFSQILPDPSKPSKRSFIEDLLFNKVTLADAGFIKQYGDCLGDIAARDLICAQKFNGLTVLPPLLTDEMIAQYTSALLAGTITSGWTFGAGAALQIPFAMQMAYRFNGCGVTQNVLYENQKLIANQFNSAIGKIQDSLSSTASALGKLQDVVNQNAQALNTLVKQLSSNFGAISSVLNDILSRLDKVEAEVQIDRLITGRLQSLQTYVTQQLIRAAEIRASANLAATKMSECVLGQSKRVDFCGKGCHLMSFPQSAPHGVVFLHVTYVPAQEKNFTTAPAICHDGKAHFPREGVFVSNGTHWFVTQRNFYEPQIITTDNTFVSGNCDVVIGIVNNTVYDPLQPELDSFKEELDKYFKNHTSPDVDLGDISGINASVVNIQKEIDRLNEVAKNLNESLIDLQELGKYEQYIKGGGSGGGQIYEGKLTAEGLRFGIVASRFNHALVDRLVEGAIDAIVRHGGREEDITLVRVPGSWEIPVAAGELARKEDIDAVIAIGVLIRGATPHFDYIASEVSKGLADLSLELRKPITFGVITADTLEQAIERAGTKHGNKGWEAALSAIEMANLFKSLR

SEQ ID NO: 4280 - protein, 1371 aa, Artificial Sequence; identical to SEQ ID NO: 4235
  SARS-CoV-2/Iceland/247/2020__EPI_ISL_417575 spike protein (1-1211)(I909C_Y1047C) LumSynth construct

SEQ ID NO: 4281 - protein, 1371 aa, Artificial Sequence
  SARS-CoV-2/Iceland/238/2020__EPI_ISL_417566 spike protein (1-1211)(I909C_Y1047C) LumSynth construct
MFVFLVLLPLVSSQCVNLTTRTQLPPAYTNSFTRGVYYPDKVFRSSVLHSTQDLFLPFFSNVTWFHAIHVSGTNGTKRFDNPVLPFNDGVYFASTEKSNIIRGWIFGTTLDSKTQSLLIVNNATNVVIKVCEFQFCNDPFLGVYYHKNNKSWMESEFRVYSSANNCTFEYVSQPFLMDLEGKQGNFKNLREFVFKNIDGYFKIYSKHTPINLVRDLPQGFSALEPLVDLPIGINITRFQTLLALHRSYLTPGDSSSGWTAGAAAYYVGYLQPRTFLLKYNENGTITDAVDCALDPLSETKCTLKSFTVEKGIYQTSNFRVQPTESIVRFPNITNLCPFGEVFNATRFASVYAWNRKRISNCVADYSVLYNSASFSTFKCYGVSPTKLNDLCFTNVYADSFVIRGDEVRQIAPGQTGKIADYNYKLPDDFTGCVIAWNSNNLDSKVGGNYNYLYRLFRKSNLKPFERDISTEIYQAGSTPCNGVEGFNCYFPLQSYGFQPTNGVGYQPYRVVVLSFELLHAPATVCGPKKSTNLVKNKCVNFNFNGLTGTGVLTESNKKFLPFQQFGRDIADTTDAVRDPQTLEILDITPCSFGGVSVITPGTNTSNQVAVLYQGVNCTEVPVAIHADQLTPTWRVYSTGSNVFQTRAGCLIGAEHVNNSYECDIPIGAGICASYQTQTNSPRRARSVASQSIIAYTMSLGAENSVAYSNNSIAIPTNFTISVTTEILPVSMTKTSVDCTMYICGDSTECSNLLLQYGSFCTQLNRALTGIAVEQDKNTQEVFAQVKQIYKTPPIKDFGGFNFSQILPDPSKPSKRSFIEDLLFNKVTLADVGFIKQYGDCLGDIAARDLICAQKFNGLTVLPPLLTDEMIAQYTSALLAGTITSGWTFGAGAALQIPFAMQMAYRFNGCGVTQNVLYENQKLIANQFNSAIGKIQDSLSSTASALGKLQDVVNQNAQALNTLVKQLSSNFGAISSVLNDILSRLDKVEAEVQIDRLITGRLQSLQTYVTQQLIRAAEIRASANLAATKMSECVLGQSKRVDFCGKGCHLMSFPQSAPHGVVFLHVTYVPAQEKNFTTAPAICHDGKAHFPREGVFVSNGTHWFVTQRNFYEPQIITTDNTFVSGNCDVVIGIVNNTVYDPLQPELDSFKEELDKYFKNHTSPDVDLGDISGINASVVNIQKEIDRLNEVAKNLNESLIDLQELGKYEQYIKGGGSGGGQIYEGKLTAEGLRFGIVASRFNHALVDRLVEGAIDAIVRHGGREEDITLVRVPGSWEIPVAAGELARKEDIDAVIAIGVLIRGATPHFDYIASEVSKGLADLSLELRKPITFGVITADTLEQAIERAGTKHGNKGWEAALSAIEMANLFKSLR

SEQ ID NO: 4282 - protein, 1371 aa, Artificial Sequence
  SARS-CoV-2/Greece/16/2020__EPI_ISL_418265 spike protein (1-1211)(I909C_Y1047C) LumSynth construct
MFVFLVLLPLVSSQCVNLTTRTQLPPAYTNSFTRGVYYPDKVFRSSVLHSTQDLFLPFFSNVTWFHAIHVSGTNGTKRFDNPVLPFNDGVYFASTEKSNIIRGWIFGTTLDSKTQSLLIVNNATNVVIKVCEFQFCNDPFLGVYYHKNNKSWMESEFRVYSSANNCTFEYVSQPFLMDLEGKQGNFKNLREFVFKNVDGYFKIYSKHTPINLVRDLPQGFSALEPLVDLPIGINITRFQTLLALHRSYLTPGDSSSGWTAGAAAYYVGYLQPRTFLLKYNENGTITDAVDCALDPLSETKCTLKSFTVEKGIYQTSNFRVQPTESIVRFPNITNLCPFGEVFNATRFASVYAWNRKRISNCVADYSVLYNSASFSTFKCYGVSPTKLNDLCFTNVYADSFVIRGDEVRQIAPGQTGKIADYNYKLPDDFTGCVIAWNSNNLDSKVGGNYNYLYRLFRKSNLKPFERDISTEIYQAGSTPCNGVEGFNCYFPLQSYGFQPTNGVGYQPYRVVVLSFELLHAPATVCGPKKSTNLVKNKCVNFNFNGLTGTGVLTESNKKFLPFQQFGRDIADTTDAVRDPQTLEILDITPCSFGGVSVITPGTNTSNQVAVLYQDVNCTEVPVAIHADQLTPTWRVYSTGSNVFQTRAGCLIGAEHVNNSYECDIPIGAGICASYQTQTNSPRRARSVASQSIIAYTMSLGAENSVAYSNNSIAIPTNFTISVTTEILPVSMTKTSVDCTMYICGDSTECSNLLLQYGSFCTQLNRALTGIAVEQDKNTQEVFAQVKQIYKTPPIKDFGGFNFSQILPDPSKPSKRSFIEDLLFNKVTLADAGFIKQYGDCLGDIAARDLICAQKFNGLTVLPPLLTDEMIAQYTSALLAGTITSGWTFGAGAALQIPFAMQMAYRFNGCGVTQNVLYENQKLIANQFNSAIGKIQDSLSSTASALGKLQDVVNQNAQALNTLVKQLSSNFGAISSVLNDILSRLDKVEAEVQIDRLITGRLQSLQTYVTQQLIRAAEIRASANLAATKMSECVLGQSKRVDFCGKGCHLMSFPQSAPHGVVFLHVTYVPAQEKNFTTAPAICHDGKAHFPREGVFVSNGTHWFVTQRNFYEPQIITTDNTFVSGNCDVVIGIVNNTVYDPLQPELDSFKEELDKYFKNHTSPDVDLGDISGINASVVNIQKEIDRLNEVAKNLNESLIDLQELGKYEQYIKGGGSGGGQIYEGKLTAEGLRFGIVASRFNHALVDRLVEGAIDAIVRHGGREEDITLVRVPGSWEIPVAAGELARKEDIDAVIAIGVLIRGATPHFDYIASEVSKGLADLSLELRKPITFGVITADTLEQAIERAGTKHGNKGWEAALSAIEMANLFKSLR

SEQ ID NO: 4283 - protein, 1371 aa, Artificial Sequence
  SARS-CoV-2/Iceland/319/2020__EPI_ISL_417648 spike protein (1-1211)(I909C_Y1047C) LumSynth construct
MFVFLVLLPLVSSQCVNLTTRTQLPPAYTNSFTRGVYYPDKVFRSSVLHSTQDLFLPFFSNVTWFHAIHVSGTNGTKRFDNPVLPFNDGVYFASTEKSNIIRGWIFGTTLDSKTQSLLIVNNATNVVIKVCEFQFCNDPFLGVYYHKNNKSWMESEFRVYSSANNCTFEYVSQPFLIDLEGKQGNFKNLREFVFKNIDGYFKIYSKHTPINLVRDLPQGFSALEPLVDLPIGINITRFQTLLALHRSYLTPGDSSSGWTAGAAAYYVGYLQPRTFLLKYNENGTITDAVDCALDPLSETKCTLKSFTVEKGIYQTSNFRVQPTESIVRFPNITNLCPFGEVFNATRFASVYAWNRKRISNCVADYSVLYNSASFSTFKCYGVSPTKLNDLCFTNVYADSFVIRGDEVRQIAPGQTGKIADYNYKLPDDFTGCVIAWNSNNLDSKVGGNYNYLYRLFRKSNLKPFERDISTEIYQAGSTPCNGVEGFNCYFPLQSYGFQPTNGVGYQPYRVVVLSFELLHAPATVCGPKKSTNLVKNKCVNFNFNGLTGTGVLTESNKKFLPFQQFGRDIADTTDAVRDPQTLEILDITPCSFGGVSVITPGTNTSNQVAVLYQGVNCTEVPVAIHADQLTPTWRVYSTGSNVFQTRAGCLIGAEHVNNSYECDIPIGAGICASYQTQTNSPRRARSVASQSIIAYTMSLGAENSVAYSNNSIAIPTNFTISVTTEILPVSMTKTSVDCTMYICGDSTECSNLLLQYGSFCTQLNRALTGIAVEQDKNTQEVFAQVKQIYKTPPIKDFGGFNFSQILPDPSKPSKRSFIEDLLFNKVTLADAGFIKQYGDCLGDIAARDLICAQKFNGLTVLPPLLTDEMIAQYTSALLAGTITSGWTFGAGAALQIPFAMQMAYRFNGCGVTQNVLYENQKLIANQFNSAIGKIQDSLSSTASALGKLQDVVNQNAQALNTLVKQLSSNFGAISSVLNDILSRLDKVEAEVQIDRLITGRLQSLQTYVTQQLIRAAEIRASANLAATKMSECVLGQSKRVDFCGKGCHLMSFPQSAPHGVVFLHVTYVPAQEKNFTTAPAICHDGKAHFPREGVFVSNGTHWFVTQRNFYEPQIITTDNTFVSGNCDVVIGIVNNTVYDPLQPELDSFKEELDKYFKNHTSPDVDLGDISGINASVVNIQKEIDRLNEVAKNLNESLIDLQELGKYEQYIKGGGSGGGQIYEGKLTAEGLRFGIVASRFNHALVDRLVEGAIDAIVRHGGREEDITLVRVPGSWEIPVAAGELARKEDIDAVIAIGVLIRGATPHFDYIASEVSKGLADLSLELRKPITFGVITADTLEQAIERAGTKHGNKGWEAALSAIEMANLFKSLR

SEQ ID NO: 4284 - protein, 1371 aa, Artificial Sequence
  SARS-CoV-2/Congo/94/2020__EPI_ISL_417947 spike protein (1-1211)(I909C_Y1047C) LumSynth construct
MFVFLVLLPLVSSQCVNLTTRTQLPPAYTNSFTRGVYYPDKVFRSSVLHSTQDLFLPFFSNVTWFHAIHVSGTNGTKRFDNPVLPFNDGVYFASTEKSNIIRGWIFGTTLDSKTQSLLIVNNATNVVIKVCEFQFCNDPFLGVYYHKNNKSWMESEFRVYSSANNCTFEYVSQPFLMDLEGKQGNFKNLREFVFKNIDGYFKIYSKHTPINLVRDLPQGFSALEPLVDLPIGINITRFQTLLALHRSYLTPGDSSSGWTAGAAAYYVGYLQPRTFLLKYNENGTITDAVDCALDPLSETKCTLKSFTVEKGIYQTSNFRVQPTESIVRFPNITNLCPFGEVFNATRFASVYAWNRKRISNCVADYSVLYNSASFSTFKCYGVSPTKLNDLCFTNVYADSFVIRGDEVRQIAPGQTGKIADYNYKLPDDFTGCVIAWNSNNLDSKVGGNYNYLYRLFRKSNLKPFERDISTEIYQAGSTPCNGVEGFNCYFPLQSYGFQPTNGVGYQPYRVVVLSFELLHAPATVCGPKKSTNLVKNKCVNFNFNGLTGTGVLTESNKKFLPFQQFGRDIADTTDAVRDPQTLEILDITPCSFGGVSVITPGTNTSNQVAVLYQGVNCTEVPVAIHADQLTPTWRVYSTGSNVFQTRAGCLIGAEHVNNSYECDIPIGAGICASYQTQTNSPRRARSVASQSIIAYTMSLGAENSVAYSNNSIAIPTNFTISVTTEILPVSMTKTSVDCTMYICGDSTECSNLLLQYGSFCTQLNRALTGIAVEQDKNTQEVFAQVKQIYKTPPIKDFGGFNFSQILPDPSKPSKRSFIEDILFNKVTLADAGFIKQYGDCLGDIAARDLICAQKFNGLTVLPPLLTDEMIAQYTSALLAGTITSGWTFGAGAALQIPFAMQMAYRFNGCGVTQNVLYENQKLIANQFNSAIGKIQDSLSSTASALGKLQDVVNQNAQALNTLVKQLSSNFGAISSVLNDILSRLDKVEAEVQIDRLITGRLQSLQTYVTQQLIRAAEIRASANLAATKMSECVLGQSKRVDFCGKGCHLMSFPQSAPHGVVFLHVTYVPAQEKNFTTAPAICHDGKAHFPREGVFVSNGTHWFVTQRNFYEPQIITTDNTFVSGNCDVVIGIVNNTVYDPLQPELDSFKEELDKYFKNHTSPDVDLGDISGINASVVNIQKEIDRLNEVAKNLNESLIDLQELGKYEQYIKGGGSGGGQIYEGKLTAEGLRFGIVASRFNHALVDRLVEGAIDAIVRHGGREEDITLVRVPGSWEIPVAAGELARKEDIDAVIAIGVLIRGATPHFDYIASEVSKGLADLSLELRKPITFGVITADTLEQAIERAGTKHGNKGWEAALSAIEMANLFKSLR

SEQ ID NO: 4285 - protein, 1371 aa, Artificial Sequence
  SARS-CoV-2/Congo/158/2020__EPI_ISL_417950 spike protein (1-1211)(I909C_Y1047C) LumSynth construct
MFVFLVLLPLVSSQCVNLTTRTQLPPAYTNSFTRGVYYPDKVFRSSVLHSTQDLFLPFFSNVTWFHAIHVSGTNGTKRFDNPVLPFNDGVYFASTEKSNIIRGWIFGTTLDSKTQSLLIVNNATNVVIKVCEFQFCNDPFLGVYYHKNNKSWMESEFRVYSSANNCTFEYVSQPFLMDLEGKQGNFKNLREFVFKNIDGYFKIYSKHTPINLVRDLPQGFSALEPLVDLPIGINITRFQTLLALHRSYLTPGDSSSGWTAGAAAYYVGYLQPRTFLLKYNENGTITDAVDCALDPLSETKCTLKSFTVEKGIYQTSNFRVQPTESIVRFPNITNLCPFGEVFNATRFASVYAWNRKRISNCVADYSVLYNSASFSTFKCYGVSPTKLNDLCFTNVYADSFVIRGDEVRQIAPGQTGKIADYNYKLPDDFTGCVIAWNSNNLDSKVGGNYNYLYRLFRKSNLKPFERDISTEIYQAGSTPCNGVEGFNCYFPLQSYGFQPTNGVGYQPYRVVVLSFELLHAPATVCGPKKSTNLVKNKCVNFNFNGLTGTGVLTESNKKFLPFQQFGRDIADTTDAVRDPQTLEILDITPCSFGGVSVITPGTNTSNQVAVLYQDVNCTEVPVAIHADQLTPTWRVYSTGSNVFQTRAGCLIGAEHVNNSYECDIPIGAGICASYQTQTNSPRRARSVASQSIIAYTMSLGAENSVAYSNNSIAIPTNFTISVTTEILPVSMTKTSVDCTMYICGDSTECSNLLLQYGSFCTQLNRALTGIAVEQDKNTQEVFAQVKQIYKTPPIKDFGGFNFSQILPDPSKPSKRSFIEDLLFNKVTLADAGFIKQYGDCLGDIAARDLICAQKFNGLTVLPPLLTDEMIAQYTSALLAGTITSGWTFGAGAALQIPFAMQMAYRFNGCGVTQNVLYENQKLIANQFNSAIGKIQDSLSSTASALGKLQDVVNQNAQALNTLVKQLSSNFGAISSVLNDILSRLDKVEAEVQIDRLITGRLQSLQTYVTQQLIRAAEIRASANLAATKMSECVLGQSKRVDFCGKGCHLMSFPQSAPHGVVFLHVTYVPAQEKNFTTAPAICHDGKAHFPREGVFVSNGTHWFVTQRNFYEPQIITTDNTFLSGNCDVVIGIVNNTVYDPLQPELDSFKEELDKYFKNHTSPDVDLGDISGINASVVNIQKEIDRLNEVAKNLNESLIDLQELGKYEQYIKGGGSGGGQIYEGKLTAEGLRFGIVASRFNHALVDRLVEGAIDAIVRHGGREEDITLVRVPGSWEIPVAAGELARKEDIDAVIAIGVLIRGATPHFDYIASEVSKGLADLSLELRKPITFGVITADTLEQAIERAGTKHGNKGWEAALSAIEMANLFKSLR

SEQ ID NO: 4286 - protein, 1371 aa, Artificial Sequence
  SARS-CoV-2/USA/UT-00034/2020__EPI_ISL_417977 spike protein (1-1211)(I909C_Y1047C) LumSynth construct
MFVFLVLLPLVSSQCVNLTTRTQLPPAYTNSFTRGVYYPDKVFRSSVLHSTQDLFLPFFSNVTWFHAIHVSGTNGTKRFDNPVLPFNDGVYFASTEKSNIIRGWIFGTTLDSKTQSLLIVNNATNVVIKVCEFQFCNDPFLGVYYYKNNKSWMESEFRVYSSANNCTFEYVSQPFLMDLEGKQGNFKNLREFVFKNIDGYFKIYSKHTPINLVRDLPQGFSALEPLVDLPIGINITRFQTLLALHRSYLTPGDSSSGWTAGAAAYYVGYLQPRTFLLKYNENGTITDAVDCALDPLSETKCTLKSFTVEKGIYQTSNFRVQPTESIVRFPNITNLCPFGEVFNATRFASVYAWNRKRISNCVADYSVLYNSASFSTFKCYGVSPTKLNDLCFTNVYADSFVIRGDEVRQIAPGQTGKIADYNYKLPDDFTGCVIAWNSNNLDSKVGGNYNYLYRLFRKSNLKPFERDISTEIYQAGSTPCNGVEGFNCYFPLQSYGFQPTNGVGYQPYRVVVLSFELLHAPATVCGPKKSTNLVKNKCVNFNFNGLTGTGVLTESNKKFLPFQQFGRDIADTTDAVRDPQTLEILDITPCSFGGVSVITPGTNTSNQVAVLYQGVNCTEVPVAIHADQLTPTWRVYSTGSNVFQTRAGCLIGAEHVNNSYECDIPIGAGICASYQTQTNSPRRARSVASQSIIAYTMSLGAENSVAYSNNSIAIPTNFTISVTTEILPVSMTKTSVDCTMYICGDSTECSNLLLQYGSFCTQLNRALTGIAVEQDKNTQEVFAQVKQIYKTPPIKDFGGFNFSQILPDPSKPSKRSFIEDLLFNKVTLADAGFIKQYGDCLGDIAARDLICAQKFNGLTVLPPLLTDEMIAQYTSALLAGTITSGWTFGAGAALQIPFAMQMAYRFNGCGVTQNVLYENQKLIANQFNSAIGKIQDSLSSTASALGKLQDVVNQNAQALNTLVKQLSSNFGAISSVLNDILSRLDKVEAEVQIDRLITGRLQSLQTYVTQQLIRAAEIRASANLAATKMSECVLGQSKRVDFCGKGCHLMSFPQSAPHGVVFLHVTYVPAQEKNFTTAPAICHDGKAHFPREGVFVSNGTHWFVTQRNFYEPQIITTDNTFVSGNCDVVIGIVNNTVYDPLQPELDSFKEELDKYFKNHTSPDVDLGDISGINASVVNIQKEIDRLNEVAKNLNESLIDLQELGKYEQYIKGGGSGGGQIYEGKLTAEGLRFGIVASRFNHALVDRLVEGAIDAIVRHGGREEDITLVRVPGSWEIPVAAGELARKEDIDAVIAIGVLIRGATPHFDYIASEVSKGLADLSLELRKPITFGVITADTLEQAIERAGTKHGNKGWEAALSAIEMANLFKSLR

SEQ ID NO: 4287 - protein, 1371 aa, Artificial Sequence
  SARS-CoV-2/USA/UT-00033/2020__EPI_ISL_417976 spike protein (1-1211)(I909C_Y1047C) LumSynth construct
MFVFLVLLPLVSSQCVNLTTRTQLPPAYTNSFTRGVYYPDKVFRSSVLHSTQDLFLPFFSNVTWFHAIHVSGTNGTKRFDNPVLPFNDGVYFASTEKSNIIRGWIFGTTLDSKTQSLLIVNNATNVVIKVCEFQFCNDPFLGVYYHKNNKSWMESEFRVYSSANNCTFEYVSQPFLMDLEGKQGNFKNLREFVFKNIDGYFKIYSKHTPINLVRDLPQGFSALEPLVDLPIGINITRFQTLLALHRSYLTPGDSSSGLTAGAAAYYVGYLQPRTFLLKYNENGTITDAVDCALDPLSETKCTLKSFTVEKGIYQTSNFRVQPTESIVRFPNITNLCPFGEVFNATRFASVYAWNRKRISNCVADYSVLYNSASFSTFKCYGVSPTKLNDLCFTNVYADSFVIRGDEVRQIAPGQTGKIADYNYKLPDDFTGCVIAWNSNNLDSKVGGNYNYLYRLFRKSNLKPFERDISTEIYQAGSTPCNGVEGFNCYFPLQSYGFQPTNGVGYQPYRVVVLSFELLHAPATVCGPKKSTNLVKNKCVNFNFNGLTGTGVLTESNKKFLPFQQFGRDIADTTDAVRDPQTLEILDITPCSFGGVSVITPGTNTSNQVAVLYQGVNCTEVPVAIHADQLTPTWRVYSTGSNVFQTRAGCLIGAEHVNNSYECDIPIGAGICASYQTQTNSPRRARSVASQSIIAYTMSLGAENSVAYSNNSIAIPTNFTISVTTEILPVSMTKTSVDCTMYICGDSTECSNLLLQYGSFCTQLNRALTGIAVEQDKNTQEVFAQVKQIYKTPPIKDFGGFNFSQILPDPSKPSKRSFIEDLLFNKVTLADAGFIKQYGDCLGDIAARDLICAQKFNGLTVLPPLLTDEMIAQYTSALLAGTITSGWTFGAGAALQIPFAMQMAYRFNGCGVTQNVLYENQKLIANQFNSAIGKIQDSLSSTASALGKLQDVVNQNAQALNTLVKQLSSNFGAISSVLNDILSRLDKVEAEVQIDRLITGRLQSLQTYVTQQLIRAAEIRASANLAATKMSECVLGQSKRVDFCGKGCHLMSFPQSAPHGVVFLHVTYVPAQEKNFTTAPAICHDGKAHFPREGVFVSNGTHWFVTQRNFYEPQIITTDNTFVSGNCDVVIGIVNNTVYDPLQPELDSFKEELDKYFKNHTSPDVDLGDISGINASVVNIQKEIDRLNEVAKNLNESLIDLQELGKYEQYIKGGGSGGGQIYEGKLTAEGLRFGIVASRFNHALVDRLVEGAIDAIVRHGGREEDITLVRVPGSWEIPVAAGELARKEDIDAVIAIGVLIRGATPHFDYIASEVSKGLADLSLELRKPITFGVITADTLEQAIERAGTKHGNKGWEAALSAIEMANLFKSLR

SEQ ID NO: 4288 - protein, 1371 aa, Artificial Sequence
  SARS-CoV-2/USA/WI-13/2020__EPI_ISL_417516 spike protein (1-1211)(I909C_Y1047C) LumSynth construct
MFVFLVLLPLVSSQCVNLTTRTQLPPAYTNSFTRGVYYPDKVFRSSVLHSTQDLFLPFFSNVTWFHAIHVSGTNGTKRFDNPVLPFNDGVYFASTEKSNIIRGWIFGTTLDSKTQSLLIVNNATNVVIKVCEFQFCNDPFLGVYYHKNNKSWMESEFRVYSSANNCTFEYVSQPFLMDLEGKQGNFKNLREFVFKNIDGYFKIYSKHTPINLVRDLPQGFSALEPLVDLPIGINITRFQTLLALHRSYLTPGDSSSGWTAGAAAYYVGYLQPRTFLLKYNENGTITDAVDCALDPLSETKCTLKSFTVEKGIYQTSNFRVLPTESIVRFPNITNLCPFGEVFNATRFASVYAWNRKRISNCVADYSVLYNSASFSTFKCYGVSPTKLNDLCFTNVYADSFVIRGDEVRQIAPGQTGKIADYNYKLPDDFTGCVIAWNSNNLDSKVGGNYNYLYRLFRKSNLKPFERDISTEIYQAGSTPCNGVEGFNCYFPLQSYGFQPTNGVGYQPYRVVVLSFELLHAPATVCGPKKSTNLVKNKCVNFNFNGLTGTGVLTESNKKFLPFQQFGRDIADTTDAVRDPQTLEILDITPCSFGGVSVITPGTNTSNQVAVLYQGVNCTEVPVAIHADQLTPTWRVYSTGSNVFQTRAGCLIGAEHVNNSYECDIPIGAGICASYQTQTNSPRRARSVASQSIIAYTMSLGAENSVAYSNNSIAIPTNFTISVTTEILPVSMTKTSVDCTMYICGDSTECSNLLLQYGSFCTQLNRALTGIAVEQDKNTQEVFAQVKQIYKTPPIKDFGGFNFSQILPDPSKPSKRSFIEDLLFNKVTLADAGFIKQYGDCLGDIAARDLICAQKFNGLTVLPPLLTDEMIAQYTSALLAGTITSGWTFGAGAALQIPFAMQMAYRFNGCGVTQNVLYENQKLIANQFNSAIGKIQDSLSSTASALGKLQDVVNQNAQALNTLVKQLSSNFGAISSVLNDILSRLDKVEAEVQIDRLITGRLQSLQTYVTQQLIRAAEIRASANLAATKMSECVLGQSKRVDFCGKGCHLMSFPQSAPHGVVFLHVTYVPAQEKNFTTAPAICHDGKAHFPREGVFVSNGTHWFVTQRNFYEPQIITTDNTFVSGNCDVVIGIVNNTVYDPLQPELDSFKEELDKYFKNHTSPDVDLGDISGINASVVNIQKEIDRLNEVAKNLNESLIDLQELGKYEQYIKGGGSGGGQIYEGKLTAEGLRFGIVASRFNHALVDRLVEGAIDAIVRHGGREEDITLVRVPGSWEIPVAAGELARKEDIDAVIAIGVLIRGATPHFDYIASEVSKGLADLSLELRKPITFGVITADTLEQAIERAGTKHGNKGWEAALSAIEMANLFKSLR

SEQ ID NO: 4289 - protein, 1370 aa, Artificial Sequence
  SARS-CoV-2/India/1-27/2020__EPI_ISL_413522 spike protein (1-1210)(I908C_Y1046C) LumSynth construct
MFVFLVLLPLVSSQCVNLTTRTQLPPAYTNSFTRGVYYPDKVFRSSVLHSTQDLFLPFFSNVTWFHAIHVSGTNGTKRFDNPVLPFNDGVYFASTEKSNIIRGWIFGTTLDSKTQSLLIVNNATNVVIKVCEFQFCNDPFLGVYHKNNKSWMESEFRVYSSANNCTFEYVSQPFLMDLEGKQGNFKNLREFVFKNIDGYFKIYSKHTPINLVRDLPQGFSALEPLVDLPIGINITRFQTLLALHRSYLTPGDSSSGWTAGAAAYYVGYLQPRTFLLKYNENGTITDAVDCALDPLSETKCTLKSFTVEKGIYQTSNFRVQPTESIVRFPNITNLCPFGEVFNATRFASVYAWNRKRISNCVADYSVLYNSASFSTFKCYGVSPTKLNDLCFTNVYADSFVIRGDEVIQIAPGQTGKIADYNYKLPDDFTGCVIAWNSNNLDSKVGGNYNYLYRLFRKSNLKPFERDISTEIYQAGSTPCNGVEGFNCYFPLQSYGFQPTNGVGYQPYRVVVLSFELLHAPATVCGPKKSTNLVKNKCVNFNFNGLTGTGVLTESNKKFLPFQQFGRDIADTTDAVRDPQTLEILDITPCSFGGVSVITPGTNTSNQVAVLYQDVNCTEVPVAIHADQLTPTWRVYSTGSNVFQTRAGCLIGAEHVNNSYECDIPIGAGICASYQTQTNSPRRARSVASQSIIAYTMSLGAENSVAYSNNSIAIPTNFTISVTTEILPVSMTKTSVDCTMYICGDSTECSNLLLQYGSFCTQLNRALTGIAVEQDKNTQEVFAQVKQIYKTPPIKDFGGFNFSQILPDPSKPSKRSFIEDLLFNKVTLADAGFIKQYGDCLGDIAARDLICAQKFNGLTVLPPLLTDEMIAQYTSALLAGTITSGWTFGAGAALQIPFAMQMAYRFNGCGVTQNVLYENQKLIANQFNSAIGKIQDSLSSTASALGKLQDVVNQNAQALNTLVKQLSSNFGAISSVLNDILSRLDKVEAEVQIDRLITGRLQSLQTYVTQQLIRAAEIRASANLAATKMSECVLGQSKRVDFCGKGCHLMSFPQSAPHGVVFLHVTYVPAQEKNFTTAPAICHDGKAHFPREGVFVSNGTHWFVTQRNFYEPQIITTDNTFVSGNCDVVIGIVNNTVYDPLQPELDSFKEELDKYFKNHTSPDVDLGDISGINASVVNIQKEIDRLNEVAKNLNESLIDLQELGKYEQYIKGGGSGGGQIYEGKLTAEGLRFGIVASRFNHALVDRLVEGAIDAIVRHGGREEDITLVRVPGSWEIPVAAGELARKEDIDAVIAIGVLIRGATPHFDYIASEVSKGLADLSLELRKPITFGVITADTLEQAIERAGTKHGNKGWEAALSAIEMANLFKSLR

SEQ ID NO: 4290 - protein, 1365 aa, Artificial Sequence
  SARS-CoV-2/pangolin/Guangxi/P4L/2017__EPI_ISL_410538 spike protein (1-1205)(I903C_Y1041C) LumSynth construct
MFVFLFVLPLVSSQCVNLTTRTGIPPGYTNSSTRGVYYPDKVFRSSILHLTQDLFLPFFSNVTWFNTINYQGGFKKFDNPVLPFNDGVYFASTEKSNIIRGWIFGTTLDARTQSLLIVNNATNVVIKVCEFQFCTDPFLGVYYHNNNKTWVENEFRVYSSANNCTFEYISQPFLMDLEGKQGNFKNLREFVFKNVDGYFKIYSKHTPIDLVRDLPRGFAALEPLVDLPIGINITRFQTLLALHRSYLTPGNLESGWTTGAAAYYVGYLQQRTFLLSYNQNGTITDAVDCSLDPLSETKCTLKSLTVEKGIYQTSNFRVQPTISIVRFPNITNLCPFGEVFNASKFASVYAWNRKRISNCVADYSVLYNSTSFSTFKCYGVSPTKLNDLCFTNVYADSFVVKGDEVRQIAPGQTGVIADYNYKLPDDFTGCVIAWNSVKQDALTGGNYGYLYRLFRKSKLKPFERDISTEIYQAGSTPCNGQVGLNCYYPLERYGFHPTTGVNYQPFRVVVLSFELLNGPATVCGPKLSTTLVKDKCVNFNFNGLTGTGVLTTSKKQFLPFQQFGRDISDTTDAVRDPQTLEILDITPCSFGGVSVITPGTNTSNQVAVLYQDVNCTEVPMAIHAEQLTPAWRVYSAGANVFQTRAGCLVGAEHVNNSYECDIPVGAGICASYHSMSSLRSVNQRSIIAYTMSLGAENSVAYSNNSIAIPTNFTISVTTEILPVSMTKTSVDCTMYICGDSIECSNLLLQYGSFCTQLNRALTGIAVEQDKNTQEVFAQVKQIYKTPPIKDFGGFNFSQILPDPSKPSKRSFIEDLLFNKVTLADAGFIKQYGDCLGDIAARDLICAQKFNGLTVLPPLLTDEMIAQYTSALLAGTITSGWTFGAGAALQIPFAMQMAYRFNGCGVTQNVLYENQKLIANQFNSAIGKIQDSLSSTASALGKLQDVVNQNAQALNTLVKQLSSNFGAISSVLNDILSRLDKVEAEVQIDRLITGRLQSLQTYVTQQLIRAAEIRASANLAATKMSECVLGQSKRVDFCGKGCHLMSFPQSAPHGVVFLHVTYVPAQEKNFTTAPAICHEGKAHFPREGVFVSNGTHWFITQRNFYEPQIITTDNTFVSGSCDVVIGIVNNTVYDPLQPELDSFKEELDKYFKNHTSPDVDLGDISGINASVVNIQKEIDRLNEVAKNLNESPIDLQELGKYEQYIKGGGSGGGQIYEGKLTAEGLRFGIVASRFNHALVDRLVEGAIDAIVRHGGREEDITLVRVPGSWEIPVAAGELARKEDIDAVIAIGVLIRGATPHFDYIASEVSKGLADLSLELRKPITFGVITADTLEQAIERAGTKHGNKGWEAALSAIEMANLFKSLR

SEQ ID NO: 4291 - protein, 1365 aa, Artificial Sequence
  SARS-CoV-2/pangolin/Guangxi/P5L/2017__EPI_ISL_410540 spike protein (1-1205)(I903C_Y1041C) LumSynth construct
MFVFLFVLPLVSSQCVNLTTRTGIPPGYTNSSTRGVYYPDKVFRSSILHLTQDLFLPFFSNVTWFNTINYQGGFKKFDNPVLPFNDGVYFASTEKSNIIRGWIFGTTLDARTQSLLIVNNATNVVIKVCEFQFCTDPFLGVYYHNNNKTWVENEFRVYSSANNCTFEYISQPFLMDLEGKQGNFKNLREFVFKNVDGYFKIYSKHTPIDLVRDLPRGFAALEPLVDLPIGINITRFQTLLALHRSYLTPGKLESGWTTGAAAYYVGYLQQRTFLLSYNQNGTITDAVDCSLDPLSETKCTLKSLTVEKGIYQTSNFRVQPTISIVRFPNITNLCPFGEVFNASKFASVYAWNRKRISNCVADYSVLYNSTSFSTFKCYGVSPTKLNDLCFTNVYADSFVVKGDEVRQIAPGQTGVIADYNYKLPDDFTGCVIAWNSVKQDALTGGNYGYLYRLFRKSKLKPFERDISTEIYQAGSTPCNGQVGLNCYYPLERYGFHPTTGVNYQPFRVVVLSFELLNGPATVCGPKLSTTLVKDKCVNFNFNGLTGTGVLTTSKKQFLPFQQFGRDISDTTDAVRDPQTLEILDITPCSFGGVSVITPGTNTSNQVAVLYQDVNCTEVPMAIHAEQLTPAWRVYSAGANVFQTRAGCLVGAEHVNNSYECDIPVGAGICASYHSMSSFRSVNQRSIIAYTMSLGAENSVAYSNNSIAIPTNFTISVTTEILPVSMTKTSVDCTMYICGDSIECSNLLLQYGSFCTQLNRALTGIAVEQDKNTQEVFAQVKQIYKTPPIKDFGGFNFSQILPDPSKPSKRSFIEDLLFNKVTLADAGFIKQYGDCLGDIAARDLICAQKFNGLTVLPPLLTDEMIAQYTSALLAGTITSGWTFGAGAALQIPFAMQMAYRFNGCGVTQNVLYENQKLIANQFNSAIGKIQDSLSSTASALGKLQDVVNQNAQALNTLVKQLSSNFGAISSVLNDILSRLDKVEAEVQIDRLITGRLQSLQTYVTQQLIRAAEIRASANLAATKMSECVLGQSKRVDFCGKGCHLMSFPQSAPHGVVFLHVTYVPAQEKNFTTAPAICHEGKAHFPREGVFVSNGTHWFITQRNFYEPQIITTDNTFVSGSCDVVIGIVNNTVYDPLQPELDSFKEELDKYFKNHTSPDVDLGDISGINASVVNIQKEIDRLNEVAKNLNESLIDLQELGKYEQYIKGGGSGGGQIYEGKLTAEGLRFGIVASRFNHALVDRLVEGAIDAIVRHGGREEDITLVRVPGSWEIPVAAGELARKEDIDAVIAIGVLIRGATPHFDYIASEVSKGLADLSLELRKPITFGVITADTLEQAIERAGTKHGNKGWEAALSAIEMANLFKSLR

SEQ ID NO: 4292 - protein, 1365 aa, Artificial Sequence
  SARS-CoV-2/pangolin/Guangxi/P5E/2017__EPI_ISL_410541 spike protein (1-1205)(I903C_Y1041C) LumSynth construct
MFVFLFVLPLVSSQCVNLTTRTGIPPGYTNSSTRGVYYPDKVFRSSILHLTQDLFLPFFSNVTWFNTITYQGGSKKFDNPVLPFNDGVYFASTEKSNIIRGWIFGTTLDARTQSLLIVNNATNVVIKVCEFQFCTDPFLGVYYHNNNKTWVENEFRVYSSANNCTFEYISQPFLMDLEGKQGNFKNLREFVFKNVDGYFKIYSKHTPIDLVRDLPRGFAALEPLVDLPIGINITRFQTLLALHRSYLTPGKLESGWTTGAAAYYVGYLQQRTFLLSYNQNGTITDAVDCSLDPLSETKCTLKSLTVEKGIYQTSNFRVQPTISIVRFPNITNLCPFGEVFNASKFASVYAWNRKRISNCVADYSVLYNSTSFSTFKCYGVSPTKLNDLCFTNVYADSFVVKGDEVRQIAPGQTGVIADYNYKLPDDFTGCVIAWNSVKQDALTGDNYGYLYRLFRKSKLKPFERDISTEIYQAGSTPCNGQVGLNCYYPLERYGFHPTTGVNYQPFRVVVLSFELLNGPATVCGPKLSTTLVKDKCVNFNFNGLTGTGVLTTSKKQFLPFQQFGRDISDTTDAVRDPQTLEILDITPCSFGGVSVITPGTNTSNQVAVLYQDVNCTEVPMAIHAEQLTPAWRVYSAGANVFQTRAGCLVGAEHVNNSYECDIPVGAGICASYHSMSSFRSVNQRSIIAYTMSLGAENSVAYSNNSIAIPTNFTISVTTEILPVSMTKTSVDCTMYICGDSIECSNLLLQYGSFCTQLNRALTGIAVEQDKNTQEVFAQVKQIYKTPPIKDFGGFNFSQILPDPSKPSKRSFIEDLLFNKVTLADAGFIKQYGDCLGDIAARDLICAQKFNGLTVLPPLLTDEMIAQYTSALLAGTITSGWTFGAGAALQIPFAMQMAYRFNGCGVTQNVLYENQKLIANQFNSAIGKIQDSLSSTASALGKLQDVVNQNAQALNTLVKQLSSNFGAISSVLNDILSRLDKVEAEVQIDRLITGRLQSLQTYVTQQLIRAAEIRASANLAATKMSECVLGQSKRVDFCGKGCHLMSFPQSAPHGVVFLHVTYVPAQEKNFTTAPAICHEGKAHFPREGVFVSNGTHWFITQRNFYEPQIITTDNTFVSGSCDVVIGIVNNTVYDPLQPELDSFKEELDKYFKNHTSPDVDLGDISGINASVVNIQKEIDRLNEVAKNLNESLIDLQELGKYEQYIKGGGSGGGQIYEGKLTAEGLRFGIVASRFNHALVDRLVEGAIDAIVRHGGREEDITLVRVPGSWEIPVAAGELARKEDIDAVIAIGVLIRGATPHFDYIASEVSKGLADLSLELRKPITFGVITADTLEQAIERAGTKHGNKGWEAALSAIEMANLFKSLR

SEQ ID NO: 4293 - protein, 1363 aa, Artificial Sequence
  SARS-CoV-2/pangolin/Guangxi/P1E/2017__EPI_ISL_410539 spike protein (1-1203)(I901C_Y1039C) LumSynth construct
MFVFLFVLPLVSSQCVNLTTRTGIQPGYTNSSTRGVYYPDKVFRSSILHLTQDLFLPFFSNVTWFNTINYQGGFKKFDNPVLPFNDGVYFASTEKSNIIRGWIFGTTLDARTQSLLIVNNATNVVIKVCEFQFCTDPFLGVYYHNNNKTWVENEFRVYSSANNCTFEYISQPFLMDLEGKQGNFKNLREFVFKNVDGYFKIYSKHTPIDLVRDLPRGFAALEPLVDLPIGINITRFQTLLALHRSYLTPGKLESGWTTGAAAYYVGYLQQRTFLLSYNQNGTITDAVDCSLDPLSETKCTLKSLTVEKGIYQTSNFRVQPTISIVRFPNITNLCPFGEVFNASKFASVYAWNRKRISNCVADYSVLYNSTSFSTFKCYGVSPTKLNDLCFTNVYADSFVVKGDEVRQIAPGQTGVIADYNYKLPDDFTGCVIAWNSVKQDALTGGNYLYRLFRKSKLKPFERDISTEIYQAGSTPCNGQVGLNCYYPLERYGFHPTTGVNYQPFRVVVLSFELLNGPATVCGPKLSTTLVKDKCVNFNFNGLTGTGVLTTSKKQFLPFQQFGRDISDTTDAVRDPQTLEILDITPCSFGGVSVITPGTNTSNQVAVLYQDVNCTEVPMAIHAEQLTPAWRVYSAGANVFQTRAGCLVGAEHVNNSYECDIPVGAGICASYHSMSSLRSVNQRSIIAYTMSLGAENSVAYSNNSIAIPTNFTISVTTEILPVSMTKTSVDCTMYICGDSIECSNLLLQYGSFCTQLNRALTGIAVEQDKNTQEVFAQVKQIYKTPPIKDFGGFNFSQILPDPSKPSKRSFIEDLLFNKVTLADAGFIKQYGDCLGDIAARDLICAQKFNGLTVLPPLLTDEMIAQYTSALLAGTITSGWTFGAGAALQIPFAMQMAYRFNGCGVTQNVLYENQKLIANQFNSAIGKIQDSLSSTASALGKLQDVVNQNAQALNTLVKQLSSNFGAISSVLNDILSRLDKVEAEVQIDRLITGRLQSLQTYVTQQLIRAAEIRASANLAATKMSECVLGQSKRVDFCGKGCHLMSFPQSAPHGVVFLHVTYVPAQEKNFTTAPAICHEGKAHFPREGVFVSNGTHWFITQRNFYEPQIITTDNTFVSGSCDVVIGIVNNTVYDPLQPELDSFKEELDKYFKNHTSPDVDLGDISGINASVVNIQKEIDRLNEVAKNLNESLIDLQELGKYEQYIKGGGSGGGQIYEGKLTAEGLRFGIVASRFNHALVDRLVEGAIDAIVRHGGREEDITLVRVPGSWEIPVAAGELARKEDIDAVIAIGVLIRGATPHFDYIASEVSKGLADLSLELRKPITFGVITADTLEQAIERAGTKHGNKGWEAALSAIEMANLFKSLR

SEQ ID NO: 4294 - protein, 1371 aa, Artificial Sequence
  SARS-CoV-2/Wuhan/WIV05/2019__EPI_ISL_402128 spike protein (1-1211)(Q965C_S1003C) LumSynth construct
MFVFLVLLPLVSSQCVNLTTRTQLPPAYTNSFTRGVYYPDKVFRSSVLHSTQDLFLPFFSNVTWFHAIHVSGTNGTKRFDNPVLPFNDGVYFASTEKSNIIRGWIFGTTLDSKTQSLLIVNNATNVVIKVCEFQFCNDPFLGVYYHKNNKSWMESEFRVYSSANNCTFEYVSQPFLMDLEGKQGNFKNLREFVFKNIDGYFKIYSKHTPINLVRDLPQGFSALEPLVDLPIGINITRFQTLLALHRSYLTPGDSSSGWTAGAAAYYVGYLQPRTFLLKYNENGTITDAVDCALDPLSETKCTLKSFTVEKGIYQTSNFRVQPTESIVRFPNITNLCPFGEVFNATRFASVYAWNRKRISNCVADYSVLYNSASFSTFKCYGVSPTKLNDLCFTNVYADSFVIRGDEVRQIAPGQTGKIADYNYKLPDDFTGCVIAWNSNNLDSKVGGNYNYLYRLFRKSNLKPFERDISTEIYQAGSTPCNGVEGFNCYFPLQSYGFQPTNGVGYQPYRVVVLSFELLHAPATVCGPKKSTNLVKNKCVNFNFNGLTGTGVLTESNKKFLPFQQFGRDIADTTDAVRDPQTLEILDITPCSFGGVSVITPGTNTSNQVAVLYQDVNCTEVPVAIHADQLTPTWRVYSTGSNVFQTRAGCLIGAEHVNNSYECDIPIGAGICASYQTQTNSPRRARSVASQSIIAYTMSLGAENSVAYSNNSIAIPTNFTISVTTEILPVSMTKTSVDCTMYICGDSTECSNLLLQYGSFCTQLNRALTGIAVEQDKNTQEVFAQVKQIYKTPPIKDFGGFNFSQILPDPSKPSKRSFIEDLLFNKVTLADAGFIKQYGDCLGDIAARDLICAQKFNGLTVLPPLLTDEMIAQYTSALLAGTITSGWTFGAGAALQIPFAMQMAYRFNGIGVTQNVLYENQKLIANQFNSAIGKIQDSLSSTASALGKLQDVVNQNAQALNTLVKCLSSNFGAISSVLNDILSRLDKVEAEVQIDRLITGRLQCLQTYVTQQLIRAAEIRASANLAATKMSECVLGQSKRVDFCGKGYHLMSFPQSAPHGVVFLHVTYVPAQEKNFTTAPAICHDGKAHFPREGVFVSNGTHWFVTQRNFYEPQIITTDNTFVSGNCDVVIGIVNNTVYDPLQPELDSFKEELDKYFKNHTSPDVDLGDISGINASVVNIQKEIDRLNEVAKNLNESLIDLQELGKYEQYIKGGGSGGGQIYEGKLTAEGLRFGIVASRFNHALVDRLVEGAIDAIVRHGGREEDITLVRVPGSWEIPVAAGELARKEDIDAVIAIGVLIRGATPHFDYIASEVSKGLADLSLELRKPITFGVITADTLEQAIERAGTKHGNKGWEAALSAIEMANLFKSLR

SEQ ID NO: 4295 - protein, 1367 aa, Artificial Sequence
  SARS-CoV-2/bat/Yunnan/RaTG13/2013__EPI_ISL_402131 spike protein (1-1207)(Q961C_S999C) LumSynth construct
MFVFLVLLPLVSSQCVNLTTRTQLPPAYTNSSTRGVYYPDKVFRSSVLHLTQDLFLPFFSNVTWFHAIHVSGTNGIKRFDNPVLPFNDGVYFASTEKSNIIRGWIFGTTLDSKTQSLLIVNNATNVVIKVCEFQFCNDPFLGVYYHKNNKSWMESEFRVYSSANNCTFEYVSQPFLMDLEGKQGNFKNLREFVFKNIDGYFKIYSKHTPINLVRDLPPGFSALEPLVDLPIGINITRFQTLLALHRSYLTPGDSSSGWTAGAAAYYVGYLQPRTFLLKYNENGTITDAVDCALDPLSETKCTLKSFTVEKGIYQTSNFRVQPTDSIVRFPNITNLCPFGEVFNATTFASVYAWNRKRISNCVADYSVLYNSTSFSTFKCYGVSPTKLNDLCFTNVYADSFVITGDEVRQIAPGQTGKIADYNYKLPDDFTGCVIAWNSKHIDAKEGGNFNYLYRLFRKANLKPFERDISTEIYQAGSKPCNGQTGLNCYYPLYRYGFYPTDGVGHQPYRVVVLSFELLNAPATVCGPKKSTNLVKNKCVNFNFNGLTGTGVLTESNKKFLPFQQFGRDIADTTDAVRDPQTLEILDITPCSFGGVSVITPGTNASNQVAVLYQDVNCTEVPVAIHADQLTPTWRVYSTGSNVFQTRAGCLIGAEHVNNSYECDIPIGAGICASYQTQTNSRSVASQSIIAYTMSLGAENSVAYSNNSIAIPTNFTISVTTEILPVSMTKTSVDCTMYICGDSTECSNLLLQYGSFCTQLNRALTGIAVEQDKNTQEVFAQVKQIYKTPPIKDFGGFNFSQILPDPSKPSKRSFIEDLLFNKVTLADAGFIKQYGDCLGDIAARDLICAQKFNGLTVLPPLLTDEMIAQYTSALLAGTITSGWTFGAGAALQIPFAMQMAYRFNGIGVTQNVLYENQKLIANQFNSAIGKIQDSLSSTASALGKLQDVVNQNAQALNTLVKCLSSNFGAISSVLNDILSRLDKVEAEVQIDRLITGRLQCLQTYVTQQLIRAAEIRASANLAATKMSECVLGQSKRVDFCGKGYHLMSFPQSAPHGVVFLHVTYVPAQEKNFTTAPAICHDGKAHFPREGVFVSNGTHWFVTQRNFYEPQIITTDNTFVSGSCDVVIGIVNNTVYDPLQPELDSFKEELDKYFKNHTSPDVDLGDISGINASVVNIQKEIDRLNEVAKNLNESLIDLQELGKYEQYIKGGGSGGGQIYEGKLTAEGLRFGIVASRFNHALVDRLVEGAIDAIVRHGGREEDITLVRVPGSWEIPVAAGELARKEDIDAVIAIGVLIRGATPHFDYIASEVSKGLADLSLELRKPITFGVITADTLEQAIERAGTKHGNKGWEAALSAIEMANLFKSLR

SEQ ID NO: 4296 - protein, 1371 aa, Artificial Sequence
  SARS-CoV-2/Wuhan/HBCDC-HB-01/2019__EPI_ISL_402132 spike protein (1-1211)(Q965C_S1003C) LumSynth construct
MFVFLVLLPLVSSQCVNLTTRTQLPPAYTNSITRGVYYPDKVFRSSVLHSTQDLFLPFFSNVTWFHAIHVSGTNGTKRFDNPVLPFNDGVYFASTEKSNIIRGWIFGTTLDSKTQSLLIVNNATNVVIKVCEFQFCNDPFLGVYYHKNNKSWMESEFRVYSSANNCTFEYVSQPFLMDLEGKQGNFKNLREFVFKNIDGYFKIYSKHTPINLVRDLPQGFSALEPLVDLPIGINITRFQTLLALHRSYLTPGDSSSGWTAGAAAYYVGYLQPRTFLLKYNENGTITDAVDCALDPLSETKCTLKSFTVEKGIYQTSNFRVQPTESIVRFPNITNLCPFGEVFNATRFASVYAWNRKRISNCVADYSVLYNSASFSTFKCYGVSPTKLNDLCFTNVYADSFVIRGDEVRQIAPGQTGKIADYNYKLPDDFTGCVIAWNSNNLDSKVGGNYNYLYRLFRKSNLKPFERDISTEIYQAGSTPCNGVEGFNCYFPLQSYGFQPTNGVGYQPYRVVVLSFELLHAPATVCGPKKSTNLVKNKCVNFNFNGLTGTGVLTESNKKFLPFQQFGRDIADTTDAVRDPQTLEILDITPCSFGGVSVITPGTNTSNQVAVLYQDVNCTEVPVAIHADQLTPTWRVYSTGSNVFQTRAGCLIGAEHVNNSYECDIPIGAGICASYQTQTNSPRRARSVASQSIIAYTMSLGAENSVAYSNNSIAIPTNFTISVTTEILPVSMTKTSVDCTMYICGDSTECSNLLLQYGSFCTQLNRALTGIAVEQDKNTQEVFAQVKQIYKTPPIKDFGGFNFSQILPDPSKPSKRSFIEDLLFNKVTLADAGFIKQYGDCLGDIAARDLICAQKFNGLTVLPPLLTDEMIAQYTSALLAGTITSGWTFGAGAALQIPFAMQMAYRFNGIGVTQNVLYENQKLIANQFNSAIGKIQDSLSSTASALGKLQDVVNQNAQALNTLVKCLSSNFGAISSVLNDILSRLDKVEAEVQIDRLITGRLQCLQTYVTQQLIRAAEIRASANLAATKMSECVLGQSKRVDFCGKGYHLMSFPQSAPHGVVFLHVTYVPAQEKNFTTAPAICHDGKAHFPREGVFVSNGTHWFVTQRNFYEPQIITTDNTFVSGNCDVVIGIVNNTVYDPLQPELDSFKEELDKYFKNHTSPDVDLGDISGINASVVNIQKEIDRLNEVAKNLNESLIDLQELGKYEQYIKGGGSGGGQIYEGKLTAEGLRFGIVASRFNHALVDRLVEGAIDAIVRHGGREEDITLVRVPGSWEIPVAAGELARKEDIDAVIAIGVLIRGATPHFDYIASEVSKGLADLSLELRKPITFGVITADTLEQAIERAGTKHGNKGWEAALSAIEMANLFKSLR

SEQ ID NO: 4297 - protein, 1371 aa, Artificial Sequence
  SARS-CoV-2/Guangdong/20SF028/2020__EPI_ISL_403936 spike protein (1-1211)(Q965C_S1003C) LumSynth construct
MFVFLVLLPLVSSQCVNLTTRTQLPPAYTNSFTRGVYYPDKVFRSSVLYSTQDLFLPFFSNVTWFHAIHVSGTNGTKRFDNPVLPFNDGVYFASTEKSNIIRGWIFGTTLDSKTQSLLIVNNATNVVIKVCEFQFCNDPFLGVYYHKNNKSWMESEFRVYSSANNCTFEYVSQPFLMDLEGKQGNFKNLREFVFKNIDGYFKIYSKHTPINLVRDLPQGFSALEPLVDLPIGINITRFQTLLALHRSYLTPGDSSSGWTAGAAAYYVGYLQPRTFLLKYNENGTITDAVDCALDPLSETKCTLKSFTVEKGIYQTSNFRVQPTESIVRFPNITNLCPFGEVFNATRFASVYAWNRKRISNCVADYSVLYNSASFSTFKCYGVSPTKLNDLCFTNVYADSFVIRGDEVRQIAPGQTGKIADYNYKLPDDFTGCVIAWNSNNLDSKVGGNYNYLYRLFRKSNLKPFERDISTEIYQAGSTPCNGVEGFNCYFPLQSYGFQPTNGVGYQPYRVVVLSFELLHAPATVCGPKKSTNLVKNKCVNFNFNGLTGTGVLTESNKKFLPFQQFGRDIADTTDAVRDPQTLEILDITPCSFGGVSVITPGTNTSNQVAVLYQDVNCTEVPVAIHADQLTPTWRVYSTGSNVFQTRAGCLIGAEHVNNSYECDIPIGAGICASYQTQTNSPRRARSVASQSIIAYTMSLGAENSVAYSNNSIAIPTNFTISVTTEILPVSMTKTSVDCTMYICGDSTECSNLLLQYGSFCTQLNRALTGIAVEQDKNTQEVFAQVKQIYKTPPIKDFGGFNFSQILPDPSKPSKRSFIEDLLFNKVTLADAGFIKQYGDCLGDIAARDLICAQKFNGLTVLPPLLTDEMIAQYTSALLAGTITSGWTFGAGAALQIPFAMQMAYRFNGIGVTQNVLYENQKLIANQFNSAIGKIQDSLSSTASALGKLQDVVNQNAQALNTLVKCLSSNFGAISSVLNDILSRLDKVEAEVQIDRLITGRLQCLQTYVTQQLIRAAEIRASANLAATKMSECVLGQSKRVDFCGKGYHLMSFPQSAPHGVVFLHVTYVPAQEKNFTTAPAICHDGKAHFPREGVFVSNGTHWFVTQRNFYEPQIITTDNTFVSGNCDVVIGIVNNTVYDPLQPELDSFKEELDKYFKNHTSPDVDLGDISGINASVVNIQKEIDRLNEVAKNLNESLIDLQELGKYEQYIKGGGSGGGQIYEGKLTAEGLRFGIVASRFNHALVDRLVEGAIDAIVRHGGREEDITLVRVPGSWEIPVAAGELARKEDIDAVIAIGVLIRGATPHFDYIASEVSKGLADLSLELRKPITFGVITADTLEQAIERAGTKHGNKGWEAALSAIEMANLFKSLR

SEQ ID NO: 4298 - protein, 1371 aa, Artificial Sequence
  SARS-CoV-2/Shenzhen/SZTH-001/2020__EPI_ISL_406592 spike protein (1-1211)(Q965C_S1003C) LumSynth construct
MFVFLVLLPLVSSQCVNLTTRTQLPPAYTNSFTRGVYYPDKVFRSSVLHSTQDLFLPFFSNVTWFHAIHVSGTNGTKRFDNPVLPFNDGVYFASTEKSNIIRGWIFGTTLDSKTQSLLIVNNATNVVIKVCEFQFCNDPFLGVYYHKNNKSWMESEFRVYSSANNCTFEYVSQPFLMDLEGKQGNFKNLREFVFKNIDGYFKIYSKHTPINLVRDLPQGFSALEPLVDLPIGINITRFQTLLALHRSYLTPGDSSSGWTAGAAAYYVGYLQPRTFLLKYNENGTITDAVDCALDPLSETKCTLKSFTVEKGIYQTSNFRVQPTESIVRFPNITNLCPFGEVFNATRFASVYAWNRKRISNCVADYSVLYNSASFSTFKCYGVSPTKLNDLCFTNVYADSFVIRGDEVRQIAPGQTGKIADYNYKLPDDFTGCVIAWNSNNLDSKVGGNYNYLYRLFRKSNLKPFERDISTEIYQAGSTPCNGVEGFNCYFPLQSYGFQPTNGVGYQPYRVVVLSFELLHAPATVCGPKKSTNLVKNKCVNFNFNGLTGTGVLTESNKKFLPFQQFGRDIADTTDAVRDPQTLEILDITPCSFGGVSVITPGTNTSNQVAVLYQDVNCTEVPVAIHADQLTPTWRVYSTGSNVFQTRAGCLIGAEHVNNSYECDIPIGAGICASYQTQTNSPRRARSVASQSIIAYTMSLGAENSVAYSNNSIAIPTNFTISVTTEILPVSMTKTSVDCTMYICGDSTECSNLLLQYGSFCTQLNRALTGIAVEQDKNTQEVFAQVKQIYKTPPIKDFGGFNFSQILPDPSKPSKRSFIEDLLFNKVTLADAGFIKQYGDCLGDIAARDLICAQKFNGLTVLPPLLTDEMIAQYTSALLAGTITSGWTFGAGAALQIPFAMQMAYRFNGIGVTQNVLYENQKLIANQFNSAIGKIQDSLSSTASALGKLQDVVNQNAQALNTLVKCLSSNFGAISSVLNDILSRLDKVEAEVQIDRLITGRLQCLQTYVTQQLIRAAEIRASANLAATKMSECVLGQSKRVDFCGKGYHLMSFPQSAPHGVVFLHVTYVPAQEKNFTTAPAICHDGKAHFPREGVFVSNGTHWFVTQRNFYEPQIITTDNTFVSGNCDVLIGIVNNTVYDPLQPELDSFKEELDKYFKNHTSPDVDLGDISGINASVVNIQKEIDRLNEVAKNLNESLIDLQELGKYEQYIKGGGSGGGQIYEGKLTAEGLRFGIVASRFNHALVDRLVEGAIDAIVRHGGREEDITLVRVPGSWEIPVAAGELARKEDIDAVIAIGVLIRGATPHFDYIASEVSKGLADLSLELRKPITFGVITADTLEQAIERAGTKHGNKGWEAALSAIEMANLFKSLR

SEQ ID NO: 4299 - protein, 1371 aa, Artificial Sequence
  SARS-CoV-2/Shenzhen/SZTH-004/2020__EPI_ISL_406595 spike protein (1-1211)(Q965C_S1003C) LumSynth construct
MFVFLVLLPLVSSQCVNLTTRTQLPPAYTNSFTRGVYYPDKVFRSSVLHSTQDLFLPFFSNVTWFHAIHVSGTNGTKRFDNPVLPFNDGVYFASTEKSNIIRGWIFGTTLDSKTQSLLIVNNATNVVIKVCEFQFCNDPFLGVYYHKNNKSWMESEFRVYSSANNCTFEYVSQPFLMDLEGKQGNFKNLREFVFKNIDGYFKIYSKHTPINLVRDLPQGFSALEPLVDLPIGINITRFQTLLALHRSYLTPGDSSSGWTAGAAAYYVGYLQPRTFLLKYNENGTITDAVDCALDPLSETKCTLKSFTVEKGIYQTSNFRVQPTESIVRFPNITNLCPFGEVFNATRFASVYAWDRKRISNCVAYYSVLYNSASFSTFKCYGVSPTKLNDLCFTNVYADSFVIRGDEVRQIAPGQTGKIADYNYKLPDDFTGCVIAWNSNNLDSKVGGNYNYLYRLFRKSNLKPFERDISTEIYQAGSTPCNGVEGFNCYFPLQSYGFQPTNGVGYQPYRVVVLSFELLHAPATVCGPKKSTNLVKNKCVNFNFNGLTGTGVLTESNKKFLPFQQFGRDIADTTDAVRDPQTLEILDITPCSFGGVSVITPGTNTSNQVAVLYQDVNCTEVPVAIHADQLTPTWRVYSTGSNVFQTRAGCLIGAEHVNNSYECDIPIGAGICASYQTQTNSPRRARSVASQSIIAYTMSLGAENSVAYSNNSIAIPTNFTISVTTEILPVSMTKTSVDCTMYICGDSTECSNLLLQYGSFCTQLNRALTGIAVEQDKNTQEVFAQVKQIYKTPPIKDFGGFNFSQILPDPSKPSKRSFIEDLLFNKVTLADAGFIKQYGDCLGDIAARDLICAQKFNGLTVLPPLLTDEMIAQYTSALLAGTITSGWTFGAGAALQIPFAMQMAYRFNGIGVTQNVLYENQKLIANQFNSAIGKIQDSLSSTASALGKLQDVVNQNAQALNTLVKCLSSNFGAISSVLNDILSRLDKVEAEVQIDRLITGRLQCLQTYVTQQLIRAAEIRASANLAATKMSECVLGQSKRVDFCGKGYHLMSFPQSAPHGVVFLHVTYVPAQEKNFTTAPAICHDGKAHFPREGVFVSNGTHWFVTQRNFYEPQIITTDNTFVSGNCDVVIGIVNNTVYDPLQPELDSFKEELDKYFKNHTSPDVDLGDISGINASVVNIQKEIDRLNEVAKNLNESLIDLQELGKYEQYIKGGGSGGGQIYEGKLTAEGLRFGIVASRFNHALVDRLVEGAIDAIVRHGGREEDITLVRVPGSWEIPVAAGELARKEDIDAVIAIGVLIRGATPHFDYIASEVSKGLADLSLELRKPITFGVITADTLEQAIERAGTKHGNKGWEAALSAIEMANLFKSLR

SEQ ID NO: 4300 - protein, 1371 aa, Artificial Sequence
  SARS-CoV-2/France/IDF0372/2020__EPI_ISL_406596 spike protein (1-1211)(Q965C_S1003C) LumSynth construct
MFVFLVLLPLVSSQCVNLTTRTQLPPAYTNSFTRGVYYPDKVFRSSVLHSTQDLFLPFFSNVTWFHAIHVSGTNGTKRFDNPVLPFNDGVYFASTEKSNIIRGWIFGTTLDSKTQSLLIVNNATNVVIKVCEFQFCNDPFLGVYYHKNNKSWMESEFRVYSSANNCTFEYVSQPFLMDLEGKQGNFKNLREFVFKNIDGYFKIYSKHTPINLVRDLPQGFSALEPLVDLPIGINITRFQTLLALHRSYLTPGDSSSGWTAGAAAYYVGYLQPRTFLLKYNENGTITDAVDCALDPLSETKCTLKSFTVEKGIYQTSNFRVQPTESIVRFPNITNLCPFGEVFNATRFASVYAWNRKRISNCVADYSFLYNSASFSTFKCYGVSPTKLNDLCFTNVYADSFVIRGDEVRQIAPGQTGKIADYNYKLPDDFTGCVIAWNSNNLDSKVGGNYNYLYRLFRKSNLKPFERDISTEIYQAGSTPCNGVEGFNCYFPLQSYGFQPTNGVGYQPYRVVVLSFELLHAPATVCGPKKSTNLVKNKCVNFNFNGLTGTGVLTESNKKFLPFQQFGRDIADTTDAVRDPQTLEILDITPCSFGGVSVITPGTNTSNQVAVLYQDVNCTEVPVAIHADQLTPTWRVYSTGSNVFQTRAGCLIGAEHVNNSYECDIPIGAGICASYQTQTNSPRRARSVASQSIIAYTMSLGAENSVAYSNNSIAIPTNFTISVTTEILPVSMTKTSVDCTMYICGDSTECSNLLLQYGSFCTQLNRALTGIAVEQDKNTQEVFAQVKQIYKTPPIKDFGGFNFSQILPDPSKPSKRSFIEDLLFNKVTLADAGFIKQYGDCLGDIAARDLICAQKFNGLTVLPPLLTDEMIAQYTSALLAGTITSGWTFGAGAALQIPFAMQMAYRFNGIGVTQNVLYENQKLIANQFNSAIGKIQDSLSSTASALGKLQDVVNQNAQALNTLVKCLSSNFGAISSVLNDILSRLDKVEAEVQIDRLITGRLQCLQTYVTQQLIRAAEIRASANLAATKMSECVLGQSKRVDFCGKGYHLMSFPQSAPHGVVFLHVTYVPAQEKNFTTAPAICHDGKAHFPREGVFVSNGTHWFVTQRNFYEPQIITTDNTFVSGNCDVVIGIVNNTVYDPLQPELDSFKEELDKYFKNHTSPDVDLGDISGINASVVNIQKEIDRLNEVAKNLNESLIDLQELGKYEQYIKGGGSGGGQIYEGKLTAEGLRFGIVASRFNHALVDRLVEGAIDAIVRHGGREEDITLVRVPGSWEIPVAAGELARKEDIDAVIAIGVLIRGATPHFDYIASEVSKGLADLSLELRKPITFGVITADTLEQAIERAGTKHGNKGWEAALSAIEMANLFKSLR

SEQ ID NO: 4301 - protein, 1371 aa, Artificial Sequence
  SARS-CoV-2/Australia/VIC01/2020__EPI_ISL_406844 spike protein (1-1211)(Q965C_S1003C) LumSynth construct
MFVFLVLLPLVSSQCVNLTTRTQLPPAYTNSFTRGVYYPDKVFRSSVLHSTQDLFLPFFSNVTWFHAIHVSGTNGTKRFDNPVLPFNDGVYFASTEKSNIIRGWIFGTTLDSKTQSLLIVNNATNVVIKVCEFQFCNDPFLGVYYHKNNKSWMESEFRVYSSANNCTFEYVSQPFLMDLEGKQGNFKNLREFVFKNIDGYFKIYSKHTPINLVRDLPQGFSALEPLVDLPIGINITRFQTLLALHRRYLTPGDSSSGWTAGAAAYYVGYLQPRTFLLKYNENGTITDAVDCALDPLSETKCTLKSFTVEKGIYQTSNFRVQPTESIVRFPNITNLCPFGEVFNATRFASVYAWNRKRISNCVADYSVLYNSASFSTFKCYGVSPTKLNDLCFTNVYADSFVIRGDEVRQIAPGQTGKIADYNYKLPDDFTGCVIAWNSNNLDSKVGGNYNYLYRLFRKSNLKPFERDISTEIYQAGSTPCNGVEGFNCYFPLQSYGFQPTNGVGYQPYRVVVLSFELLHAPATVCGPKKSTNLVKNKCVNFNFNGLTGTGVLTESNKKFLPFQQFGRDIADTTDAVRDPQTLEILDITPCSFGGVSVITPGTNTSNQVAVLYQDVNCTEVPVAIHADQLTPTWRVYSTGSNVFQTRAGCLIGAEHVNNSYECDIPIGAGICASYQTQTNSPRRARSVASQSIIAYTMSLGAENSVAYSNNSIAIPTNFTISVTTEILPVSMTKTSVDCTMYICGDSTECSNLLLQYGSFCTQLNRALTGIAVEQDKNTQEVFAQVKQIYKTPPIKDFGGFNFSQILPDPSKPSKRSFIEDLLFNKVTLADAGFIKQYGDCLGDIAARDLICAQKFNGLTVLPPLLTDEMIAQYTSALLAGTITSGWTFGAGAALQIPFAMQMAYRFNGIGVTQNVLYENQKLIANQFNSAIGKIQDSLSSTASALGKLQDVVNQNAQALNTLVKCLSSNFGAISSVLNDILSRLDKVEAEVQIDRLITGRLQCLQTYVTQQLIRAAEIRASANLAATKMSECVLGQSKRVDFCGKGYHLMSFPQSAPHGVVFLHVTYVPAQEKNFTTAPAICHDGKAHFPREGVFVSNGTHWFVTQRNFYEPQIITTDNTFVSGNCDVVIGIVNNTVYDPLQPELDSFKEELDKYFKNHTSPDVDLGDISGINASVVNIQKEIDRLNEVAKNLNESLIDLQELGKYEQYIKGGGSGGGQIYEGKLTAEGLRFGIVASRFNHALVDRLVEGAIDAIVRHGGREEDITLVRVPGSWEIPVAAGELARKEDIDAVIAIGVLIRGATPHFDYIASEVSKGLADLSLELRKPITFGVITADTLEQAIERAGTKHGNKGWEAALSAIEMANLFKSLR

SEQ ID NO: 4302 - protein, 1371 aa, Artificial Sequence
  SARS-CoV-2/Germany/BavPat1/2020__EPI_ISL_406862 spike protein (1-1211)(Q965C_S1003C) LumSynth construct
MFVFLVLLPLVSSQCVNLTTRTQLPPAYTNSFTRGVYYPDKVFRSSVLHSTQDLFLPFFSNVTWFHAIHVSGTNGTKRFDNPVLPFNDGVYFASTEKSNIIRGWIFGTTLDSKTQSLLIVNNATNVVIKVCEFQFCNDPFLGVYYHKNNKSWMESEFRVYSSANNCTFEYVSQPFLMDLEGKQGNFKNLREFVFKNIDGYFKIYSKHTPINLVRDLPQGFSALEPLVDLPIGINITRFQTLLALHRSYLTPGDSSSGWTAGAAAYYVGYLQPRTFLLKYNENGTITDAVDCALDPLSETKCTLKSFTVEKGIYQTSNFRVQPTESIVRFPNITNLCPFGEVFNATRFASVYAWNRKRISNCVADYSVLYNSASFSTFKCYGVSPTKLNDLCFTNVYADSFVIRGDEVRQIAPGQTGKIADYNYKLPDDFTGCVIAWNSNNLDSKVGGNYNYLYRLFRKSNLKPFERDISTEIYQAGSTPCNGVEGFNCYFPLQSYGFQPTNGVGYQPYRVVVLSFELLHAPATVCGPKKSTNLVKNKCVNFNFNGLTGTGVLTESNKKFLPFQQFGRDIADTTDAVRDPQTLEILDITPCSFGGVSVITPGTNTSNQVAVLYQGVNCTEVPVAIHADQLTPTWRVYSTGSNVFQTRAGCLIGAEHVNNSYECDIPIGAGICASYQTQTNSPRRARSVASQSIIAYTMSLGAENSVAYSNNSIAIPTNFTISVTTEILPVSMTKTSVDCTMYICGDSTECSNLLLQYGSFCTQLNRALTGIAVEQDKNTQEVFAQVKQIYKTPPIKDFGGFNFSQILPDPSKPSKRSFIEDLLFNKVTLADAGFIKQYGDCLGDIAARDLICAQKFNGLTVLPPLLTDEMIAQYTSALLAGTITSGWTFGAGAALQIPFAMQMAYRFNGIGVTQNVLYENQKLIANQFNSAIGKIQDSLSSTASALGKLQDVVNQNAQALNTLVKCLSSNFGAISSVLNDILSRLDKVEAEVQIDRLITGRLQCLQTYVTQQLIRAAEIRASANLAATKMSECVLGQSKRVDFCGKGYHLMSFPQSAPHGVVFLHVTYVPAQEKNFTTAPAICHDGKAHFPREGVFVSNGTHWFVTQRNFYEPQIITTDNTFVSGNCDVVIGIVNNTVYDPLQPELDSFKEELDKYFKNHTSPDVDLGDISGINASVVNIQKEIDRLNEVAKNLNESLIDLQELGKYEQYIKGGGSGGGQIYEGKLTAEGLRFGIVASRFNHALVDRLVEGAIDAIVRHGGREEDITLVRVPGSWEIPVAAGELARKEDIDAVIAIGVLIRGATPHFDYIASEVSKGLADLSLELRKPITFGVITADTLEQAIERAGTKHGNKGWEAALSAIEMANLFKSLR

SEQ ID NO: 4303 - protein, 1371 aa, Artificial Sequence
  SARS-CoV-2/Wuhan/HBCDC-HB-02/2020__EPI_ISL_412978 spike protein (1-1211)(Q965C_S1003C) LumSynth construct
MFVFLVLLPLVSSQCVNLTTRTQLPPAYTNSFTRGVYYPDKVFRSSVLHSTQDLFLPFFSNVTWFHAIHVSGTNGTKRFDNPVLPFNDGVYFASTEKSNIIRGWIFGTTLDSKTQSLLIVNNATNVVIKVCEFQFCNDPFLGVYYHKNNKSWMESEFRVYSSANNCTFEYVSQPFLMDLEGKQGNFKNLREFVFKNIDGYFKIYSKHTPINLVRDLPQGFSALEPLVDLPIGINITRFQTLLALHRSYLTPGDSSSGWTAGAAAYYVGYLQPRTFLLKYNENGTITDAVDCALDPLSETKCTLKSFTVEKGIYQTSNFRVQPTESIVRFPNITNLCPFGEVFNATRFASVYAWNRKRISNCVADYSVLYNSASFSTFKCYGVSPTKLNDLCFTNVYADSFVIRGDEVRQIAPGQTGKIADYNYKLPDDFTGCVIAWNSNNLDSKVGGNYNYLYRLFRKSNLKPFERDISTEIYQAGSTPCNGVEGFNCYFPLQSYGFQPTNGVGYQPYRVVVLSFELLHAPATVCGPKKSTNLVKNKCVNFNFNGLTGTGVLTESNKKFLPFQQFGRDIADTTDAVRDPQTLEILDITPCSFGGVSVITPGTNTSNQVAVLYQDVNCTEVPVAIHADQLTPTWRVYSTGSNVFQTRAGCLIGAEHVNNSYECDIPIGAGICASYQTQTNSPRRARSVASQSIIAYTMSLGAENSVAYSNNSIAIPTNFTISVTTEILPVSMTKTSVDCTMYICGDSTECSNFLLQYGSFCTQLNRALTGIAVEQDKNTQEVFAQVKQIYKTPPIKDFGGFNFSQILPDPSKPSKRSFIEDLLFNKVTLADAGFIKQYGDCLGDIAARDLICAQKFNGLTVLPPLLTDEMIAQYTSALLAGTITSGWTFGAGAALQIPFAMQMAYRFNGIGVTQNVLYENQKLIANQFNSAIGKIQDSLSSTASALGKLQDVVNQNAQALNTLVKCLSSNFGAISSVLNDILSRLDKVEAEVQIDRLITGRLQCLQTYVTQQLIRAAEIRASANLAATKMSECVLGQSKRVDFCGKGYHLMSFPQSAPHGVVFLHVTYVPAQEKNFTTAPAICHDGKAHFPREGVFVSNGTHWFVTQRNFYEPQIITTDNTFVSGNCDVVIGIVNNTVYDPLQPELDSFKEELDKYFKNHTSPDVDLGDISGINASVVNIQKEIDRLNEVAKNLNESLIDLQELGKYEQYIKGGGSGGGQIYEGKLTAEGLRFGIVASRFNHALVDRLVEGAIDAIVRHGGREEDITLVRVPGSWEIPVAAGELARKEDIDAVIAIGVLIRGATPHFDYIASEVSKGLADLSLELRKPITFGVITADTLEQAIERAGTKHGNKGWEAALSAIEMANLFKSLR

SEQ ID NO: 4304 - protein, 1371 aa, Artificial Sequence
  SARS-CoV-2/Australia/QLD02/2020__EPI_ISL_407896 spike protein (1-1211)(Q965C_S1003C) LumSynth construct
MFVFLVLLPLVSSQCVNLTTRTQLPPAYTNSFTRGVYYPDKVFRSSVLHSTQDLFLPFFSNVTWFHAIHVSGTNGTKRFDNPVLPFNDGVYFASTEKSNIIRGWIFGTTLDSKTQSLLIVNNATNVVIKVCEFQFCNDPFLGVYYHKNNKSWMESEFRVYSSANNCTFEYVSQPFLMDLEGKQGNFKNLREFVFKNIDGYFKIYSKHTPINLVRDLPQGFSALEPLVDLPIGINITRFQTLLALHRSYLTPGDSSSGWTAGAAAYYVGYLQPRTFLLKYNENGTITDAVDCALDPLSETKCTLKSFTVEKGIYQTSNFRVQPTESIVRFPNITNLCPFGEVFNATRFASVYAWNRKRISNCVADYSVLYNSASFSTFKCYGVSPTKLNDLCFTNVYADSFVIRGDEVRQIAPGQTGKIADYNYKLPDDFTGCVIAWNSNNLDSKVGGNYNYLYRLFRKSNLKPFERDISTEIYQAGSTPCNGVEGFNCYFPLQSYGFQPTNGVGYQPYRVVVLSFELLHAPATVCGPKKSTNLVKNKCVNFNFNGLTGTGVLTESNKKFLPFQQFGRDIADTTDAVRDPQTLEILDITPCSFGGVSVITPGTNTSNQVAVLYQDVNCTEVPVAIHADQLTPTWRVYSTGSNVFQTRAGCLIGAEHVNNSYECDIPIGAGICASYQTQTNSPRRARSVASQSIIAYTMSLGAENSVAYSNNSIAIPTNFTISVTTEILPVSMTKTSVDCTMYICGDSTECSNLLLQYGSFCTQLNRALTGIAVEQDKNTQEVFAQVKQIYKTPPIKDFGGFNFSQILPDPSKPSKRSFIEDLLFNKVTLADAGFIKQYGDCLGDIAARDLICAQKFNGLTVLPPLLTDEMIAQYTSALLAGTITSGWTFGAGAALQIPFAMQMAYRFNGIGVTQNVLYENQKLIANQFNSAIGKIQDSLSSTASALGKLQDVVNQNAQALNTLVKCLSSNFGAISSVLNDILSRLDKVEAEVQIDRLITGRLQCLQTYVTQQLIRAAEIRASANLAATKMSECVLGQSKRVDFCGKGYHLMSFPQSAPHGVVFLHVTYVPAQEKNFTTAPAICHDGKAHFPREGVFVSNGTHWFVTQRNFYEPQIITTDNTFVSGNCDVVIGIVNNTVYDPLQLELDSFKEELDKYFKNHTSPDVDLGDISGINASVVNIQKEIDRLNEVAKNLNESLIDLQELGKYEQYIKGGGSGGGQIYEGKLTAEGLRFGIVASRFNHALVDRLVEGAIDAIVRHGGREEDITLVRVPGSWEIPVAAGELARKEDIDAVIAIGVLIRGATPHFDYIASEVSKGLADLSLELRKPITFGVITADTLEQAIERAGTKHGNKGWEAALSAIEMANLFKSLR

SEQ ID NO: 4305 - protein, 1371 aa, Artificial Sequence
  SARS-CoV-2/India/1-31/2020__EPI_ISL_413523 spike protein (1-1211)(Q965C_S1003C) LumSynth construct
MFVFLVLLPLVSSQCVNLTTRTQLPPAYTNSFTRGVYYPDKVFRSSVLHSTQDLFLPFFSNVTWFHAIHVSGTNGTKRFDNPVLPFNDGVYFASTEKSNIIRGWIFGTTLDSKTQSLLIVNNATNVVIKVCEFQFCNDPFLGVYYHKNNKSWMESEFRVYSSANNCTFEYVSQPFLMDLEGKQGNFKNLREFVFKNIDGYFKIYSKHTPINLVRDLPQGFSALEPLVDLPIGINITRFQTLLALHRSYLTPGDSSSGWTAGAAAYYVGYLQPRTFLLKYNENGTITDAVDCALDPLSETKCTLKSFTVEKGIYQTSNFRVQPTESIVRFPNITNLCPFGEVFNATRFASVYAWNRKRISNCVADYSVLYNSASFSTFKCYGVSPTKLNDLCFTNVYADSFVIRGDEVRQIAPGQTGKIADYNYKLPDDFTGCVIAWNSNNLDSKVGGNYNYLYRLFRKSNLKPFERDISTEIYQAGSTPCNGVEGFNCYFPLQSYGFQPTNGVGYQPYRVVVLSFELLHAPATVCGPKKSTNLVKNKCVNFNFNGLTGTGVLTESNKKFLPFQQFGRDIADTTDAVRDPQTLEILDITPCSFGGVSVITPGTNTSNQVAVLYQDVNCTEVPVAIHADQLTPTWRVYSTGSNVFQTRAGCLIGAEHVNNSYECDIPIGAGICASYQTQTNSPRRARSVASQSIIAYTMSLGAENSVAYSNNSIAIPTNFTISVTTEILPVSMTKTSVDCTMYICGDSTECSNLLLQYGSFCTQLNRALTGIAVEQDKNTQEVFAQVKQIYKTPPIKDFGGFNFSQILPDPSKPSKRSFIEDLLFNKVTLADAGFIKQYGDCLGDIAARDLICAQKFNGLTVLPPLLTDEMIAQYTSALLAGTITSGWTFGAGAALQIPFAMQMAYRFNGIGVTQNVLYENQKLIANQFNSVIGKIQDSLSSTASALGKLQDVVNQNAQALNTLVKCLSSNFGAISSVLNDILSRLDKVEAEVQIDRLITGRLQCLQTYVTQQLIRAAEIRASANLAATKMSECVLGQSKRVDFCGKGYHLMSFPQSAPHGVVFLHVTYVPAQEKNFTTAPAICHDGKAHFPREGVFVSNGTHWFVTQRNFYEPQIITTDNTFVSGNCDVVIGIVNNTVYDPLQPELDSFKEELDKYFKNHTSPDVDLGDISGINASVVNIQKEIDRLNEVAKNLNESLIDLQELGKYEQYIKGGGSGGGQIYEGKLTAEGLRFGIVASRFNHALVDRLVEGAIDAIVRHGGREEDITLVRVPGSWEIPVAAGELARKEDIDAVIAIGVLIRGATPHFDYIASEVSKGLADLSLELRKPITFGVITADTLEQAIERAGTKHGNKGWEAALSAIEMANLFKSLR

SEQ ID NO: 4306 - protein, 1371 aa, Artificial Sequence
  SARS-CoV-2/Guangdong/GD2020087-P0008/2020__EPI_ISL_413863 spike protein (1-1211)(Q965C_S1003C) LumSynth construct
MFVFLVLLPLVSSQCVNLTTRTQLPPAYTNSFTRGVYYPDKVFRSSVLHSTQDLFLPFFSNVTWFHAIHVSGTNGTKRFDNPVLPFNDGVYFASTEKSNIIRGWIFGTTLDSKTQSLLIVNNATNVVIKVCEFQFCNDPFLGVYYHKNNKSWMESEFRVYSSANNCTFEYVSQPFLMDLEGKQGNFKNLREFVFKNIDGYFKIYSKHTPINLVRDLPQGFSALEPLVDLPIGINITRFQTLLALHRSYLTPGDSSSGWTAGAAAYYVGYLQPRTFLLKYNENGTITDAVDCALDPLSETKCTLKSFTVEKGIYQTSNFRVQPTESIVRFPNITNLCPFGEVFNATRFASVYAWNRKRISNCVADYSVLYNSASFSTFKCYGVSPTKLNDLCFTNVYADSFVIRGDEVREIAPGQTGKIADYNYKLPDDFTGCVIAWNSNNLDSKVGGNYNYLYRLFRKSNLKPFERDISTEIYQAGSTPCNGVEGFNCYFPLQSYGFQPTNGVGYQPYRVVVLSFELLHAPATVCGPKKSTNLVKNKCVNFNFNGLTGTGVLTESNKKFLPFQQFGRDIADTTDAVRDPQTLEILDITPCSFGGVSVITPGTNTSNQVAVLYQDVNCTEVPVAIHADQLTPTWRVYSTGSNVFQTRAGCLIGAEHVNNSYECDIPIGAGICASYQTQTNSPRRARSVASQSIIAYTMSLGAENSVAYSNNSIAIPTNFTISVTTEILPVSMTKTSVDCTMYICGDSTECSNLLLQYGSFCTQLNRALTGIAVEQDKNTQEVFAQVKQIYKTPPIKDFGGFNFSQILPDPSKPSKRSFIEDLLFNKVTLADAGFIKQYGDCLGDIAARDLICAQKFNGLTVLPPLLTDEMIAQYTSALLAGTITSGWTFGAGAALQIPFAMQMAYRFNGIGVTQNVLYENQKLIANQFNSAIGKIQDSLSSTASALGKLQDVVNQNAQALNTLVKCLSSNFGAISSVLNDILSRLDKVEAEVQIDRLITGRLQCLQTYVTQQLIRAAEIRASANLAATKMSECVLGQSKRVDFCGKGYHLMSFPQSAPHGVVFLHVTYVPAQEKNFTTAPAICHDGKAHFPREGVFVSNGTHWFVTQRNFYEPQIITTDNTFVSGNCDVVIGIVNNTVYDPLQPELDSFKEELDKYFKNHTSPDVDLGDISGINASVVNIQKEIDRLNEVAKNLNESLIDLQELGKYEQYIKGGGSGGGQIYEGKLTAEGLRFGIVASRFNHALVDRLVEGAIDAIVRHGGREEDITLVRVPGSWEIPVAAGELARKEDIDAVIAIGVLIRGATPHFDYIASEVSKGLADLSLELRKPITFGVITADTLEQAIERAGTKHGNKGWEAALSAIEMANLFKSLR

SEQ ID NO: 4307 - protein, 1371 aa, Artificial Sequence
  SARS-CoV-2/Sweden/01/2020__EPI_ISL_411951 spike protein (1-1211)(Q965C_S1003C) LumSynth construct
MFVFLVLLPLVSSQCVNLTTRTQLPPAYTNSFTRGVYYPDKVFRSSVLHSTQDLFLPFFSNVTWFHAIHVSGTNGTKRFDNPVLPFNDGVYFASTEKSNIIRGWIFGTTLDSKTQSLLIVNNATNVVIKVCEFQFCNDPFLGVYYHKNNKSWMESEFRVYSSANNCTFEYVSQPFLMDLEGKQGNFKNLREFVFKNIDGYFKIYSKHTPINLVRDLPQGFSALEPLVDLPIGINITRFQTLLALHRSYLTPGDSSSGWTAGAAAYYVGYLQPRTFLLKYNENGTITDAVDCALDPLSETKCTLKSFTVEKGIYQTSNFRVQPTESIVRFPNITNLCPFGEVFNATRFASVYAWNRKRISNCVADYSVLYNSASFSTFKCYGVSPTKLNDLCFTNVYADSFVIRGDEVRQIAPGQTGKIADYNYKLPDDFTGCVIAWNSNNLDSKVGGNYNYLYRLFRKSNLKPFERDISTEIYQAGSTPCNGVEGFNCYFPLQSYGFQPTNGVGYQPYRVVVLSFELLHAPATVCGPKKSTNLVKNKCVNFNFNGLTGTGVLTESNKKFLPFQQFGRDIADTTDAVRDPQTLEILDITPCSFGGVSVITPGTNTSNQVAVLYQDVNCTEVPVAIHADQLTPTWRVYSTGSNVFQTRAGCLIGAEHVNNSYECDIPIGAGICASYQTQTNSPRRARSVASQSIIAYTMSLGAENSVAYSNNSIAIPTNFTISVTTEILPVSMTKTSVDCTMYICGDSTECSNLLLQYGSFCTQLNRALTGIAVEQDKNTQEVFAQVKQIYKTPPIKDCGGFNFSQILPDPSKPSKRSFIEDLLFNKVTLADAGFIKQYGDCLGDIAARDLICAQKFNGLTVLPPLLTDEMIAQYTSALLAGTITSGWTFGAGAALQIPFAMQMAYRFNGIGVTQNVLYENQKLIANQFNSAIGKIQDSLSSTASALGKLQDVVNQNAQALNTLVKCLSSNFGAISSVLNDILSRLDKVEAEVQIDRLITGRLQCLQTYVTQQLIRAAEIRASANLAATKMSECVLGQSKRVDFCGKGYHLMSFPQSAPHGVVFLHVTYVPAQEKNFTTAPAICHDGKAHFPREGVFVSNGTHWFVTQRNFYEPQIITTDNTFVSGNCDVVIGIVNNTVYDPLQPELDSFKEELDKYFKNHTSPDVDLGDISGINASVVNIQKEIDRLNEVAKNLNESLIDLQELGKYEQYIKGGGSGGGQIYEGKLTAEGLRFGIVASRFNHALVDRLVEGAIDAIVRHGGREEDITLVRVPGSWEIPVAAGELARKEDIDAVIAIGVLIRGATPHFDYIASEVSKGLADLSLELRKPITFGVITADTLEQAIERAGTKHGNKGWEAALSAIEMANLFKSLR

SEQ ID NO: 4308 - protein, 1371 aa, Artificial Sequence
  SARS-CoV-2/Tianmen/HBCDC-HB-07/2020__EPI_ISL_412983 spike protein (1-1211)(Q965C_S1003C) LumSynth construct
MFVFLVLLPLVSSQCVNLTTRTQLPPAYTNSFTRGVYYPDKVFRSSVLHSTQDLFLPFFSNVTWFHAIHVSGTNGTKRFDNPVLPFNDGVYFASTEKSNIIRGWIFGTTLDSKTQSLLIVNNATNVVIKVCEFQFCNDPFLGVYYHKNNKSWMESEFRVYSSANNCTFEYVSQPFLMDLEGKQGNFKNLREFVFKNIDGYFKIYSKHTPINLVRDLPQGFSALEPLVDLPIGINITRFQTLLALHRSYLTPGDSSSGWTAGAAAYYVGYLQPRTFLLKYNENGTITDAVDCALDPLSETKCTLKSFTVEKGIYQTSNFRVQPTESIVRFPNITNLCPFGEVFNATRFASVYAWNRKRISNCVADYSVLYNSASFSTFKCYGVSPTKLNDLCFTNVYADSFVIRGDEVRQIAPGQTGKIADYNYKLPDDFTGCVIAWNSNNLDSKVGGNYNYLYRLFRKSNLKPFERDISTEIYQAGSTPCNGVEGFNCYFPLQSYGFQPTNGVGYQPYRVVVLSFELLHAPATVCGPKKSTNLVKNKCVNFNFNGLTGTGVLTESNKKFLPFQQFGRDIADTTDAVRDPQTLEILDITPCSFGGVSVITPGTNTSNQVAVLYQDLNCTEVPVAIHADQLTPTWRVYSTGSNVFQTRAGCLIGAEHVNNSYECDIPIGAGICASYQTQTNSPRRARSVASQSIIAYTMSLGAENSVAYSNNSIAIPTNFTISVTTEILPVSMTKTSVDCTMYICGDSTECSNLLLQYGSFCTQLNRALTGIAVEQDKNTQEVFAQVKQIYKTPPIKDFGGFNFSQILPDPSKPSKRSFIEDLLFNKVTLADAGFIKQYGDCLGDIAARDLICAQKFNGLTVLPPLLTDEMIAQYTSALLAGTITSGWTFGAGAALQIPFAMQMAYRFNGIGVTQNVLYENQKLIANQFNSAIGKIQDSLSSTASALGKLQDVVNQNAQALNTLVKCLSSNFGAISSVLNDILSRLDKVEAEVQIDRLITGRLQCLQTYVTQQLIRAAEIRASANLAATKMSECVLGQSKRVDFCGKGYHLMSFPQSAPHGVVFLHVTYVPAQEKNFTTAPAICHDGKAHFPREGVFVSNGTHWFVTQRNFYEPQIITTDNTFVSGNCDVVIGIVNNTVYDPLQPELDSFKEELDKYFKNHTSPDVDLGDISGINASVVNIQKEIDRLNEVAKNLNESLIDLQELGKYEQYIKGGGSGGGQIYEGKLTAEGLRFGIVASRFNHALVDRLVEGAIDAIVRHGGREEDITLVRVPGSWEIPVAAGELARKEDIDAVIAIGVLIRGATPHFDYIASEVSKGLADLSLELRKPITFGVITADTLEQAIERAGTKHGNKGWEAALSAIEMANLFKSLR

SEQ ID NO: 4309 - protein, 1371 aa, Artificial Sequence
  SARS-CoV-2/Hong Kong/case42_VM20002493/2020__EPI_ISL_414527 spike protein (1-1211)(Q965C_S1003C) LumSynth construct
MFVFLVLLPLVSSQCVNLTTRTQLPPAYTNSFTRGVYYPDKVFRSSVLHSTQDLFLPFFSNVTWFHAIHVSGTNGTKRFDNPVLPFNDGVYFASTEKSNIIRGWIFGTTLDSKTQSLLIVNNATNVVIKVCEFQFCNDPFLGVYYHKNNKSWMESEFRVYSSANNCTFEYVSQPFLMDLEGKQGNFKNLREFVFKNIDGYFKIYSKHTPINLVRDLPQGFSALEPLVDLPIGINITRFQTLLALHRSYLTPGDSSSGWTAGAAAYYVGYLQPRTFLLKYNENGTITDAVDCALDPLSETKCTLKSFTVEKGIYQTSNFRVQPTESIVRFPNITNLCPFGEVFNATRFASVYAWNRKRISNCVADYSVLYNSASFSTFKCYGVSPTKLNDLCFTNVYADSFVIRGDEVRQIAPGQTGKIADYNYKLPDDFTGCVIAWNSNNLDSKVGGNYNYLYRLFRKSNLKPFERDISTEIYQAGSTPCNGVEGFNCYFPLQSYGFQPTNGVGYQPYRVVVLSFELLHAPATVCGPKKSTNLVKNKCVNFNFNGLTGTGVLTESNKKFLPFQQFGRDIADTTDAVRDPQTLEILDITPCSFGGVSVITPGTNTSNQVAVLYQDVNCTEVPVAIHADQLTPTWRVYSTGSNVFQTRAGCLIGAEHVNNSYECDIPIGAGICASYQTQTNSPRRARSVASQSIIAYTMSLGAENSVAYSNNSIAIPTNFAISVTTEILPVSMTKTSVDCTMYICGDSTECSNLLLQYGSFCTQLNRALTGIAVEQDKNTQEVFAQVKQIYKTPPIKDFGGFNFSQILPDPSKPSKRSFIEDLLFNKVTLADAGFIKQYGDCLGDIAARDLICAQKFNGLTVLPPLLTDEMIAQYTSALLAGTITSGWTFGAGAALQIPFAMQMAYRFNGIGVTQNVLYENQKLIANQFNSAIGKIQDSLSSTASALGKLQDVVNQNAQALNTLVKCLSSNFGAISSVLNDILSRLDKVEAEVQIDRLITGRLQCLQTYVTQQLIRAAEIRASANLAATKMSECVLGQSKRVDFCGKGYHLMSFPQSAPHGVVFLHVTYVPAQEKNFTTAPAICHDGKAHFPREGVFVSNGTHWFVTQRNFYEPQIITTDNTFVSGNCDVVIGIVNNTVYDPLQPELDSFKEELDKYFKNHTSPDVDLGDISGINASVVNIQKEIDRLNEVAKNLNESLIDLQELGKYEQYIKGGGSGGGQIYEGKLTAEGLRFGIVASRFNHALVDRLVEGAIDAIVRHGGREEDITLVRVPGSWEIPVAAGELARKEDIDAVIAIGVLIRGATPHFDYIASEVSKGLADLSLELRKPITFGVITADTLEQAIERAGTKHGNKGWEAALSAIEMANLFKSLR

SEQ ID NO: 4310 - protein, 1371 aa, Artificial Sequence
  SARS-CoV-2/USA/CruiseA-23/2020__EPI_ISL_414482 spike protein (1-1211)(Q965C_S1003C) LumSynth construct
MFVFLVLLPLVSSQCVNLTTRTQLPPAYTNSFTRGVYYPDKVFRSSVLHSTQDLFLPFFSNVTWFHAIHVSGTNGTKRFDNPVLPFNDGVYFASTEKSNIIRGWIFGTTLDSKTQSLLIVNNATNVVIKVCEFQFCNDPFLGVYYHKNNKSWMESEFRVYSSANNCTFEYVSQPFLMDLEVKQGNFKNLREFVFKNIDGYFKIYSKHTPINLVRDLPQGFSALEPLVDLPIGINITRFQTLLALHRSYLTPGDSSSGWTAGAAAYYVGYLQPRTFLLKYNENGTITDAVDCALDPLSETKCTLKSFTVEKGIYQTSNFRVQPTESIVRFPNITNLCPFGEVFNATRFASVYAWNRKRISNCVADYSVLYNSASFSTFKCYGVSPTKLNDLCFTNVYADSFVIRGDEVRQIAPGQTGKIADYNYKLPDDFTGCVIAWNSNNLDSKVGGNYNYLYRLFRKSNLKPFERDISTEIYQAGSTPCNGVEGFNCYFPLQSYGFQPTNGVGYQPYRVVVLSFELLHAPATVCGPKKSTNLVKNKCVNFNFNGLTGTGVLTESNKKFLPFQQFGRDIADTTDAVRDPQTLEILDITPCSFGGVSVITPGTNTSNQVAVLYQDVNCTEVPVAIHADQLTPTWRVYSTGSNVFQTRAGCLIGAEHVNNSYECDIPIGAGICASYQTQTNSPRRARSVASQSIIAYTMSLGAENSVAYSNNSIAIPTNFTISVTTEILPVSMTKTSVDCTMYICGDSTECSNLLLQYGSFCTQLNRALTGIAVEQDKNTQEVFAQVKQIYKTPPIKDFGGFNFSQILPDPSKPSKRSFIEDLLFNKVTLADAGFIKQYGDCLGDIAARDLICAQKFNGLTVLPPLLTDEMIAQYTSALLAGTITSGWTFGAGAALQIPFAMQMAYRFNGIGVTQNVLYENQKLIANQFNSAIGKIQDSLSSTASALGKLQDVVNQNAQALNTLVKCLSSNFGAISSVLNDILSRLDKVEAEVQIDRLITGRLQCLQTYVTQQLIRAAEIRASANLAATKMSECVLGQSKRVDFCGKGYHLMSFPQSAPHGVVFLHVTYVPAQEKNFTTAPAICHDGKAHFPREGVFVSNGTHWFVTQRNFYEPQIITTDNTFVSGNCDVVIGIVNNTVYDPLQPELDSFKEELDKYFKNHTSPDVDLGDISGINASVVNIQKEIDRLNEVAKNLNESLIDLQELGKYEQYIKGGGSGGGQIYEGKLTAEGLRFGIVASRFNHALVDRLVEGAIDAIVRHGGREEDITLVRVPGSWEIPVAAGELARKEDIDAVIAIGVLIRGATPHFDYIASEVSKGLADLSLELRKPITFGVITADTLEQAIERAGTKHGNKGWEAALSAIEMANLFKSLR

SEQ ID NO: 4311 - protein, 1371 aa, Artificial Sequence
  SARS-CoV-2/Hong Kong/case85_VM20002868/2020__EPI_ISL_414519 spike protein (1-1211)(Q965C_S1003C) LumSynth construct
MFVFLVLVPLVSSQCVNLTTRTQLPPAYTNSFTRGVYYPDKVFRSSVLHSTQDLFLPFFSNVTWFHAIHVSGTNGTKRFDNPVLPFNDGVYFASTEKSNIIRGWIFGTTLDSKTQSLLIVNNATNVVIKVCEFQFCNDPFLGVYYHKNNKSWMESEFRVYSSANNCTFEYVSQPFLMDLEGKQGNFKNLREFVFKNIDGYFKIYSKHTPINLVRDLPQGFSALEPLVDLPIGINITRFQTLLALHRSYLTPGDSSSGWTAGAAAYYVGYLQPRTFLLKYNENGTITDAVDCALDPLSETKCTLKSFTVEKGIYQTSNFRVQPTESIVRFPNITNLCPFGEVFNATRFASVYAWNRKRISNCVADYSVLYNSASFSTFKCYGVSPTKLNDLCFTNVYADSFVIRGDEVRQIAPGQTGKIADYNYKLPDDFTGCVIAWNSNNLDSKVGGNYNYLYRLFRKSNLKPFERDISTEIYQAGSTPCNGVEGFNCYFPLQSYGFQPTNGVGYQPYRVVVLSFELLHAPATVCGPKKSTNLVKNKCVNFNFNGLTGTGVLTESNKKFLPFQQFGRDIADTTDAVRDPQTLEILDITPCSFGGVSVITPGTNTSNQVAVLYQDVNCTEVPVAIHADQLTPTWRVYSTGSNVFQTRAGCLIGAEHVNNSYECDIPIGAGICASYQTQTNSPRRARSVASQSIIAYTMSLGAENSVAYSNNSIAIPTNFTISVTTEILPVSMTKTSVDCTMYICGDSTECSNLLLQYGSFCTQLNRALTGIAVEQDKNTQEVFAQVKQIYKTPPIKDFGGFNFSQILPDPSKPSKRSFIEDLLFNKVTLADAGFIKQYGDCLGDIAARDLICAQKFNGLTVLPPLLTDEMIAQYTSALLAGTITSGWTFGAGAALQIPFAMQMAYRFNGIGVTQNVLYENQKLIANQFNSAIGKIQDSLSSTASALGKLQDVVNQNAQALNTLVKCLSSNFGAISSVLNDILSRLDKVEAEVQIDRLITGRLQCLQTYVTQQLIRAAEIRASANLAATKMSECVLGQSKRVDFCGKGYHLMSFPQSAPHGVVFLHVTYVPAQEKNFTTAPAICHDGKAHFPREGVFVSNGTHWFVTQRNFYEPQIITTDNTFVSGNCDVVIGIVNNTVYDPLQPELDSFKEELDKYFKNHTSPDVDLGDISGINASVVNIQKEIDRLNEVAKNLNESLIDLQELGKYEQYIKGGGSGGGQIYEGKLTAEGLRFGIVASRFNHALVDRLVEGAIDAIVRHGGREEDITLVRVPGSWEIPVAAGELARKEDIDAVIAIGVLIRGATPHFDYIASEVSKGLADLSLELRKPITFGVITADTLEQAIERAGTKHGNKGWEAALSAIEMANLFKSLR

SEQ ID NO: 4312 - protein, 1371 aa, Artificial Sequence; identical to SEQ ID NO: 4302
  SARS-CoV-2/England/200990660/2020__EPI_ISL_414523 spike protein (1-1211)(Q965C_S1003C) LumSynth construct

SEQ ID NO: 4313 - protein, 1371 aa, Artificial Sequence
  SARS-CoV-2/Australia/NSW09/2020__EPI_ISL_413595 spike protein (1-1211)(Q965C_S1003C) LumSynth construct
MFVFLVLLPLVSSQCVNLTTRTQLPPAYTNSFTRGVYYPDKVFRSSVLHSTQDLFLPFFSNVTWFHAIHVSGTNGTKRFDNPVLPFNDGVYFASTEKSNIIRGWIFGTTLDSKTQSLLIVNNATNVVIKVCEFQFCNDPFLGVYYHKNNKSWMESEFRVYSSANNCTFEYVSQPFLMDLEGKQGNFKNLREFVFKNIDGYFKIYSKHTPINLVRDLPQGFSALEPLVDLPIGINITRFQTLLALHRSYLTPGDSSSGWTAGAAAYYVGYLQPRTFLLKYNENGTITDAVDCALDPLSETKCTLKSFTVEKGIYQTSNFRVQPTESIVRFPNITNLCPFGEVFNATRFASVYAWNRKRISNCVADYSVLYNSASFSTFKCYGVSPTKLNDLCFTNVYADSFVIRGDEVRQIAPGQTGKIADYNYKLPDDFTGCVIAWNSNNLDSKVGGNYNYLYRLFRKSNLKPFERDISTEIYQAGSTPCNGVEGFNCYFPLQSYGFQPTNGVGYQPYRVVVLSFELLHAPATVCGPKKSTNLVKNKCVNFNFNGLTGTGVLTESNKKFLPFQQFGRDIADTTDAVRDPQTLEILDITPCSFGGVSVITPGTNTSNQVAVLYQDVNCTEVPVAIHADQLTPTWRVYSTGSNVFQTRAGCLIGAEHVNNSYECDIPIGAGICASYQTQTNSPRRARSVASQSIIAYTMSLGAENSVAYSNNSIAIPTNFTISVTTEILPVSMTKTSVDCTMYICGDSTECSNLLLQYGSFCTQLNRALTGIAVEQDKNTQEVFAQVKQIYKTPPIKDFGGFNFSQILPDPSKPSKRSFIEDLLFNKVTLADAGFIKQYGDCLGDIAARDLICAQKFNGLTVLPPLLTDEMIAQYTSALLAGTITSGWTFGAGAALQIPFAMQMAYRFNGIGVTQNVLYENQKLIANQFNSAIGKIQDSLSFTASALGKLQDVVNQNAQALNTLVKCLSSNFGAISSVLNDILSRLDKVEAEVQIDRLITGRLQCLQTYVTQQLIRAAEIRASANLAATKMSECVLGQSKRVDFCGKGYHLMSFPQSAPHGVVFLHVTYVPAQEKNFTTAPAICHDGKAHFPREGVFVSNGTHWFVTQRNFYEPQIITTDNTFVSGNCDVVIGIVNNTVYDPLQPELDSFKEELDKYFKNHTSPDVDLGDISGINASVVNIQKEIDRLNEVAKNLNESLIDLQELGKYEQYIKGGGSGGGQIYEGKLTAEGLRFGIVASRFNHALVDRLVEGAIDAIVRHGGREEDITLVRVPGSWEIPVAAGELARKEDIDAVIAIGVLIRGATPHFDYIASEVSKGLADLSLELRKPITFGVITADTLEQAIERAGTKHGNKGWEAALSAIEMANLFKSLR

SEQ ID NO: 4314 - protein, 1371 aa, Artificial Sequence; identical to SEQ ID NO: 4294
  SARS-CoV-2/Australia/NSW10/2020__EPI_ISL_413596 spike protein (1-1211)(Q965C_S1003C) LumSynth construct

SEQ ID NO: 4315 - protein, 1371 aa, Artificial Sequence
  SARS-CoV-2/Switzerland/1000477797/2020__EPI_ISL_413023 spike protein (1-1211)(Q965C_S1003C) LumSynth construct
MFVFLVLLPLVSSQCVNLTTRTQLPPAYTNSFTRGVYYPDKVFRSSVLHSTQDLFLPFFSNVTWFHAIHVSGTNGTKRFDNPVLPFNDGVYFASTEKSNIIRGWIFGTTLDSKTQSLLIVNNATNVVIKVCEFQFCNDPFLGVYYHKNNKSWMESEFRVYSSANNCTFEYVSQPFLMDLEGKQGNFKNLREFVFKNIDGYFNIYSKHTPINLVRDLPQGFSALEPLVDLPIGINITRFQTLLALHRSYLTPGDSSSGWTAGAAAYYVGYLQPRTFLLKYNENGTITDAVDCALDPLSETKCTLKSFTVEKGIYQTSNFRVQPTESIVRFPNITNLCPFGEVFNATRFASVYAWNRKRISNCVADYSVLYNSASFSTFKCYGVSPTKLNDLCFTNVYADSFVIRGDEVRQIAPGQTGKIADYNYKLPDDFTGCVIAWNSNNLDSKVGGNYNYLYRLFRKSNLKPFERDISTEIYQAGSTPCNGVEGFNCYFPLQSYGFQPTNGVGYQPYRVVVLSFELLHAPATVCGPKKSTNLVKNKCVNFNFNGLTGTGVLTESNKKFLPFQQFGRDIADTTDAVRDPQTLEILDITPCSFGGVSVITPGTNTSNQVAVLYQGVNCTEVPVAIHADQLTPTWRVYSTGSNVFQTRAGCLIGAEHVNNSYECDIPIGAGICASYQTQTNSPRRARSVASQSIIAYTMSLGAENSVAYSNNSIAIPTNFTISVTTEILPVSMTKTSVDCTMYICGDSTECSNLLLQYGSFCTQLNRALTGIAVEQDKNTQEVFAQVKQIYKTPPIKDFGGFNFSQILPDPSKPSKRSFIEDLLFNKVTLADAGFIKQYGDCLGDIAARDLICAQKFNGLTVLPPLLTDEMIAQYTSALLAGTITSGWTFGAGAALQIPFAMQMAYRFNGIGVTQNVLYENQKLIANQFNSAIGKIQDSLSSTASALGKLQDVVNQNAQALNTLVKCLSSNFGAISSVLNDILSRLDKVEAEVQIDRLITGRLQCLQTYVTQQLIRAAEIRASANLAATKMSECVLGQSKRVDFCGKGYHLMSFPQSAPHGVVFLHVTYVPAQEKNFTTAPAICHDGKAHFPREGVFVSNGTHWFVTQRNFYEPQIITTDNTFVSGNCDVVIGIVNNTVYDPLQPELDSFKEELDKYFKNHTSPDVDLGDISGINASVVNIQKEIDRLNEVAKNLNESLIDLQELGKYEQYIKGGGSGGGQIYEGKLTAEGLRFGIVASRFNHALVDRLVEGAIDAIVRHGGREEDITLVRVPGSWEIPVAAGELARKEDIDAVIAIGVLIRGATPHFDYIASEVSKGLADLSLELRKPITFGVITADTLEQAIERAGTKHGNKGWEAALSAIEMANLFKSLR

SEQ ID NO: 4316 - protein, 1371 aa, Artificial Sequence
  SARS-CoV-2/Belgium/BA-02291/2020__EPI_ISL_415159 spike protein (1-1211)(Q965C_S1003C) LumSynth construct
MFVFLVLLPLVSSQCVNLTTRTQLPPAYTNSFTRGVYYPDKVFRSSVLHSTQDLFLPFFSNVTWFHAIHVSGTNGTKRFDNPVLPFNDGVYFASTEKSNIIRGWIFGTTLDSKTQSLLIVNNATNVVIKVCEFQFCNDPFLGVYYHKNNKSWMESEFRVYSSANNCTFEYVSQPFLMDLEGKQGNFKNLREFVFKNIDGYFKIYSKHTPINLVRDLPQGFSALEPLVDLPIGINITRFQTLLALHRSYLTPGDSSSGWTAGAAAYYVGYLQPRTFLLKYNENGTITDAVDCALDPLSETKCTLKSFTVEKGIYQTSNFRVQPTESIVRFPNITNLCPFGEVFNATRFASVYAWNRKRISNCVADYSVLYNSASFSTFKCYGVSPTKLNDLCFTNVYADSFVIRGDEVRQIAPGQTGKIADYNYKLPDDFTGCVIAWNSNNLDSKVGGNYNYLYRLFRRSNLKPFERDISTEIYQAGSTPCNGVEGFNCYFPLQSYGFQPTNGVGYQPYRVVVLSFELLPAPATVCGPKKSTNLVKNKCVNFNFNGLTGTGVLTESNKKFLPFQQFGRDIADTTDAVRDPQTLEILDITPCSFGGVSVITPGTNTSNQVAVLYQGVNCTEVPVAIHADQLTPTWRVYSTGSNVFQTRAGCLIGAEHVNNSYECDIPIGAGICASYQTQTNSPRRARSVASQSIIAYTMSLGAENSVAYSNNSIAIPTNFTISVTTEILPVSMTKTSVDCTMYICGDSTECSNLLLQYGSFCTQLNRALTGIAVEQDKNTQEVFAQVKQIYKTPPIKDFGGFNFSQILPDPSKPSKRSFIEDLLFNKVTLADAGFIKQYGDCLGDIAARDLICAQKFNGLTVLPPLLTDEMIAQYTSALLAGTITSGWTFGAGAALQIPFAMQMAYRFNGIGVTQNVLYENQKLIANQFNSAIGKIQDSLSSAAPALGKLQDVVNQNAQALNTLVKCLSSNFGAISSVLNDILSRLDKVEAEVQIDRLITGRLQCLQTYVTQQLIRAAEIRASANLAATKMSECVLGQSKRVDFCGKGYHLMSFPQSAPHGVVFLHVTYVPAQEKNFTTAPAICHDGKAHFPREGVFVSNGTHWFVTQRNFYEPQIITTDNTFVSGNCDVVIGIVNNTVYDPLQPELDSFKEELDKYFKNHTSPDVDLGDISGINASVVNIQKEIDRLNEVAKNLNESLIDLQELGKYEQYIKGGGSGGGQIYEGKLTAEGLRFGIVASRFNHALVDRLVEGAIDAIVRHGGREEDITLVRVPGSWEIPVAAGELARKEDIDAVIAIGVLIRGATPHFDYIASEVSKGLADLSLELRKPITFGVITADTLEQAIERAGTKHGNKGWEAALSAIEMANLFKSLR

SEQ ID NO: 4317 - protein, 1371 aa, Artificial Sequence
  SARS-CoV-2/USA/WA8-UW5/2020__EPI_ISL_413486 spike protein (1-1211)(Q965C_S1003C) LumSynth construct
MFVFLVLLPLVSSQCVNLTTRTQLPPAYTNSFTRGVYYPDKVFRSSVLHSTQDLFLPFFSNVTWFHAIHVSGTNGTKRFDNPVLPFNDGVYFASTEKSNIIRGWIFGTTLDSKTQSLLIVNNATNVVIKVCEFQFCNDPFLGVYYHKNNKSWMESEFRVYSSANNCTFEYVSQPFLMDLEGKQGNFKNLREFVFKNIDGYFKIYSKHTPINLVRDLPQGFSALEPLVDLPIGINITRFQTLLALHRSYLTPGDSSSGWTAGAAAYYVGYLQPRTFLLKYNENGTITDAVDCALDPLSETKCTLKSFTVEKGIYQTSNFRVQPTESIVRFPNITNLCPFGEVFNATRFASVYAWNRKRISNCVADYSVLYNSASFSTFKCYGVSPTKLNDLCFTNVYADSFVIRGDEVRQIAPGQTGKIADYNYKLPDDFTGCVIAWNSNNLDSKVGGNYNYLYRLFRKSNLKPFERDISTEIYQAGSTPCNGVEGFNCYFPLQSYGFQPTNGVGYQPYRVVVLSFELLHAPATVCGPKKSTNLVKNKCVNFNFNGLTGTGVLTESNKKFLPFQQFGRDIADTTDAVRDPQTLEILDITPCSFGGVSVITPGTNTSNQVAVLYQDVNCTEVPVAIHADQLTPTWRVYSTGSNVFQTRAGCLIGAEYVNNSYECDIPIGAGICASYQTQTNSPRRARSVASQSIIAYTMSLGAENSVAYSNNSIAIPTNFTISVTTEILPVSMTKTSVDCTMYICGDSTECSNLLLQYGSFCTQLNRALTGIAVEQDKNTQEVFAQVKQIYKTPPIKDFGGFNFSQILPDPSKPSKRSFIEDLLFNKVTLADAGFIKQYGDCLGDIAARDLICAQKFNGLTVLPPLLTDEMIAQYTSALLAGTITSGWTFGAGAALQIPFAMQMAYRFNGIGVTQNVLYENQKLIANQFNSAIGKIQDSLSSTASALGKLQDVVNQNAQALNTLVKCLSSNFGAISSVLNDILSRLDKVEAEVQIDRLITGRLQCLQTYVTQQLIRAAEIRASANLAATKMSECVLGQSKRVDFCGKGYHLMSFPQSAPHGVVFLHVTYVPAQEKNFTTAPAICHDGKAHFPREGVFVSNGTHWFVTQRNFYEPQIITTDNTFVSGNCDVVIGIVNNTVYDPLQPELDSFKEELDKYFKNHTSPDVDLGDISGINASVVNIQKEIDRLNEVAKNLNESLIDLQELGKYEQYIKGGGSGGGQIYEGKLTAEGLRFGIVASRFNHALVDRLVEGAIDAIVRHGGREEDITLVRVPGSWEIPVAAGELARKEDIDAVIAIGVLIRGATPHFDYIASEVSKGLADLSLELRKPITFGVITADTLEQAIERAGTKHGNKGWEAALSAIEMANLFKSLR

SEQ ID NO: 4318 - protein, 1371 aa, Artificial Sequence
  SARS-CoV-2/England/20102000506/2020__EPI_ISL_415147 spike protein (1-1211)(Q965C_S1003C) LumSynth construct
MFVFLVLLPLVSSQCVNLTTRTQLPPAYTNSFTRGVYYPDKVFRSSVLHSTQDLFLPFFSNVTWFHAIHVSGTNGTKRFDNPVLPFNDGVYFASTEKSNIIRGWIFGTTLDSKTQSLLIVNNATNVVIKVCEFQFCNDPFLGVYYHKNNKSWMESEFRVYSSANNCTFEYVSQPFLMDLEGKQGNFKNLREFVFKNIDGYFKIYSKHTPINLVRDLPQGFSALEPLVDLPIGINITRFQTLLALHRSYLTPGDSSSGWTAGAAAYYVGYLQPRTFLLKYNENGTITDAVDCALDPLSETKCTLKSFTVEKGIYQTSNFRVQPTESIVRFPNITNLCPFGEVFNATRFASVYAWNRKRISNCVADYSVLYNSASFSTFKCYGVSPTKLNDLCFTNVYADSFVIRGDEVRQIAPGQTGKIADYNYKLPDDFTGCVIAWNSNNLDSKVGGNYNYLYRLFRKSNLKPFERDISTEIYQAGSTPCNGVEGFNCYFPLQSYGFQPTNGVGYQPYRVVVLSFELLHAPATVCGPKKSTNLVKNKCVNFNFNGLTGTGVLTESNKKFLPFQQFGRDIADTTDAVRDPQTLEILDITPCSFGGVSVITPGTNTSNQVAVLYQGVNCTEVPVAIHADQLTPTWRVYSTGSNVFQTRAGCLIGAEHVNNSYECDIPIGAGICASYQTQTNSPRRARSVASQSIIAYTMSLGAENSVAYSNNSIAIPTNFTISVTTEILPVSMTKTSVDCTMYICGDSTECSNLLLQYGSFCTQLNRALTGIAVEQDKNTQEVFAQVKQIYKTPPIKDFGGFNFSQILPDPSKPSKRSFIEDLLFNKVTLADAGFIKQYGYCLGDIAARDLICAQKFNGLTVLPPLLTDEMIAQYTSALLAGTITSGWTFGAGAALQIPFAMQMAYRFNGIGVTQNVLYENQKLIANQFNSAIGKIQDSLSSTASALGKLQDVVNQNAQALNTLVKCLSSNFGAISSVLNDILSRLDKVEAEVQIDRLITGRLQCLQTYVTQQLIRAAEIRASANLAATKMSECVLGQSKRVDFCGKGYHLMSFPQSAPHGVVFLHVTYVPAQEKNFTTAPAICHDGKAHFPREGVFVSNGTHWFVTQRNFYEPQIITTDNTFVSGNCDVVIGIVNNTVYDPLQPELDSFKEELDKYFKNHTSPDVDLGDISGINASVVNIQKEIDRLNEVAKNLNESLIDLQELGKYEQYIKGGGSGGGQIYEGKLTAEGLRFGIVASRFNHALVDRLVEGAIDAIVRHGGREEDITLVRVPGSWEIPVAAGELARKEDIDAVIAIGVLIRGATPHFDYIASEVSKGLADLSLELRKPITFGVITADTLEQAIERAGTKHGNKGWEAALSAIEMANLFKSLR

SEQ ID NO: 4319 - protein, 1371 aa, Artificial Sequence
  SARS-CoV-2/Belgium/VAG-03013/2020__EPI_ISL_415155 spike protein (1-1211)(Q965C_S1003C) LumSynth construct
MFVFLVLLPLVSSQCVNLTTRTQLPPAYTNSFTRGVYYPDKVFRSSVLHSTQDLFLPFFSNVTWFHAIHVSGTNGTKRFDNPVLPFNDGVYFASTEKSNIIRGWIFGTTLDSKTQSLLIVNNATNVVIKVCEFQFCNDPFLGVYYHKNNKSWMESEFRVYSSANNCTFEYVSQPFLMDLEGKQGNFKNLREFVFKNIDGYFKIYSKHTPINLVRDLPQGFSALEPLVDLPIGINITRFQTLLALHRSYLTPGDSSSGWTAGAAAYYVGYLQPRTFLLKYNENGTITDAVDCALDPLSETKCTLKSFTVEKGIYQTSNFRVQPTESIVRFPNITNLCPFGEVFNATRFASVYAWNRKRISNCVADYSVLYNSASFSTFKCYGVSPTKLNDLCFTNVYADSFVIRGDEVRQIAPGQTGKIADYNYKLPDDFTGCVIAWNSNNLDSKVGGNYNYLYRLFRKSNLKPFERDISTEIYQAGSTPCNGVEGFNCYFPLQSYGFQPTNGVGYQPYRVVVLSFELLHAPATVCGPKKSTNLVKNKCVNFNFNGLTGTGVLTESNKKFLPFQQFGRDIADTTDAVRDPQTLEILDITPCSFGGVSVITPGTNTSNQVAVLYQGVNCTEVPVAIHADQLTPTWRVYSTGSNVFQTRAGCLIGAEHVNNSYECDIPIGAGICASYQTQTNSPRRARSVASQSIIAYTMSLGAENSVAYSNNSIAIPTNFTISVTTEILPVSMTKTSVDCTMYICGDSTECSNLLLQYGSFCTQLNRALTGIAVEQDKNTQEVFAQVKQIYKTPPIKDFGGFNFSQILPDPSKPSKRSFIEDLLFNKVTLADAGFIKQYGDCLGDIAARDLICAQKFNGLTVLPPLLTDEMIAQYTSALLAGTITSGWTFGAGAALQIPFAMQMAYRFNGIGVTQNVLYENQKLIANQFNSAIGKIQDSLSSTATALGKLQDVVNQNAQALNTLVKCLSSNFGAISSVLNDILSRLDKVEAEVQIDRLITGRLQCLQTYVTQQLIRAAEIRASANLAATKMSECVLGQSKRVDFCGKGYHLMSFPQSAPHGVVFLHVTYVPAQEKNFTTAPAICHDGKAHFPREGVFVSNGTHWFVTQRNFYEPQIITTDNTFVSGNCDVVIGIVNNTVYDPLQPELDSFKEELDKYFKNHTSPDVDLGDISGINASVVNIQKEIDRLNEVAKNLNESLIDLQELGKYEQYIKGGGSGGGQIYEGKLTAEGLRFGIVASRFNHALVDRLVEGAIDAIVRHGGREEDITLVRVPGSWEIPVAAGELARKEDIDAVIAIGVLIRGATPHFDYIASEVSKGLADLSLELRKPITFGVITADTLEQAIERAGTKHGNKGWEAALSAIEMANLFKSLR

SEQ ID NO: 4320 - protein, 1371 aa, Artificial Sequence
  SARS-CoV-2/Belgium/BC-03016/2020__EPI_ISL_415157 spike protein (1-1211)(Q965C_S1003C) LumSynth construct
MFVFLVLLPLVSSQCVNLTTRTQLPPAYTNSFTRGVYYPDKVFRSSVLHSTQDLFLPFFSNVTWFHAIHVSGTNGTKRFDNPVLPFNDGVYFASTEKSNIIRGWIFGTTLDSKTQSLLIVNNATNVVIKVCEFQFCNDPFLGVYYHKNNKSWMESEFRVYSSANNCTFEYVSQPFLMDLEGKQGNFKNLREFVFKNIDGYFKIYSKHTPINLVRDLPQGFSALEPLVDLPIGINITRFQTLLALHRSYLTPGDSSSGWTAGAAAYYVGYLQPRTFLLKYNENGTITDAVDCALDPLSETKCTLKSFTVEKGIYQTSNFRVQPTESIVRFPNITNLCPFGEVFNATRFASVYAWNRKRISNCVADYSVLYNSASFSTFKCYGVSPTKLNDLCFTNVYADSFVIRGDEVRQIAPGQTGKIADYNYKLPDDFTGCVIAWNSNNLDSKVGGNYNYLYRLFRKSNLKPFERDISTEIYQAGSTPCNGVEGFNCYFPLQSYGFQPTNGVGYQPYRVVVLSFELLHAPATVCGPKKSTNLVKNKCVNFNFNGLTGTGVLTESNKKFLPFQQFGRDIADTTDAVRDPQTLEILDITPCSFGGVSVITPGTNTSNQVAVLYQGVNCTEVPVAIHADQLTPTWRVYSTGSNVFQTRAGCLIGAEHVNNSYECDIPIGAGICASYQTQTNSPRRARSVASQSIIAYTMSLGAENSVAYSNNSIAIPTNFTISVTTEILPVSMTKTSVDCTMYICGDSTECSNLLLQYGSFCTQLNRALTGIAVEQDKNTQEVFAQVKQIYKTPPIKDFGGFNFSQILPDPSKPSKRSFIEDLLFNKVTLADAGFIKQYGDCLGDIAARDLICAQKFNGLTVLPPLLTDEMIAQYTSALLAGTITSGWTFGAGAALQIPFAMQMAYRFNGIGVTQNVLYENQKLIANQFNSAIGKIQDSLSSTAPALGKLQDVVNQNAQALNTLVKCLSSNFGAISSVLNDILSRLDKVEAEVQIDRLITGRLQCLQTYVTQQLIRAAEIRASANLAATKMSECVLGQSKRVDFCGKGYHLMSFPQSAPHGVVFLHVTYVPAQEKNFTTAPAICHDGKAHFPREGVFVSNGTHWFVTQRNFYEPQIITTDNTFVSGNCDVVIGIVNNTVYDPLQPELDSFKEELDKYFKNHTSPDVDLGDISGINASVVNIQKEIDRLNEVAKNLNESLIDLQELGKYEQYIKGGGSGGGQIYEGKLTAEGLRFGIVASRFNHALVDRLVEGAIDAIVRHGGREEDITLVRVPGSWEIPVAAGELARKEDIDAVIAIGVLIRGATPHFDYIASEVSKGLADLSLELRKPITFGVITADTLEQAIERAGTKHGNKGWEAALSAIEMANLFKSLR

SEQ ID NO: 4321 - protein, 1371 aa, Artificial Sequence
  SARS-CoV-2/Germany/BavPat3/2020__EPI_ISL_414521 spike protein (1-1211)(Q965C_S1003C) LumSynth construct
MFVFLVLLPLVSSQCVNLTTRTQLPPAYTNSFTRGVYYPDKVFRSSVLHSTQDLFLPFFSNVTWFHAIHVSGTNGTKRFDNPVLPFNDGVYFASTEKSNIIRGWIFGTTLDSKTQSLLIVNNATNVVIKVCEFQFCNDPFLGVYYHKNNKSWMESEFRVYSSANNCTFEYVSQPFLMDLEGKQGNFKNLREFVFKNIDGYFKIYSKHTPINLVRDLPQGFSALEPLVDLPIGINITRFQTLLALHRSYLTPGDSSSGWTAGAAAYYVGYLQPRTFLLKYNENGTITDAVDCALDPLSETKCTLKSFTVEKGIYQTSNFRVQPTESIVRFPNITNLCPFGEVFNATRFASVYAWNRKRISNCVADYSVLYNSASFSTFKCYGVSPTKLNDLCFTNVYADSFVIRGDEVRQIAPGQTGKIADYNYKLPDDFTGCVIAWNSNNLDSKVGGNYNYLYRLFRKSNLKPFERDISTEIYQAGSTPCNGVEGFNCYFPLQSYGFQPTNGVGYQPYRVVVLSFELLHAPATVCGPKKSTNLVKNKCVNFNFNGLTGTGVLTESNKKFLPFQQFGRDIADTTDAVRDPQTLEILDITPCSFGGVSVITPGTNTSNQVAVLYQDVNCTEVPVAIHADQLTPTWRVYSTGSNVFQTRAGCLIGAEHVNNSYECDIPIGAGICASYQTQTNSPRRARSVASQSIIAYTMSLGAENSVAYSNNSIAIPTNFTISVTTEILPVSMTKTSVDCTMYICGDSTECSNLLLQYGSFCTQLNRALTGIAVEQDKNTQQVFAQVKQIYKTPPIKDFGGFNFSQILPDPSKPSKRSFIEDLLFNKVTLADAGFIKQYGDCLGDIAARDLICAQKFNGLTVLPPLLTDEMIAQYTSALLAGTITSGWTFGAGAALQIPFAMQMAYRFNGIGVTQNVLYENQKLIANQFNSAIGKIQDSLSSTASALGKLQDVVNQNAQALNTLVKCLSSNFGAISSVLNDILSRLDKVEAEVQIDRLITGRLQCLQTYVTQQLIRAAEIRASANLAATKMSECVLGQSKRVDFCGKGYHLMSFPQSAPHGVVFLHVTYVPAQEKNFTTAPAICHDGKAHFPREGVFVSNGTHWFVTQRNFYEPQIITTDNTFVSGNCDVVIGIVNNTVYDPLQPELDSFKEELDKYFKNHTSPDVDLGDISGINASVVNIQKEIDRLNEVAKNLNESLIDLQELGKYEQYIKGGGSGGGQIYEGKLTAEGLRFGIVASRFNHALVDRLVEGAIDAIVRHGGREEDITLVRVPGSWEIPVAAGELARKEDIDAVIAIGVLIRGATPHFDYIASEVSKGLADLSLELRKPITFGVITADTLEQAIERAGTKHGNKGWEAALSAIEMANLFKSLR

SEQ ID NO: 4322 - protein, 1371 aa, Artificial Sequence
  SARS-CoV-2/France/HF1805/2020__EPI_ISL_414628 spike protein (1-1211)(Q965C_S1003C) LumSynth construct
MFVFLVLLPLVSSQCVNLTTRTQLPPAYTNSFTRGVYYPDKVFRSSVLHSTQDLFLPFFSNVTWFHAIHVSGTNGTKRFDNPVLPFNDGVYFASTEKSNIIRGWIFGTTLDSKTQSLLIVNNATNVVIKVCEFQFCNDPFLGVYYHKNNKSWMESEFRVYSSANNCTFEYVSQPFLMDLEGKQGNFKNLREFVFKNIDGYFKIYSKHTPINLVRDLPQGFSALEPLVDLPIGINITRFQTLLALHRSYLTPGDSSSGWTAGAAAYYVGYLQPRTFLLKYNENGTITDAVDCALDPLSETKCTLKSFTVEKGIYQTSNFRVQPTESIVRFPNITNLCPFGEVFNATRFASVYAWNRKRISNCVADYSVLYNSASFSTFKCYGVSPTKLNDLCFTNVYADSFVIRGDEVRQIAPGQTGKIADYNYKLPDDFTGCVIAWNSNNLDSKVGGNYNYLYRLFRKSNLKPFERDISTEIYQAGSTPCNGVEGFNCYFPLQSYGFQPTNGVGYQPYRVVVLSFELLHAPATVCGPKKSTNLVKNKCVNFNFNGLTGTGVLTESNKKFLPFQQFGRDIADTTDAVRDPQTLEILDITPCSFGGVSVITPGTNTSNQVAVLYQGVNCTEVPVAIHADQLTPTWRVYSTGSNVFQTRAGCLIGAEHVNNSYECDIPIGAGICASYQTQTNSPRRARSVASQSIIAYTMSLGAENSVAYSNNSIAIPTNFTISVTTEILPVSMTKTSVDCTMYICGDSTECSNLLLQYGSFCTQLNRALTGIAVEQDKNTQEVFAQVKQIYKTPPIKDFGGFNFSQILPDPSKPSKRSFIEDLLFNKVTLADAGFIKQYGDCLGDIAARDLICAQKFNGLTVLPPLLTDEMIAQYTSALLAGTITSGWTFGAGAALQIPFAMQMAYRFNGIGVTQNVLYENQKLIANQFNSAIGKIQDSLSSTASALGKLQDVVNQNAQALNTLVKCLSSNFGAISSVLNDILSRLDKVEAEVQIDRLITGRLQCLQTYVTQQLIRAAEIRASANLAATKMSECVLGQSKRVDFCGKGYHLMSFPQSAPHGVVFLHVTYVPAQEKNFTTAPAICHDGKAHFPREGVFVSNGTHWFVTQRNFYEPQIITTDNTFVSGNCDVVIGVVNNTVYDPLQPELDSFKEELDKYFKNHTSPDVDLGDISGINASVVNIQKEIDRLNEVAKNLNESLIDLQELGKYEQYIKGGGSGGGQIYEGKLTAEGLRFGIVASRFNHALVDRLVEGAIDAIVRHGGREEDITLVRVPGSWEIPVAAGELARKEDIDAVIAIGVLIRGATPHFDYIASEVSKGLADLSLELRKPITFGVITADTLEQAIERAGTKHGNKGWEAALSAIEMANLFKSLR

SEQ ID NO: 4323 - protein, 1371 aa, Artificial Sequence
  SARS-CoV-2/Netherlands/ZuidHolland_9/2020__EPI_ISL_414445 spike protein (1-1211)(Q965C_S1003C) LumSynth construct
MFVFLVLLPLVSSQCVNLTTRTQLPPAYTNSFTRGVYYPDKVFRSSVLHSTQDLFLPFFSNVTWFHAIHVSGTNGTKRFDNPVLPFNDGVYFASTEKSNIIRGWIFGTTLDSKTQSLLIVNNATNVVIKVCEFQFCNDPFLGVYYHKNNKSWMESEFRVYSSANNCTFEYVSQPFLMDLEGKQGNFKNLREFVFKNIDGYFKIYSKHTPINLVRDLPQGFSALEPLVDLPIGINITRFQTLLALHRSYLTPGDSSSGWTAGAAAYYVGYLQPRTFLLKYNENGTITDAVDCALDPLSETKCTLKSFTVEKGIYQTSNFRVQPTESIVRFPNITNLCPFGEVFNATRFASVYAWNRKRISNCVADYSVLYNSASFSTFKCYGVSPTKLNDLCFTNVYADSFVIRGDEVRQIAPGQTGKIADYNYKLPDDFTGCVIAWNSNNLDSKVGGNYNYLYRLFRKSNLKPFERDISTEIYQAGSTPCNGVEGFNCYFPLQSYGFQPTNGVGYQPYRVVVLSFELLHAPATVCGPKKSTNLVKNKCVNFNFNGLTGTGVLTESNKKFLPFQQFGRDIADTTDAVRDPQTLEILDITPCSFGGVSVITPGTNTSNQVAVLYQGVNCTEVPVAIHADQLTPTWRVYSTGSNVFQTRAGCLIGAEHVNNSYECDIPIGAGICASYQTQTNSPRRARSVASQSIIAYTMSLGAENSVAYSNNSIAIPTNFTISVTTEILPVSMTKTSVDCTMYICGDSTECSNLLLQYGSFCTQLNRALTGIAVEQDKNTQEVFAQVKQIYKTPPIKDFGGFNFSQILPDPSKPSKRSFIEDLLFNKVTLADAGFIKQYGDCLGDIAARDLICVQKFNGLTVLPPLLTDEMIAQYTSALLAGTITSGWTFGAGAALQIPFAMQMAYRFNGIGVTQNVLYENQKLIANQFNSAIGKIQDSLSSTASALGKLQDVVNQNAQALNTLVKCLSSNFGAISSVLNDILSRLDKVEAEVQIDRLITGRLQCLQTYVTQQLIRAAEIRASANLAATKMSECVLGQSKRVDFCGKGYHLMSFPQSAPHGVVFLHVTYVPAQEKNFTTAPAICHDGKAHFPREGVFVSNGTHWFVTQRNFYEPQIITTDNTFVSGNCDVVIGIVNNTVYDPLQPELDSFKEELDKYFKNHTSPDVDLGDISGINASVVNIQKEIDRLNEVAKNLNESLIDLQELGKYEQYIKGGGSGGGQIYEGKLTAEGLRFGIVASRFNHALVDRLVEGAIDAIVRHGGREEDITLVRVPGSWEIPVAAGELARKEDIDAVIAIGVLIRGATPHFDYIASEVSKGLADLSLELRKPITFGVITADTLEQAIERAGTKHGNKGWEAALSAIEMANLFKSLR

SEQ ID NO: 4324 - protein, 1371 aa, Artificial Sequence
  SARS-CoV-2/Finland/FIN03032020A/2020__EPI_ISL_413602 spike protein (1-1211)(Q965C_S1003C) LumSynth construct
MFVFLVLLPLVSSQCVNLTTRTQLPPAYTNSFTRGVYYPDKVFRSSVLHSTQDLFLPFFSNVTWFHAIHVSGTNGTKRFDNPVLPFNDGVYFASTEKSNIIRGWIFGTTLDSKTQSLLIVNNATNVVIKVCEFQFCNDPFLGVYYHKNNKSWMESEFRVYSSANNCTFEYVSQPFLMDLEGKQGNFKNLREFVFKNIDGYFKIYSKHTPINLVRDLPQGFSALEPLVDLPIGINITRFQTLLALHRSYLTPGDSSSGWTAGAAAYYVGYLQPRTFLLKYNENGTITDAVDCALDPLSETKCTLKSFTVEKGIYQTSNFRVQPTESIVRFPNITNLCPFGEVFNATRFASVYAWNRKRISNCVADYSVLYNSASFSTFKCYGVSPTKLNDLCFTNVYADSFVIRGDEVRQIAPGQTGKIADYNYKLPDDFTGCVISWNSNNLDSKVGGNYNYLYRLFRKSNLKPFERDISTEIYQAGSTPCNGVEGFNCYFPLQSYGFQPTNGVGYQPYRVVVLSFELLHAPATVCGPKKSTNLVKNKCVNFNFNGLTGTGVLTESNKKFLPFQQFGRDIADTTDAVRDPQTLEILDITPCSFGGVSVITPGTNTSNQVAVLYQGVNCTEVPVAIHADQLTPTWRVYSTGSNVFQTRAGCLIGAEHVNNSYECDIPIGAGICASYQTQTNSPRRARSVASQSIIAYTMSLGAENSVAYSNNSIAIPTNFTISVTTEILPVSMTKTSVDCTMYICGDSTECSNLLLQYGSFCTQLNRALTGIAVEQDKNTQEVFAQVKQIYKTPPIKDFGGFNFSQILPDPSKPSKRSFIEDLLFNKVTLADAGFIKQYGDCLGDIAARDLICAQKFNGLTVLPPLLTDEMIAQYTSALLAGTITSGWTFGAGAALQIPFAMQMAYRFNGIGVTQNVLYENQKLIANQFNSAIGKIQDSLSSTASALGKLQDVVNQNAQALNTLVKCLSSNFGAISSVLNDILSRLDKVEAEVQIDRLITGRLQCLQTYVTQQLIRAAEIRASANLAATKMSECVLGQSKRVDFCGKGYHLMSFPQSAPHGVVFLHVTYVPAQEKNFTTAPAICHDGKAHFPREGVFVSNGTHWFVTQRNFYEPQIITTDNTFVSGNCDVVIGIVNNTVYDPLQPELDSFKEELDKYFKNHTSPDVDLGDISGINASVVNIQKEIDRLNEVAKNLNESLIDLQELGKYEQYIKGGGSGGGQIYEGKLTAEGLRFGIVASRFNHALVDRLVEGAIDAIVRHGGREEDITLVRVPGSWEIPVAAGELARKEDIDAVIAIGVLIRGATPHFDYIASEVSKGLADLSLELRKPITFGVITADTLEQAIERAGTKHGNKGWEAALSAIEMANLFKSLR

SEQ ID NO: 4325 - protein, 1371 aa, Artificial Sequence
  SARS-CoV-2/France/GE1977/2020__EPI_ISL_414632 spike protein (1-1211)(Q965C_S1003C) LumSynth construct
MFVFLVLLPLVSSQCVNLTTRTQLPPAYTNSFTRGVYYPDKVFRSSVLHSTQDLFLPFFSNVTWFHAIHVSGTNGTKRFDNPVLPFNDGVYFASTEKSNIIRGWIFGTTLDSKTQSLLIVNNATNVVIKVCEFQFCNDPFLGVYYHKNNKSWMESEFRVYSSANNCTFEYVSQPFLMDLEGKQGNFKNLREFVFKNIDGYFKIYSKHTPINLVRDLPQGFSALEPLVDLPIGINITRFQTLLALHRSYLTPGDSSSGWTAGAAAYYVGYLQPRTFLLKYNENGTITDAVDCALDPLSETKCTLKSFTVEKGIYQTSNFRVQPTESIVRFPNITNLCPFGEVFNATRFASVYAWNRKRISNCVADYSVLYNSASFSTFKCYGVSPTKLNDLCFTNVYADSFVIRGDEVRQIAPGQTGKIADYNYKLPDDFTGCVIAWNSNNLDSKVGGNYNYLYRLFRKSNLKPFERDISTEIYQAGSTPCNGVEGFNCYFPLQSYGFQPTNGVGYQPYRVVVLSFELLHAPATVCGPKKSTNLVKNKCVNFNFNGLTGTGVLTESNKKFLPFQQFGRDIADTTDAVRDPQTLEILDITPCSFGGVSVITPGTNTSNQVAVLYQGVNCTEVPVAIHADQLTPTWRVYSTGSNVFQTRAGCLIGAEHVNNSYECDIPIGAGICASYQTQTNSPRRARSVASQSIIAYTMSLGAENSVAYSNNSIAIPTNFTISVTTEILPVSMTKTSVDCTMYICGDSTECSNLLLQYGSFCTQLNRALTGIAVEQDKNTQEVFAQVKQIYKTPPIKDFGGFNFSQILPDPSKPSKRSFIEDLLFNKVTLADAGFIKQYGDCLGDIAARDLICAQKFNGLTVLPPLLTDEMIAQYTSALLAGTITSGWTFGAGAALQIPFAMQMAYRFNGIGVTQNVLYENQKLIANQFNSAIGKIQDSLFSTASALGKLQDVVNQNAQALNTLVKCLSSNFGAISSVLNDILSRLDKVEAEVQIDRLITGRLQCLQTYVTQQLIRAAEIRASANLAATKMSECVLGQSKRVDFCGKGYHLMSFPQSAPHGVVFLHVTYVPAQEKNFTTAPAICHDGKAHFPREGVFVSNGTHWFVTQRNFYEPQIITTDNTFVSGNCDVVIGIVNNTVYDPLQPELDSFKEELDKYFKNHTSPDVDLGDISGINASVVNIQKEIDRLNEVAKNLNESLIDLQELGKYEQYIKGGGSGGGQIYEGKLTAEGLRFGIVASRFNHALVDRLVEGAIDAIVRHGGREEDITLVRVPGSWEIPVAAGELARKEDIDAVIAIGVLIRGATPHFDYIASEVSKGLADLSLELRKPITFGVITADTLEQAIERAGTKHGNKGWEAALSAIEMANLFKSLR

SEQ ID NO: 4326 - protein, 1371 aa, Artificial Sequence
  SARS-CoV-2/Finland/FIN-313/2020__EPI_ISL_414641 spike protein (1-1211)(Q965C_S1003C) LumSynth construct
MFVFLVLLPLVSSQCVNLTTRTQLPPAYTNSFTRGVYYPDKVFRSSVLHSTQDLFLPFFSNVTWFHAIHVSGTNGTKRFDNPVLPFNDGVYFASTEKSNIIRGWIFGTTLDSKTQSLLIVNNATNVVIKVCEFQFCNDPFLGVYYHKNNKSWMESEFRVYSSANNCTFEYVSQPFLMDLEGKQGNFKNLREFVFKNIDGYFKIYSKHTPINLVRDLPQGFSALEPLVDLPIGINITRFKTLLALHRSYLTPGDSSSGWTAGAAAYYVGYLQPRTFLLKYNENGTITDAVDCALDPLSETKCTLKSFTVEKGIYQTSNFRVQPTESIVRFPNITNLCPFGEVFNATRFASVYAWNRKRISNCVADYSVLYNSASFSTFKCYGVSPTKLNDLCFTNVYADSFVIRGDEVRQIAPGQTGKIADYNYKLPDDFTGCVIAWNSNNLDSKVGGNYNYLYRLFRKSNLKPFERDISTEIYQAGSTPCNGVEGFNCYFPLQSYGFQPTNGVGYQPYRVVVLSFELLHAPATVCGPKKSTNLVKNKCVNFNFNGLTGTGVLTESNKKFLPFQQFGRDIADTTDAVRDPQTLEILDITPCSFGGVSVITPGTNTSNQVAVLYQGVNCTEVPVAIHADQLTPTWRVYSTGSNVFQTRAGCLIGAEHVNNSYECDIPIGAGICASYQTQTNSPRRARSVASQSIIAYTMSLGAENSVAYSNNSIAIPTNFTISVTTEILPVSMTKTSVDCTMYICGDSTECSNLLLQYGSFCTQLNRALTGIAVEQDKNTQEVFAQVKQIYKTPPIKDFGGFNFSQILPDPSKPSKRSFIEDLLFNKVTLADAGFIKQYGDCLGDIAARDLICAQKFNGLTVLPPLLTDEMIAQYTSALLAGTITSGWTFGAGAALQIPFAMQMAYRFNGIGVTQNVLYENQKLIANQFNSAIGKIQDSLSSTASALGKLQDVVNQNAQALNTLVKCLSSNFGAISSVLNDILSRLDKVEAEVQIDRLITGRLQCLQTYVTQQLIRAAEIRASANLAATKMSECVLGQSKRVDFCGKGYHLMSFPQSAPHGVVFLHVTYVPAQEKNFTTAPAICHDGKAHFPREGVFVSNGTHWFVTQRNFYEPQIITTDNTFVSGNCDVVIGIVNNTVYDPLQPELDSFKEELDKYFKNHTSPDVDLGDISGINASVVNIQKEIDRLNEVAKNLNESLIDLQELGKYEQYIKGGGSGGGQIYEGKLTAEGLRFGIVASRFNHALVDRLVEGAIDAIVRHGGREEDITLVRVPGSWEIPVAAGELARKEDIDAVIAIGVLIRGATPHFDYIASEVSKGLADLSLELRKPITFGVITADTLEQAIERAGTKHGNKGWEAALSAIEMANLFKSLR

SEQ ID NO: 4327 - protein, 1371 aa, Artificial Sequence
  SARS-CoV-2/Netherlands/ZuidHolland_2/2020__EPI_ISL_414556 spike protein (1-1211)(Q965C_S1003C) LumSynth construct
MFVFLVLLPLVSSQCVNLTTRTQLPPAYTNSFTRGVYYPDKVFRSSVLHSTQDLFLPFFSNVTWFHAIHVSGTNGTKRFDNPVLPFNDGVYFASTEKSNIIRGWIFGTTLDSKTQSLLIVNNATNVVIKVCEFQFCNDPFLGVYYHKNNKSWMESEFRVYSSANNCTFEYVSQPFLMDLEGKQGNFKNLREFVFKNIDGYFKIYSKHTPINLVRDLPQGFSALEPLVDLPIGINITRFQTLLALHRSYLTPGDSSSGWTAGAAAYYVGYLQPRTFLLKYNENGTITDAVDCALDPLSETKCTLKSFTVEKGIYQTSNFRVQPTESIVRFPNITNLCPFGEVFNATRFASVYAWNRKRISNCVADYSVLYNSASFSTFKCYGVSPTKLNDLCFTNVYADSFVIRGDEVRQIAPGQTGKIADYNYKLPDDFTGCVIAWNSNNLDSKVGGNYNYLYRLFRKSNLKPFERDISTEIYQAGSTPCNGVEGFNCYFPLQSYGFQPTNGVGYQPYRVVVLSFELLHAPATVCGPKKSTNLVKNKCVNFNFNGLTGTGVLTESNKKFLPFQQFGRDIADTTDAVRDPQTLEILDITPCSFGGVSVITPGTNTSNQVAVLYQGVNCTEVPVAIHADQLTPTWRVYSTGSNVFQTRAGCLIGAEHVNNSYECDIPIGAGICASYQTQTNSPRRARSVASQSIIAYTMSLGAENSVAYSNNSIAIPTNFTISVTTEILPVSMTKTSVDCTMYICGDSTECSNLLLQYGSFCTQLNRALTGIALEQDKNTQEVFAQVKQIYKTPPIKDFGGFNFSQILPDPSKPSKRSFIEDLLFNKVTLADAGFIKQYGDCLGDIAARDLICAQKFNGLTVLPPLLTDEMIAQYTSALLAGTITSGWTFGAGAALQIPFAMQMAYRFNGIGVTQNVLYENQKLIANQFNSAIGKIQDSLSSTASALGKLQDVVNQNAQALNTLVKCLSSNFGAISSVLNDILSRLDKVEAEVQIDRLITGRLQCLQTYVTQQLIRAAEIRASANLAATKMSECVLGQSKRVDFCGKGYHLMSFPQSAPHGVVFLHVTYVPAQEKNFTTAPAICHDGKAHFPREGVFVSNGTHWFVTQRNFYEPQIITTDNTFVSGNCDVVIGIVNNTVYDPLQPELDSFKEELDKYFKNHTSPDVDLGDISGINASVVNIQKEIDRLNEVAKNLNESLIDLQELGKYEQYIKGGGSGGGQIYEGKLTAEGLRFGIVASRFNHALVDRLVEGAIDAIVRHGGREEDITLVRVPGSWEIPVAAGELARKEDIDAVIAIGVLIRGATPHFDYIASEVSKGLADLSLELRKPITFGVITADTLEQAIERAGTKHGNKGWEAALSAIEMANLFKSLR

SEQ ID NO: 4328 - protein, 1371 aa, Artificial Sequence
  SARS-CoV-2/USA/WA-UW31/2020__EPI_ISL_414618 spike protein (1-1211)(Q965C_S1003C) LumSynth construct
MFVFLVLLPLVSSQCVNLTTRTQLPPAYTNSFTRGVYYPDKVFRSSVLHSTQDLFLPFFSNVTWFHAIHVSGTNGTKRFDNPVLPFNDGVYFASTEKSNIIRGWIFGTTLDSKTQSLLIVNNATNVVIKVCEFQFCNDPFLGVYYHKNNKSWMESEFRVYSSANNCTFEYVSQPFLMDLEGKQGNFKNLREFVFKNIDGYFKIYSKHTPINLVRDLPQGFSALEPLVDLPIGINITRFQTLLALHRSYLTPGDSSSGWTAGAAAYYVGYLQPRTFLLKYNENGTITDAVDCALDPLSETKCTLKSFTVEKGIYQTSNFRVQPTESIVRFPNITNLCPFGEVFNATRFASVYAWNRKRISNCVADYSVLYNSASFSTFKCYGVSPTKLNDLCFTNVYADSFVIRGDEVRQIAPGQTGKIADYNYKLPDDFTGCVIAWNSNNLDSKVGGNYNYLYRLFRKSNLKPFERDISTEIYQAGSTPCNGAEGFNCYFPLQSYGFQPTNGVGYQPYRVVVLSFELLHAPATVCGPKKSTNLVKNKCVNFNFNGLTGTGVLTESNKKFLPFQQFGRDIADTTDAVRDPQTLEILDITPCSFGGVSVITPGTNTSNQVAVLYQDVNCTEVPVAIHADQLTPTWRVYSTGSNVFQTRAGCLIGAEHVNNSYECDIPIGAGICASYQTQTNSPRRARSVASQSIIAYTMSLGAENSVAYSNNSIAIPTNFTISVTTEILPVSMTKTSVDCTMYICGDSTECSNLLLQYGSFCTQLNRALTGIAVEQDKNTQEVFAQVKQIYKTPPIKDFGGFNFSQILPDPSKPSKRSFIEDLLFNKVTLADAGFIKQYGDCLGDIAARDLICAQKFNGLTVLPPLLTDEMIAQYTSALLAGTITSGWTFGAGAALQIPFAMQMAYRFNGIGVTQNVLYENQKLIANQFNSAIGKIQDSLSSTASALGKLQDVVNQNAQALNTLVKCLSSNFGAISSVLNDILSRLDKVEAEVQIDRLITGRLQCLQTYVTQQLIRAAEIRASANLAATKMSECVLGQSKRVDFCGKGYHLMSFPQSAPHGVVFLHVTYVPAQEKNFTTAPAICHDGKAHFPREGVFVSNGTHWFVTQRNFYEPQIITTDNTFVSGNCDVVIGIVNNTVYDPLQPELDSFKEELDKYFKNHTSPDVDLGDISGINASVVNIQKEIDRLNEVAKNLNESLIDLQELGKYEQYIKGGGSGGGQIYEGKLTAEGLRFGIVASRFNHALVDRLVEGAIDAIVRHGGREEDITLVRVPGSWEIPVAAGELARKEDIDAVIAIGVLIRGATPHFDYIASEVSKGLADLSLELRKPITFGVITADTLEQAIERAGTKHGNKGWEAALSAIEMANLFKSLR

SEQ ID NO: 4329 - protein, 1371 aa, Artificial Sequence
  SARS-CoV-2/South Korea/SNU01/2020__EPI_ISL_411929 spike protein (1-1211)(Q965C_S1003C) LumSynth construct
MFVFLVLLPLVSSQCVNLTTRTQLPPAYTNSFTRGVYYPDKVFRSSVLHSTQDLFLPFFSNVTWFHAIHVSGTNGTKRFDNPVLPFNDGVYFASTEKSNIIRGWIFGTTLDSKTQSLLIVNNATNVVIKVCEFQFCNDPFLGVYYHKNNKSWMESEFRVYSSANNCTFEYVSQPFLMDLEGKQGNFKNLREFVFKNIDGYFKIYSKHTPINLVRDLPQGFWALEPLVDLPIGINITRFQTLLALHRSYLTPGDSSSGWTAGAAAYYVGYLQPRTFLLKYNENGTITDAVDCALDPLSETKCTLKSFTVEKGIYQTSNFRVQPTESIVRFPNITNLCPFGEVFNATRFASVYAWNRKRISNCVADYSVLYNSASFSTFKCYGVSPTKLNDLCFTNVYADSFVIRGDEVRQIAPGQTGKIADYNYKLPDDFTGCVIAWNSNNLDSKVGGNYNYLYRLFRKSNLKPFERDISTEIYQAGSTPCNGVEGFNCYFPLQSYGFQPTNGVGYQPYRVVVLSFELLHAPATVCGPKKSTNLVKNKCVNFNFNGLTGTGVLTESNKKFLPFQQFGRDIADTTDAVRDPQTLEILDITPCSFGGVSVITPGTNTSNQVAVLYQDVNCTEVPVAIHADQLTPTWRVYSTGSNVFQTRAGCLIGAEHVNNSYECDIPIGAGICASYQTQTNSPRRARSVASQSIIAYTMSLGAENSVAYSNNSIAIPTNFTISVTTEILPVSMTKTSVDCTMYICGDSTECSNLLLQYGSFCTQLNRALTGIAVEQDKNTQEVFAQVKQIYKTPPIKDFGGFNFSQILPDPSKPSKRSFIEDLLFNKVTLADAGFIKQYGDCLGDIAARDLICAQKFNGLTVLPPLLTDEMIAQYTSALLAGTITSGWTFGAGAALQIPFAMQMAYRFNGIGVTQNVLYENQKLIANQFNSAIGKIQDSLSSTASALGKLQDVVNQNAQALNTLVKCLSSNFGAISSVLNDILSRLDKVEAEVQIDRLITGRLQCLQTYVTQQLIRAAEIRASANLAATKMSECVLGQSKRVDFCGKGYHLMSFPQSAPHGVVFLHVTYVPAQEKNFTTAPAICHDGKAHFPREGVFVSNGTHWFVTQRNFYEPQIITTDNTFVSGNCDVVIGIVNNTVYDPLQPELDSFKEELDKYFKNHTSPDVDLGDISGINASVVNIQKEIDRLNEVAKNLNESLIDLQELGKYEQYIKGGGSGGGQIYEGKLTAEGLRFGIVASRFNHALVDRLVEGAIDAIVRHGGREEDITLVRVPGSWEIPVAAGELARKEDIDAVIAIGVLIRGATPHFDYIASEVSKGLADLSLELRKPITFGVITADTLEQAIERAGTKHGNKGWEAALSAIEMANLFKSLR

SEQ ID NO: 4330 - protein, 1371 aa, Artificial Sequence
  SARS-CoV-2/China/WF0004/2020__EPI_ISL_413694 spike protein (1-1211)(Q965C_S1003C) LumSynth construct
MFVFLVLLPLVSSQCVNLTTRTQLPPAYTNSFTRGVYYPDKVFRSSVLHSTQDLFLPFFSNVTWFHAIHVSGTNGTKRFDNPVLPFNDGVYFASTEKSNIIRGWIFGTTLDSKTQSLLIVNNATNVVIKVCEFQFCNDPFLGVYYHKNNKSWTESEFRVYSSANNCTFEYVSQPFLMDLEGKQGNFKNLREFVFKNIDGYFKIYSKHTPINLVRDLPQGFSALEPLVDLPIGINITRFQTLLALHRSYLTPGDSSSGWTAGAAAYYVGYLQPRTFLLKYNENGTITDAVDCALDPLSETKCTLKSFTVEKGIYQTSNFRVQPTESIVRFPNITNLCPFGEVFNATRFASVYAWNRKRISNCVADYSVLYNSASFSTFKCYGVSPTKLNDLCFTNVYADSFVIRGDEVRQIAPGQTGKIADYNYKLPDDFTGCVIAWNSNNLDSKVGGNYNYLYRLFRKSNLKPFERDISTEIYQAGSTPCNGVEGFNCYFPLQSYGFQPTNGVGYQPYRVVVLSFELLHAPATVCGPKKSTNLVKNKCVNFNFNGLTGTGVLTESNKKFLPFQQFGRDIADTTDAVRDPQTLEILDITPCSFGGVSVITPGTNTSNQVAVLYQDVNCTEVPVAIHADQLTPTWRVYSTGSNVFQTRAGCLIGAEHVNNSYECDIPIGAGICASYQTQTNSPRRARSVASQSIIAYTMSLGAENSVAYSNNSIAIPTNFTISVTTEILPVSMTKTSVDCTMYICGDSTECSNLLLQYGSFCTQLNRALTGIAVEQDKNTQEVFAQVKQIYKTPPIKDFGGFNFSQILPDPSKPSKRSFIEDLLFNKVTLADAGFIKQYGDCLGDIAARDLICAQKFNGLTVLPPLLTDEMIAQYTSALLAGTITSGWTFGAGAALQIPFAMQMAYRFNGIGVTQNVLYENQKLIANQFNSAIGKIQDSLSSTASALGKLQDVVNQNAQALNTLVKCLSSNFGAISSVLNDILSRLDKVEAEVQIDRLITGRLQCLQTYVTQQLIRAAEIRASANLAATKMSECVLGQSKRFDFCGKGYHLMSFPQSAPHGVVFLHVTYVPAQEKNFTTAPAICHDGKAHFPREGVFVSNGTHWFVTQRNFYEPQIITTDNTFVSGNCDVVIGIVNNTVYDPLQPELDSFKEELDKYFKNHTSPDVDLGDISGINASVVNIQKEIDRLNEVAKNLNESLIDLQELGKYEQYIKGGGSGGGQIYEGKLTAEGLRFGIVASRFNHALVDRLVEGAIDAIVRHGGREEDITLVRVPGSWEIPVAAGELARKEDIDAVIAIGVLIRGATPHFDYIASEVSKGLADLSLELRKPITFGVITADTLEQAIERAGTKHGNKGWEAALSAIEMANLFKSLR

SEQ ID NO: 4331 - protein, 1371 aa, Artificial Sequence
  SARS-CoV-2/China/WF0028/2020__EPI_ISL_413791 spike protein (1-1211)(Q965C_S1003C) LumSynth construct
MFVFLVLLPLVSSQCVNLTTRTQLPPAYTNSFTRGVYYPDKVFRSSVLHSTQDLFLPFFSNVTWFHAIHVSGTNGTKRFDNPVLPFNDGVYFASTEKSNIIRGWIFGTTLDSKTQSLLIVNNATNVVIKVCEFQFCNDPFLGVYYHKNNKSWMESEFRVYSSANNCTFEYVSQPFLMDLEGKQGNFKNLREFVFKNIDGYFKIYSKHTPINLVRDLPQGFSALEPLVDLPIGINITRFQTLLALHRSYLTPGDSSSGWTAGAAAYYVGYLQPRTFLLKYNENGTITDAVDCALDPLSETKCTLKSFTVEKGIYQTSNFRVQPTESIVRFPNITNLCPFGEVFNATRFASVYAWNRKRISNCVADYSVLYNSASFSTFKCYGVSPTKLNDLCFTNVYADSFVIRGDEVRQIAPGQTGKIADYNYKLPDDFTGCVIAWNSNNLDSKVGGNYNYLYRLFRKSNLKPFERDISTEIYQAGSTPCNGVEGFNCYFPLQSYGFQPTNGVGYQPYRVVVLSFELLHAPATVCGPKKSTNLVKNKCVNFNFNGLTGTGVLTESNKKFLPFQQFGRDIADTTDAVRDPQTLEILDITPCSFGGVSVITPGTNTSNQVAVLYQDVNCTEVPVAIHADQLTPTWRVYSTGSNVFQTRAGCLIGAEHVNNSYECDIPIGAGICASYQTQTNSPRRARSVASQSIIAYTMSLGAENSVAYSNNSIAIPTNFTISVTTEILPVSMTKTSVDCTMYICGDSTECSNLLLQYGSFCTQLNRALTGIAVEQDKNTQEVFAQVKQIYKTPPIKDFGGFNFSQILPDPSKPSKRSFIEDLLFNKVTLADAGFIKQYGDCLGDIAARDLICAQKFNGLTVLPPLLTDEMIAQYTSALLAGTITSGWTFGAGAALQIPFAMQMAYRFNGIGVTQNVLYENQKLIANQFNSAIGKIQDSLSSTASALGKLQDVVNQNAQALNTLVKCLSSNFGAISSVLNDILSRLDKVEAEVQIDRLITGRLQCLQTYVTQQLIRAAEIRASANLAATKMSECVLGQSKRVDFCGKGYHLMSFPQSAPHGVVFLHVTYVPAQEKNFTTAPAICHDGKAHFPREGVFVSNGTHWFVTQRNFYEPQIITTDNTFVSGNCDVVIGIVNNTVYDPLQPELESFKEELDKYFKNHTSPDVDLGDISGINASVVNIQKEIDRLNEVAKNLNESLIDLQELGKYEQYIKGGGSGGGQIYEGKLTAEGLRFGIVASRFNHALVDRLVEGAIDAIVRHGGREEDITLVRVPGSWEIPVAAGELARKEDIDAVIAIGVLIRGATPHFDYIASEVSKGLADLSLELRKPITFGVITADTLEQAIERAGTKHGNKGWEAALSAIEMANLFKSLR

SEQ ID NO: 4332 - protein, 1371 aa, Artificial Sequence
  SARS-CoV-2/2019-nCoV/USA-CruiseA-18/2020__MT159716.1 spike protein (1-1211)(Q965C_S1003C) LumSynth construct
MFVFLVLLPLVSSQCVNLTTRTQLPPAYTNSFTRGVYYPDKVFRSSVLHSTQDLFLPFFSNVTWFHAIHVSGTNGTKRFDNPVLPFNDGVYFASTEKSNIIRGWIFGTTLDSKTQSLLIVNNATNVVIKVCEFQFCNDPFLGVYYHKNNKSWMESELRVYSSANNCTFEYVSQPFLMDLEGKQGNFKNLREFVFKNIDGYFKIYSKHTPINLVRDLPQGFSALEPLVDLPIGINITRFQTLLALHRSYLTPGDSSSGWTAGAAAYYVGYLQPRTFLLKYNENGTITDAVDCALDPLSETKCTLKSFTVEKGIYQTSNFRVQPTESIVRFPNITNLCPFGEVFNATRFASVYAWNRKRISNCVADYSVLYNSASFSTFKCYGVSPTKLNDLCFTNVYADSFVIRGDEVRQIAPGQTGKIADYNYKLPDDFTGCVIAWNSNNLDSKVGGNYNYLYRLFRKSNLKPFERDISTEIYQAGSTPCNGVEGFNCYFPLQSYGFQPTNGVGYQPYRVVVLSFELLHAPATVCGPKKSTNLVKNKCVNFNFNGLTGTGVLTESNKKFLPFQQFGRDIADTTDAVRDPQTLEILDITPCSFGGVSVITPGTNTSNQVAVLYQDVNCTEVPVAIHADQLTPTWRVYSTGSNVFQTRAGCLIGAEHVNNSYECDIPIGAGICASYQTQTNSPRRARSVASQSIIAYTMSLGAENSVAYSNNSIAIPTNFTISVTTEILPVSMTKTSVDCTMYICGDSTECSNLLLQYGSFCTQLNRALTGIAVEQDKNTQEVFAQVKQIYKTPPIKDFGGFNFSQILPDPSKPSKRSFIEDLLFNKVTLADAGFIKQYGDCLGDIAARDLICAQKFNGLTVLPPLLTDEMIAQYTSALLAGTITSGWTFGAGAALQIPFAMQMAYRFNGIGVTQNVLYENQKLIANQFNSAIGKIQDSLSSTASALGKLQDVVNQNAQALNTLVKCLSSNFGAISSVLNDILSRLDKVEAEVQIDRLITGRLQCLQTYVTQQLIRAAEIRASANLAATKMSECVLGQSKRVDFCGKGYHLMSFPQSAPHGVVFLHVTYVPAQEKNFTTAPAICHDGKAHFPREGVFVSNGTHWFVTQRNFYEPQIITTDNTFVSGNCDVVIGIVNNTVYDPLQPELDSFKEELDKYFKNHTSPDVDLGDISGINASVVNIQKEIDRLNEVAKNLNESLIDLQELGKYEQYIKGGGSGGGQIYEGKLTAEGLRFGIVASRFNHALVDRLVEGAIDAIVRHGGREEDITLVRVPGSWEIPVAAGELARKEDIDAVIAIGVLIRGATPHFDYIASEVSKGLADLSLELRKPITFGVITADTLEQAIERAGTKHGNKGWEAALSAIEMANLFKSLR

SEQ ID NO: 4333 - protein, 1371 aa, Artificial Sequence
  SARS-CoV-2/SARS-CoV-2/Yunnan-01/human/2020/CHN__MT049951.1 spike protein (1-1211)(Q965C_S1003C) LumSynth construct
MFVFLVLLPLVSSQCVNLTTRTQLPPANTNSFTRGVYYPDKVFRSSVLHSTQDLFLPFFSNVTWFHAIHVSGTNGTKRFDNPVLPFNDGVYFASTEKSNIIRGWIFGTTLDSKTQSLLIVNNATNVVIKVCEFQFCNDPFLGVYYHKNNKSWMESEFRVYSSANNCTFEYVSQPFLMDLEGKQGNFKNLREFVFKNIDGYFKIYSKHTPINLVRDLPQGFSALEPLVDLPIGINITRFQTLLALHRSYLTPGDSSSGWTAGAAAYYVGYLQPRTFLLKYNENGTITDAVDCALDPLSETKCTLKSFTVEKGIYQTSNFRVQPTESIVRFPNITNLCPFGEVFNATRFASVYAWNRKRISNCVADYSVLYNSASFSTFKCYGVSPTKLNDLCFTNVYADSFVIRGDEVRQIAPGQTGKIADYNYKLPDDFTGCVIAWNSNNLDSKVGGNYNYLYRLFRKSNLKPFERDISTEIYQAGSTPCNGVEGFNCYFPLQSYGFQPTNGVGYQPYRVVVLSFELLHAPATVCGPKKSTNLVKNKCVNFNFNGLTGTGVLTESNKKFLPFQQFGRDIADTTDAVRDPQTLEILDITPCSFGGVSVITPGTNTSNQVAVLYQDVNCTEVPVAIHADQLTPTWRVYSTGSNVFQTRAGCLIGAEHVNNSYECDIPIGAGICASYQTQTNSPRRARSVASQSIIAYTMSLGAENSVAYSNNSIAIPTNFTISVTTEILPVSMTKTSVDCTMYICGDSTECSNLLLQYGSFCTQLNRALTGIAVEQDKNTQEVFAQVKQIYKTPPIKDFGGFNFSQILPDPSKPSKRSFIEDLLFNKVTLADAGFIKQYGDCLGDIAARDLICAQKFNGLTVLPPLLTDEMIAQYTSALLAGTITSGWTFGAGAALQIPFAMQMAYRFNGIGVTQNVLYENQKLIANQFNSAIGKIQDSLSSTASALGKLQDVVNQNAQALNTLVKCLSSNFGAISSVLNDILSRLDKVEAEVQIDRLITGRLQCLQTYVTQQLIRAAEIRASANLAATKMSECVLGQSKRVDFCGKGYHLMSFPQSAPHGVVFLHVTYVPAQEKNFTTAPAICHDGKAHFPREGVFVSNGTHWFVTQRNFYEPQIITTDNTFVSGNCDVVIGIVNNTVYDPLQPELDSFKEELDKYFKNHTSPDVDLGDISGINASVVNIQKEIDRLNEVAKNLNESLIDLQELGKYEQYIKGGGSGGGQIYEGKLTAEGLRFGIVASRFNHALVDRLVEGAIDAIVRHGGREEDITLVRVPGSWEIPVAAGELARKEDIDAVIAIGVLIRGATPHFDYIASEVSKGLADLSLELRKPITFGVITADTLEQAIERAGTKHGNKGWEAALSAIEMANLFKSLR

SEQ ID NO: 4334 - protein, 1371 aa, Artificial Sequence
  SARS-CoV-2/USA/WA-UW292/2020__EPI_ISL_418077 spike protein (1-1211)(Q965C_S1003C) LumSynth construct
MFVFLVLLPLVSSQCVNLTTRTQLPPAYTNSFTRGVYYPDKVFRSSVLHSTQDLFLPFFSNVTWFHAIHVSGTNGTKRFDNPVLPFNDGVYFASTEKSNIIRGWIFGTTLDSKTQSLLIVNNATNVVIKVCEFQFCNDPFLGVYYHKNNKSWMESEFRVYSSANNCTFEYVSQPFLMDLEGKQGNFKNLREFVFKNIDGYFKIYSKHTPINLVRDLPQGFSALEPLVDLPIGINITRFQTLLALHRSYLTPGDSSSGWTAGAAAYYVGYLQPRTFLLKYNENGTITDAVDCALDPLSETKCTLKSFTVEKGIYQTSNFRVQPTESIVRFPNITNLCPFGEVFNATRFASVYAWNRKRISNCVADYSVLYNSASFSTFKCYGVSPTKLNDLCFTNVYADSFVIRGDEVRQIAPGQTGKIADYNYKLPDDFTGCVIAWNSNNLDSKVGGNYNYLYRLFRKSNLKPFERDISTEIYQASSTPCNGVEGFNCYFPLQSYGFQPTNGVGYQPYRVVVLSFELLHAPATVCGPKKSTNLVKNKCVNFNFNGLTGTGVLTESNKKFLPFQQFGRDIADTTDAVRDPQTLEILDITPCSFGGVSVITPGTNTSNQVAVLYQDVNCTEVPVAIHADQLTPTWRVYSTGSNVFQTRAGCLIGAEHVNNSYECDIPIGAGICASYQTQTNSPRRARSVASQSIIAYTMSLGAENSVAYSNNSIAIPTNFTISVTTEILPVSMTKTSVDCTMYICGDSTECSNLLLQYGSFCTQLNRALTGIAVEQDKNTQEVFAQVKQIYKTPPIKDFGGFNFSQILPDPSKPSKRSFIEDLLFNKVTLADAGFIKQYGDCLGDIAARDLICAQKFNGLTVLPPLLTDEMIAQYTSALLAGTITSGWTFGAGAALQIPFAMQMAYRFNGIGVTQNVLYENQKLIANQFNSAIGKIQDSLSSTASALGKLQDVVNQNAQALNTLVKCLSSNFGAISSVLNDILSRLDKVEAEVQIDRLITGRLQCLQTYVTQQLIRAAEIRASANLAATKMSECVLGQSKRVDFCGKGYHLMSFPQSAPHGVVFLHVTYVPAQEKNFTTAPAICHDGKAHFPREGVFVSNGTHWFVTQRNFYEPQIITTDNTFVSGNCDVVIGIVNNTVYDPLQPELDSFKEELDKYFKNHTSPDVDLGDISGINASVVNIQKEIDRLNEVAKNLNESLIDLQELGKYEQYIKGGGSGGGQIYEGKLTAEGLRFGIVASRFNHALVDRLVEGAIDAIVRHGGREEDITLVRVPGSWEIPVAAGELARKEDIDAVIAIGVLIRGATPHFDYIASEVSKGLADLSLELRKPITFGVITADTLEQAIERAGTKHGNKGWEAALSAIEMANLFKSLR

SEQ ID NO: 4335 - protein, 1371 aa, Artificial Sequence
  SARS-CoV-2/Iceland/192/2020__EPI_ISL_417819 spike protein (1-1211)(Q965C_S1003C) LumSynth construct
MFVFFVLLPLVSSQCVNLTTRTQLPPAYTNSFTRGVYYPDKVFRSSVLHSTQDLFLPFFSNVTWFHAIHVSGTNGTKRFDNPVLPFNDGVYFASTEKSNIIRGWIFGTTLDSKTQSLLIVNNATNVVIKVCEFQFCNDPFLGVYYHKNNKSWMESEFRVYSSANNCTFEYVSQPFLMDLEGKQGNFKNLREFVFKNIDGYFKIYSKHTPINLVRDLPQGFSALEPLVDLPIGINITRFQTLLALHRSYLTPGDSSSGWTAGAAAYYVGYLQPRTFLLKYNENGTITDAVDCALDPLSETKCTLKSFTVEKGIYQTSNFRVQPTESIVRFPNITNLCPFGEVFNATRFASVYAWNRKRISNCVADYSVLYNSASFSTFKCYGVSPTKLNDLCFTNVYADSFVIRGDEVRQIAPGQTGKIADYNYKLPDDFTGCVIAWNSNNLDSKVGGNYNYLYRLFRKSNLKPFERDISTEIYQAGSTPCNGVEGFNCYFPLQSYGFQPTNGVGYQPYRVVVLSFELLHAPATVCGPKKSTNLVKNKCVNFNFNGLTGTGVLTESNKKFLPFQQFGRDIADTTDAVRDPQTLEILDITPCSFGGVSVITPGTNTSNQVAVLYQGVNCTEVPVAIHADQLTPTWRVYSTGSNVFQTRAGCLIGAEHVNNSYECDIPIGAGICASYQTQTNSPRRARSVASQSIIAYTMSLGAENSVAYSNNSIAIPTNFTISVTTEILPVSMTKTSVDCTMYICGDSTECSNLLLQYGSFCTQLNRALTGIAVEQDKNTQEVFAQVKQIYKTPPIKDFGGFNFSQILPDPSKPSKRSFIEDLLFNKVTLADAGFIKQYGDCLGDIAARDLICAQKFNGLTVLPPLLTDEMIAQYTSALLAGTITSGWTFGAGAALQIPFAMQMAYRFNGIGVTQNVLYENQKLIANQFNSAIGKIQDSLSSTASALGKLQDVVNQNAQALNTLVKCLSSNFGAISSVLNDILSRLDKVEAEVQIDRLITGRLQCLQTYVTQQLIRAAEIRASANLAATKMSECVLGQSKRVDFCGKGYHLMSFPQSAPHGVVFLHVTYVPAQEKNFTTAPAICHDGKAHFPREGVFVSNGTHWFVTQRNFYEPQIITTDNTFVSGNCDVVIGIVNNTVYDPLQPELDSFKEELDKYFKNHTSPDVDLGDISGINASVVNIQKEIDRLNEVAKNLNESLIDLQELGKYEQYIKGGGSGGGQIYEGKLTAEGLRFGIVASRFNHALVDRLVEGAIDAIVRHGGREEDITLVRVPGSWEIPVAAGELARKEDIDAVIAIGVLIRGATPHFDYIASEVSKGLADLSLELRKPITFGVITADTLEQAIERAGTKHGNKGWEAALSAIEMANLFKSLR

SEQ ID NO: 4336 - protein, 1371 aa, Artificial Sequence
  SARS-CoV-2/Belgium/ULG-6939/2020__EPI_ISL_417020 spike protein (1-1211)(Q965C_S1003C) LumSynth construct
MFVFLVLLPLVSSQCVNLTTRTQLPPAYTNSFTRGVYYPDKVFRSSVLHSTQDLFLPFFSNVTWFHAIHVSGTNGTKRFDNPVLPFNDGVYFASTEKSNIIRGWIFGTTLDSKTQSLLIVNNATNVVIKVCEFQFCNDPFLGVYYHKNNKSWMESEFRVYSSANNCTFEYVSQPFLMDLEGKQGNFKNLREFVFKNIDGYFKIYSKHTPINLVRDLPQGFSALEPLVDLPIGINITRFQTLLALHRSYLTPGDSSSGWTAGAAAYYVGYLQPRTFLLKYNENGTITDAVDCALDPLSETKCTLKSFTVEKGIYQTSNFRVQPTESIVRFPNITNLCPFGEVFNATRFASVYAWNRKRISNCVADYSVLYNSASFSTFKCYGVSPTKLNDLCFTNVYADSFVIRGDEVRQIAPGQTGKIADYNYKLPDDFTGCVIAWNSNNLDSKVGGNYNYLYRLFRKSNLKPFERDISTEIYQAGSTPCNGVEGFNCYFPLQSYGFQPTNGVGYQPYRVVVLSFELLHAPATVCGPKKSTNLVKNKCVNFNFNGLTGTGVLTESNKKFLPFQQFGRDIADTTDAVRDPQTLEILDITPCSFGGVSVITPGTNTSNQVAVLYQGVNCTEVPVAIHADQLTPTWRVYSTGSNVFQTRAGCLIGAEHVNNSYECDIPIGAGICASYQTQTNSPRRARSVASQSIIAYTMSLGAENSVVYSNNSIAIPTNFTISVTTEILPVSMTKTSVDCTMYICGDSTECSNLLLQYGSFCTQLNRALTGIAVEQDKNTQEVFAQVKQIYKTPPIKDFGGFNFSQILPDPSKPSKRSFIEDLLFNKVTLADAGFIKQYGDCLGDIAARDLICAQKFNGLTVLPPLLTDEMIAQYTSALLAGTITSGWTFGAGAALQIPFAMQMAYRFNGIGVTQNVLYENQKLIANQFNSAIGKIQDSLSSTASALGKLQDVVNQNAQALNTLVKCLSSNFGAISSVLNDILSRLDKVEAEVQIDRLITGRLQCLQTYVTQQLIRAAEIRASANLAATKMSECVLGQSKRVDFCGKGYHLMSFPQSAPHGVVFLHVTYVPAQEKNFTTAPAICHDGKAHFPREGVFVSNGTHWFVTQRNFYEPQIITTDNTFVSGNCDVVIGIVNNTVYDPLQPELDSFKEELDKYFKNHTSPDVDLGDISGINASVVNIQKEIDRLNEVAKNLNESLIDLQELGKYEQYIKGGGSGGGQIYEGKLTAEGLRFGIVASRFNHALVDRLVEGAIDAIVRHGGREEDITLVRVPGSWEIPVAAGELARKEDIDAVIAIGVLIRGATPHFDYIASEVSKGLADLSLELRKPITFGVITADTLEQAIERAGTKHGNKGWEAALSAIEMANLFKSLR

SEQ ID NO: 4337 - protein, 1371 aa, Artificial Sequence
  SARS-CoV-2/France/HF2496/2020__EPI_ISL_418231 spike protein (1-1211)(Q965C_S1003C) LumSynth construct
MFVFLVLLPLVSSQCVNLTTRTQLPPAYTNSFTRGVYYPDKVFRSSVLHSTQDLFLPFFSNVTWFHAIHVSGTNGTKRFDNPVLPFNDGVYFASTEKSNIIRGWIFGTTLDSKTQSLLIVNNATNVVIKVCEFQFCNDPFLGVYYHKNNKSWMESEFRVYSSANNCTFEYVSQPFLMDLEGKQGNFKNLREFVFKNIDGYFKIYSKHTPINLVRDLPQGFSALEPLVDLPIGINITRFQTLLALHRSYLTPGDSSSGWTAGAAAYYVGYLQPRTFLLKYNENGTITDAVDCALDPLSETKCTLKSFTVEKGIYQTSNFRVQPTESIVRFPNITNLCPFGEVFNATRFASVYAWNRKRISNCVADYSVLYNSASFSTFKCYGVSPTKLNDLCFTNVYADSFVIRGDEVRQIAPGQTGKIADYNYKLPDDFTGCVIAWNSNNLDSKVGGNYNYLYRLFRKSNLKPFERDISTEIYQAGSTPCNGVEGFNCYFPLQSYGFQPTNGVGYQPYRVVVLSFELLHAPATVCGPKKSTNLVKNKCVNFNFNGLTGTGVLTESNKKFLPFQQFGRDIADTTDAVRDPQTLEILDITPCSFGGVSVITPGTNTSNQVAVLYQGVNCTEVPVAIHADQLTPTWRVYSTGSNVFQTRAGCLIGAEHVNNSYECDIPIGAGICASYQTQTNSPRRARSVASQSIIAYTMSLGAENSVAYSNNSIAIPTNFTISVTTEILPVSMTKTSVDCTMYICGDSTECSNLLLQYGSFCTQLNRALTGIAVEQDKNTQEVFAQVKQIYKTPPIKDFGGFNFSQILPDPSKPSKRSFIEDLLFNKVTLADAGFIKQYGDCLGDIVARDLICAQKFNGLTVLPPLLTDEMIAQYTSALLAGTITSGWTFGAGAALQIPFAMQMAYRFNGIGVTQNVLYENQKLIANQFNSAIGKIQDSLSSTASALGKLQDVVNQNAQALNTLVKCLSSNFGAISSVLNDILSRLDKVEAEVQIDRLITGRLQCLQTYVTQQLIRAAEIRASANLAATKMSECVLGQSKRVDFCGKGYHLMSFPQSAPHGVVFLHVTYVPAQEKNFTTAPAICHDGKAHFPREGVFVSNGTHWFVTQRNFYEPQIITTDNTFVSGNCDVVIGIVNNTVYDPLQPELDSFKEELDKYFKNHTSPDVDLGDISGINASVVNIQKEIDRLNEVAKNLNESLIDLQELGKYEQYIKGGGSGGGQIYEGKLTAEGLRFGIVASRFNHALVDRLVEGAIDAIVRHGGREEDITLVRVPGSWEIPVAAGELARKEDIDAVIAIGVLIRGATPHFDYIASEVSKGLADLSLELRKPITFGVITADTLEQAIERAGTKHGNKGWEAALSAIEMANLFKSLR

SEQ ID NO: 4338 - protein, 1371 aa, Artificial Sequence
  SARS-CoV-2/USA/WA-UW291/2020__EPI_ISL_418076 spike protein (1-1211)(Q965C_S1003C) LumSynth construct
MFVFLVLLPLVSSQCVNLTTRTQLPPAYTNSFTRGVYYPDKVFRSSVLHSTQDLFLPFFSNVTWFHAIHVSGTNGTKRFDNPVLPFNDGVYFASTEKSNIIRGWIFGTTLDSKTQSLLIVNNATNVVIKVCEFQFCNDPFLGVYYHKNNKSWMESEFRVYSSANNCTFEYVSQPFLMDLEGKQGNFKNLREFVFKNIDGYFKIYSKHTPINLVRDLPQGFSALEPLVDLPIGINITRFQTLLALHRSYLTPGDSSSGWTAGAAAYYVGYLQPRTFLLKYNENGTITDAVDCALDPLSETKCTLKSFTVEKGIYQTSNFRVQPTESIVRFPNITNLCPFGEVFNATRFASVYAWNRKRISNCVADYSVLYNSASFSTFKCYGVSPTKLNDLCFTNVYADSFVIRGDEVRQIAPGQTGKIADYNYKLPDDFTGCVIAWNSNNLDSKVGGNYNYLYRLFRKSNLKPFERDISTEIYQAGSTPCNGVEGFNCYFPLQSYGFQPTNGVGYQPYRVVVLSFELLHAPATVCGPKKSTNLVKNKCVNFNFNGLTGTGVLTESNKKFLPFQQFGRDIADTTDAVRDPQTLEILDITPCSFGGVSVITPGTNTSNQVAVLYQGVNCTEVPVAIHADQLTPTWRVYSTGSNVFQTRAGCLIGAEHVNNSYECDIPIGAGICASYQTQTNSPRRARSVASQSIIAYTMSLGAENSVAYSNNSIAIPTNFTISVTTEILPVSMTKTSVDCTMYICGDSTECSNLLLQYGSFCTQLNRALTGIAVEQDKNTQEVFAQVKQIYKTPPIKDFGGFNFSQILPDPSKPSKRSFIEDLLFNKVTLADAGFIKQYGDCLGDIAARDLICAQKFNGLTVLPPLLTDEMIAQYTSALLAGTITSGWTFGAGAALQIPFAMQMAYRFNGIGVTQNVLYENQKLIANQFNSAIGKIQYSLSSTASALGKLQDVVNQNAQALNTLVKCLSSNFGAISSVLNDILSRLDKVEAEVQIDRLITGRLQCLQTYVTQQLIRAAEIRASANLAATKMSECVLGQSKRVDFCGKGYHLMSFPQSAPHGVVFLHVTYVPAQEKNFTTAPAICHDGKAHFPREGVFVSNGTHWFVTQRNFYEPQIITTDNTFVSGNCDVVIGIVNNTVYDPLQPELDSFKEELDKYFKNHTSPDVDLGDISGINASVVNIQKEIDRLNEVAKNLNESLIDLQELGKYEQYIKGGGSGGGQIYEGKLTAEGLRFGIVASRFNHALVDRLVEGAIDAIVRHGGREEDITLVRVPGSWEIPVAAGELARKEDIDAVIAIGVLIRGATPHFDYIASEVSKGLADLSLELRKPITFGVITADTLEQAIERAGTKHGNKGWEAALSAIEMANLFKSLR

SEQ ID NO: 4339 - protein, 1371 aa, Artificial Sequence; identical to SEQ ID NO: 4302
  SARS-CoV-2/Portugal/PT0034/2020__EPI_ISL_418019 spike protein (1-1211)(Q965C_S1003C) LumSynth construct

SEQ ID NO: 4340 - protein, 1371 aa, Artificial Sequence
  SARS-CoV-2/Iceland/202/2020__EPI_ISL_417750 spike protein (1-1211)(Q965C_S1003C) LumSynth construct
MFVFLVLLPLVSSQCVNLTTRTQLPPAYTNSFTRGVYYPDKVFRSSVLHSTQDLFLPFFSNVTWFHAIHVSGTNGTKRFDNPVLPFNDGVYFASTEKSNIIRGWIFGTTLDSKTQSLLIVNNATNVVIKVCEFQFCNDPFLGVYYHKNNKSWMESEFRVYSSANNCTFEYVSQPFLMDLEGKQGNFKNLREFVFKNIDGYFKIYSKHTPINLVRDLPQGFSALEPLVDLPIGINITRFQTLLALHRSYLTPGDSSSGWTAGAAAYYVGYLQPRTFLLKYNENGTITDAVDCALDPLSETKCTLKSFTVEKGIYQTSNFRVQPTESIVRFPNITNLCPFGEVFNATRFASVYAWNRKRISNCVADYSVLYNSASFSTFKCYGVSPTKLNDLCFTNVYADSFVIRGDEVRQIAPGQTGKIADYNYKLPDDFTGCVIAWNSNNLDSKVGGNYNYLYRLFRKSNLKPFERDISTEIYQAGSTPCNGVEGFNCYFPLQSYGFQPTNGVGYQPYRVVVLSFELLHAPATVCGPKKSTNLVKNKCVNFNFNGLTGTGVLTESNKKFLPFQQFGRDIADTTDAVRDPQTLEILDITPCSFGGVSVITPGTNTSNQVAVLYQDVNCTEVPVAIHADQLTPTWRVYSTGSNVFQTRAGCLIGAEHVNNSYECDIPIGAGICASYQTQTNSPRRARSVASQSIIAYTMSLGAENSVAYSNNSIAIPTNFTISVTTEILPVSMTKTSVDCTMYICGDSTECSNLLLQYGSFCTQLNRALTGIAVEQDKNTQEVFAQVKQIYKTPPIKDFGGFNFSQILPDPSKPSKRSFIEDLLFNKVTLADAGFIKQYGDCLGDIAARDLICAQKFNGLTVLPPLLTDEMIAQYTSALLAGTITSGWTFGAGAALQIPFAMQMAYRFNGIGVTQNVLYENQKLIANQFNSAIGKIQDSLSSTASALGKLQDVVNQNAQALNTLVKCLSSNFGAISSVLNDILSRLDKVEAEVQIDRLITGRLQCLQTYVTQQLIRAAEIRASANLAATKMSECVLGQSKRVDFCGKGYHLMSFPQSAPHGVVFLHVTYVPAQEKNFTTAPAICHDGKAHFPREGVFVSNGTHWFVTQRNFYEPQIITTDNTFVSGNCDVVIGIVNNTVYDPLQPELDSFKEELDKYFKNHTSPDVDLGDIPGINASVVNIQKEIDRLNEVAKNLNESLIDLQELGKYEQYIKGGGSGGGQIYEGKLTAEGLRFGIVASRFNHALVDRLVEGAIDAIVRHGGREEDITLVRVPGSWEIPVAAGELARKEDIDAVIAIGVLIRGATPHFDYIASEVSKGLADLSLELRKPITFGVITADTLEQAIERAGTKHGNKGWEAALSAIEMANLFKSLR

SEQ ID NO: 4341 - protein, 1371 aa, Artificial Sequence
  SARS-CoV-2/USA/WA-UW261/2020__EPI_ISL_418046 spike protein (1-1211)(Q965C_S1003C) LumSynth construct
MFVFLVLLPLVSSQCVNLTTRTQLPPAYTNSFTRGVYYPDKVFRSSVLHSTQDLFLPFFSNVTWFHAIHVSGTNGTKRFDNPVLPFNDGVYFASTEKSNIIRGWIFGTTLDSKTQSLLIVNNATNVVIKVCEFQFCNDPFLGVYYHKNNKSWMESEFRVYSSANNCTFEYVSQPFLMDLEGKQGNFKNLREFVFKNIDGYFKIYSKHTPINLVRDLPQGFSALEPLVDLPIGINITRFQTLLALHRSYLTPGDSSSGWTAGAAAYYVGYLQPRTFLLKYNENGTITDAVDCALDPLSETKCTLKSFTVEKGIYQTSNFRVQPTESIVRFPNITNLCPFGEVFNATRFTSVYAWNRKRISNCVADYSVLYNSASFSTFKCYGVSPTKLNDLCFTNVYADSFVIRGDEVRQIAPGQTGKIADYNYKLPDDFTGCVIAWNSNNLDSKVGGNYNYLYRLFRKSNLKPFERDISTEIYQAGSTPCNGVEGFNCYFPLQSYGFQPTNGVGYQPYRVVVLSFELLHAPATVCGPKKSTNLVKNKCVNFNFNGLTGTGVLTESNKKFLPFQQFGRDIADTTDAVRDPQTLEILDITPCSFGGVSVITPGTNTSNQVAVLYQDVNCTEVPVAIHADQLTPTWRVYSTGSNVFQTRAGCLIGAEHVNNSYECDIPIGAGICASYQTQTNSPRRARSVASQSIIAYTMSLGAENSVAYSNNSIAIPTNFTISVTTEILPVSMTKTSVDCTMYICGDSTECSNLLLQYGSFCTQLNRALTGIAVEQDKNTQEVFAQVKQIYKTPPIKDFGGFNFSQILPDPSKPSKRSFIEDLLFNKVTLADAGFIKQYGDCLGDIAARDLICAQKFNGLTVLPPLLTDEMIAQYTSALLAGTITSGWTFGAGAALQIPFAMQMAYRFNGIGVTQNVLYENQKLIANQFNSAIGKIQDSLSSTASALGKLQDVVNQNAQALNTLVKCLSSNFGAISSVLNDILSRLDKVEAEVQIDRLITGRLQCLQTYVTQQLIRAAEIRASANLAATKMSECVLGQSKRVDFCGKGYHLMSFPQSAPHGVVFLHVTYVPAQEKNFTTAPAICHDGKAHFPREGVFVSNGTHWFVTQRNFYEPQIITTDNTFVSGNCDVVIGIVNNTVYDPLQPELDSFKEELDKYFKNHTSPDVDLGDISGINASVVNIQKEIDRLNEVAKNLNESLIDLQELGKYEQYIKGGGSGGGQIYEGKLTAEGLRFGIVASRFNHALVDRLVEGAIDAIVRHGGREEDITLVRVPGSWEIPVAAGELARKEDIDAVIAIGVLIRGATPHFDYIASEVSKGLADLSLELRKPITFGVITADTLEQAIERAGTKHGNKGWEAALSAIEMANLFKSLR

SEQ ID NO: 4342 - protein, 1371 aa, Artificial Sequence
  SARS-CoV-2/Portugal/PT0035/2020__EPI_ISL_418020 spike protein (1-1211)(Q965C_S1003C) LumSynth construct
MFVFLVLLPLVSSQCVNLTTRTQLPPAYTNSFTRGVYYPDKVFRSSVLHSTQDLFLPFFSNVTWFHAIHVSGTNGTKRFDNPVLPFNDGVYFASTEKSNIIRGWIFGTTLDSKTQSLLIVNNATNVVIKVCEFQFCNDPFLGVYYHKNNKSWMESEFRVYSSANNCTFEYVSQPFLMDLEGKQGNFKNLREFVFKNIDGYFKIYSKHTPINLVRDLPQGFSALEPLVDLPIGINITRFQTLLALHRSYLTPGDSSSGWTAGAAAYYVGYLQPRTFLLKYNENGTITDAVDCALDPLSETKCTLKSFTVEKGIYQTSNFRVQPTESIVRFPNITNLCPFGEVFNATRFASVYAWNRKRISNCVADYSVLYNSASFSTFKCYGVSPTKLNDLCFTNVYADSFVIRGDEVRQIAPGQTGKIADYNYKLPDDFTGCVIAWNSNNLDSKVGGNYNYLYRLFRKSNLKPFERDISTEIYQAGSTPCNGVEGFNCYFPLQSYGFQPTNGVGYQPYRVVVLSFELLHAPATVCGPKKSTNLVKNKCVNFNFNGLTGTGVLTESNKKFLPFQQFGRDIADTTDAVRDPQTLEILDITPCSFGGVSVITPGTNTSNQVAVLYQDVNCTEVPVAIHADQLTPTWRVYSTGSNVFQTRAGCLIGAEHVNNSYECDIPIGAGICASYQTQTNSPRRARSVASQSIIAYTMSLGAENSVAYSNNSIAIPTNFTISVTTEILPVSMTKTSVDCTMYICGDSTECSNLLLQYGSFCTQLNRALTGIAVEQDKNTQEVFAQVKQIYKTPPIKDFGGFNFSQILPDPSKPSKRSFIEDLLFNKVTLADAGFIKQYGDCLGDISARDLICAQKFNGLTVLPPLLTDEMIAQYTSALLAGTITSGWTFGAGAALQIPFAMQMAYRFNGIGVTQNVLYENQKLIANQFNSAIGKIQDSLSSTASALGKLQDVVNQNAQALNTLVKCLSSNFGAISSVLNDILSRLDKVEAEVQIDRLITGRLQCLQTYVTQQLIRAAEIRASANLAATKMSECVLGQSKRVDFCGKGYHLMSFPQSAPHGVVFLHVTYVPAQEKNFTTAPAICHDGKAHFPREGVFVSNGTHWFVTQRNFYEPQIITTDNTFVSGNCDVVIGIVNNTVYDPLQPELDSFKEELDKYFKNHTSPDVDLGDISGINASVVNIQKEIDRLNEVAKNLNESLIDLQELGKYEQYIKGGGSGGGQIYEGKLTAEGLRFGIVASRFNHALVDRLVEGAIDAIVRHGGREEDITLVRVPGSWEIPVAAGELARKEDIDAVIAIGVLIRGATPHFDYIASEVSKGLADLSLELRKPITFGVITADTLEQAIERAGTKHGNKGWEAALSAIEMANLFKSLR

SEQ ID NO: 4343 - protein, 1371 aa, Artificial Sequence
  SARS-CoV-2/USA/NY-NYUMC7/2020__EPI_ISL_418192 spike protein (1-1211)(Q965C_S1003C) LumSynth construct
MFVFLVLLPLVSSQCVNLTTRTQLPPAYTNSFTRGVYYPDKVFRSSVLHSTQDLFLPFFSNVTWFHAIHVSGTNGTKRFDNPVLPFNDGVYFASTEKSNIIRGWIFGTTLDSKTQSLLIVNNATNVVIKVCEFQFCNDPFLGVYHHKNNKSWMESEFRVYSSANNCTFEYVSQPFLMDLEGKQGNFKNLREFVFKNIDGYFKIYSKHTPINLVRDLPQGFSALEPLVDLPIGINITRFQTLLALHRSYLTPGDSSSGWTAGAAAYYVGYLQPRTFLLKYNENGTITDAVDCALDPLSETKCTLKSFTVEKGIYQTSNFRVQPTESIVRFPNITNLCPFGEVFNATRFASVYAWNRKRISNCVADYSVLYNSASFSTFKCYGVSPTKLNDLCFTNVYADSFVIRGDEVRQIAPGQTGKIADYNYKLPDDFTGCVIAWNSNNLDSKVGGNYNYLYRLFRKSNLKPFERDISTEIYQAGSTPCNGVEGFNCYFPLQSYGFQPTNGVGYQPYRVVVLSFELLHAPATVCGPKKSTNLVKNKCVNFNFNGLTGTGVLTESNKKFLPFQQFGRDIADTTDAVRDPQTLEILDITPCSFGGVSVITPGTNTSNQVAVLYQGVNCTEVPVAIHADQLTPTWRVYSTGSNVFQTRAGCLIGAEHVNNSYECDIPIGAGICASYQTQTNSPRRARSVASQSIIAYTMSLGAENSVAYSNNSIAIPTNFTISVTTEILPVSMTKTSVDCTMYICGDSTECSNLLLQYGSFCTQLNRALTGIAVEQDKNTQEVFAQVKQIYKTPPIKDFGGFNFSQILPDPSKPSKRSFIEDLLFNKVTLADAGFIKQYGDCLGDIAARDLICAQKFNGLTVLPPLLTDEMIAQYTSALLAGTITSGWTFGAGAALQIPFAMQMAYRFNGIGVTQNVLYENQKLIANQFNSAIGKIQDSLSSTASALGKLQDVVNQNAQALNTLVKCLSSNFGAISSVLNDILSRLDKVEAEVQIDRLITGRLQCLQTYVTQQLIRAAEIRASANLAATKMSECVLGQSKRVDFCGKGYHLMSFPQSAPHGVVFLHVTYVPAQEKNFTTAPAICHDGKAHFPREGVFVSNGTHWFVTQRNFYEPQIITTDNTFVSGNCDVVIGIVNNTVYDPLQPELDSFKEELDKYFKNHTSPDVDLGDISGINASVVNIQKEIDRLNEVAKNLNESLIDLQELGKYEQYIKGGGSGGGQIYEGKLTAEGLRFGIVASRFNHALVDRLVEGAIDAIVRHGGREEDITLVRVPGSWEIPVAAGELARKEDIDAVIAIGVLIRGATPHFDYIASEVSKGLADLSLELRKPITFGVITADTLEQAIERAGTKHGNKGWEAALSAIEMANLFKSLR

SEQ ID NO: 4344 - protein, 1371 aa, Artificial Sequence
  SARS-CoV-2/Iceland/189/2020__EPI_ISL_417709 spike protein (1-1211)(Q965C_S1003C) LumSynth construct
MFVFLVLLPLVSSQCVNLTTRTQLPPAYTNSFTRGVYYPDKVFRSSVLHSTQDLFLPFFSNVTWFHAIHVSGTNGTKRFDNPVLPFNDGVYFASTEKSNIIRGWIFGTTLDSKTQSLLIVNNATNVVIKVCEFQFCNDPFLGVYYHKNNKSWMESEFRVYSSANNCTFEYVSQPFLMDLEGKQGNFKNLREFVFKNIDGYFKIYSKHTPINLVRDLPQGFSALEPLVDLPIGINITRFQTLLALHRSYLTPGDSSSGWTAGAAAYYVGYLQPRTFLLKYNENGTITDAVDCALDPLSETKCTLKSFTVEKGIYQTSNFRVQPTESIVRFPNITNLCPFGEVFNATRFASVYAWNRKRISNCVADYSVLYNSASFSTFKCYGVSPTKLNDLCFTNVYADSFVIRGDEVRQIAPGQTGKIADYNYKLPDDFTGCVIAWNSNNLDSKVGGNYNYLYRLFRKSNLKPFERDISTEIYQAGSTPCNGVEGFNCYFPLQSYGFQPTNGVGYQPYRVVVLSFELLHAPATVCGPKKSTNLVKNKCVNFNFNGLTGTGVLTESNKKFLPFQQFGRDIADTTDAVRDPQTLEILDITPCSFGGVSVITPGTNTSNQVAVLYQGVNCTEVPVAIHADQLTPTWRVYSTGSNVFQTRAGCLIGAEHVNNSYECDIPIGAGICASYQTQTNSPRRARSVASQSIIAYTMSLGAENSVAYSNNSIAIPTNFTISVTTEILPVSMTKTSVDCTMYICGDSTECSNLLLQYGSFCTQLNRALTGIAVEQDKNTQEVFAQVKQIYKTPPIKDFGGFNFSQILPDPSKPSKRSFIEDLLFNKVTLADAGFTKQYGDCLGDIAARDLICAQKFNGLTVLPPLLTDEMIAQYTSALLAGTITSGWTFGAGAALQIPFAMQMAYRFNGIGVTQNVLYENQKLIANQFNSAIGKIQDSLSSTASALGKLQDVVNQNAQALNTLVKCLSSNFGAISSVLNDILSRLDKVEAEVQIDRLITGRLQCLQTYVTQQLIRAAEIRASANLAATKMSECVLGQSKRVDFCGKGYHLMSFPQSAPHGVVFLHVTYVPAQEKNFTTAPAICHDGKAHFPREGVFVSNGTHWFVTQRNFYEPQIITTDNTFVSGNCDVVIGIVNNTVYDPLQPELDSFKEELDKYFKNHTSPDVDLGDISGINASVVNIQKEIDRLNEVAKNLNESLIDLQELGKYEQYIKGGGSGGGQIYEGKLTAEGLRFGIVASRFNHALVDRLVEGAIDAIVRHGGREEDITLVRVPGSWEIPVAAGELARKEDIDAVIAIGVLIRGATPHFDYIASEVSKGLADLSLELRKPITFGVITADTLEQAIERAGTKHGNKGWEAALSAIEMANLFKSLR

SEQ ID NO: 4345 - protein, 1371 aa, Artificial Sequence
  SARS-CoV-2/Australia/NSW56/2020__EPI_ISL_417408 spike protein (1-1211)(Q965C_S1003C) LumSynth construct
MFVFLVLLPLVSSQCVNLTTRTQLPPAYTNSFTRGVYYPDKVFRSSVLHSTQDLFLPFFSNVTWFHAIHVSGTNGTKRFDNPVLPFNDGVYFASTEKSNIIRGWIFGTTLDSKTQSLLIVNNATNVVIKVCEFQFCNDPFLGVYYHKNNKSWMESEFRVYSSANNCTFEYVSQPFLMDLEGKQGNFKNLREFVFKNIDGYFKIYSKHTPINLVRDLPQGFSALEPLVDLPIGINITRFQTLLALHRSYLTPGDSSSGWTAGAAAYYVGYLQPRTFLLKYNENGTITDAVDCALDPLSETKCTLKSFTVEKGIYQTSNFRVQPTESIVRFPNITNLCPFGEVFNATRFASVYAWNRKRISNCVADYSVLYNSASFSTFKCYGVSPTKLNDLCFTNVYADSFVIRGDEVRQIAPGQTGKIADYNYKLPDDFTGCVIAWNSNNLDSKVGGNYNYLYRLFRKSNLKPFERDISTEIYQAGSTPCNGVEGFNCYFPLQSYGFQPTNGVGYQPYRVVVLSFELLHAPATVCGPKKSTNLVKNKCVNFNFNGLTGTGVLTESNKKFLPFQQFGRDIADTTDAVRDPQTLEILDITPCSFGGVSVITPGTNTSNQVAVLYQDVNCTEVPVAIHADQLTPTWRVYSTGSNVFQTRAGCLIGAEHVNNSYECDIPIGAGICASYQTQTNSPRRARSVASQSIIAYTMSLGAENSVAYSNNSIAIPTNFTISVTTEILPVSMTKTSVDCTMYICGDSTECSNLLLQYGSFCTQLNRALTGIAVEQDKNTQEVFAQVKQIYKTPPIKDFGGFNFSQILPDSSKPSKRSFIEDLLFNKVTLADAGFIKQYGDCLGDIAARDLICAQKFNGLTVLPPLLTDEMIAQYTSALLAGTITSGWTFGAGAALQIPFAMQMAYRFNGIGVTQNVLYENQKLIANQFNSAIGKIQDSLSSTASALGKLQDVVNQNAQALNTLVKCLSSNFGAISSVLNDILSRLDKVEAEVQIDRLITGRLQCLQTYVTQQLIRAAEIRASANLAATKMSECVLGQSKRVDFCGKGYHLMSFPQSAPHGVVFLHVTYVPAQEKNFTTAPAICHDGKAHFPREGVFVSNGTHWFVTQRNFYEPQIITTDNTFVSGNCDVVIGIVNNTVYDPLQPELDSFKEELDKYFKNHTSPDVDLGDISGINASVVNIQKEIDRLNEVAKNLNESLIDLQELGKYEQYIKGGGSGGGQIYEGKLTAEGLRFGIVASRFNHALVDRLVEGAIDAIVRHGGREEDITLVRVPGSWEIPVAAGELARKEDIDAVIAIGVLIRGATPHFDYIASEVSKGLADLSLELRKPITFGVITADTLEQAIERAGTKHGNKGWEAALSAIEMANLFKSLR

SEQ ID NO: 4346 - protein, 1371 aa, Artificial Sequence
  SARS-CoV-2/Iceland/280/2020__EPI_ISL_417608 spike protein (1-1211)(Q965C_S1003C) LumSynth construct
MFVFLVLLPLVSSQCVNLTTRTQLPPAYTNSFTRGVYYPDKVFRSSVLHSTQDLFLPFFSNVTWFHAIHVSGTNGTKRFDNPVLPFNDGVYFASTEKSNIIRGWIFGTTLDSKTQSLLIVNNATNVVIKVCEFQFCNDPFLGVYYHKNNKSWMESEFRVYSSANNCTFEYVSQPFLMDLEGKQGNFKNLREFVFKNIDGYFKIYSKHTPINLVRDLPQGFSALEPLVDLPIGINITRFQTLLALHRSYLTPGDSSSGWTAGAAAYYVGYLQPRTFLLKYNENGTITDAVDCALDPLSETKCTLKSFTVEKGIYQTSNFRVQPTESIVRFPNITNLCPFGEVFNATRFASVYAWNRKRISNCVADYSVLYNSASFSTFKCYGVSPTKLNDLCFTNVYADSFVIRGDEVRQIAPGQTGKIADYNYKLPDDFTGCVIAWNSNNLDSKVGGNYNYLYRLFRKSNLKPFERDISTEIYQAGSTPCNGVEGFNCYFPLQSYGFQPTNGVGYQPYRVVVLSFELLHAPATVCGPKKSTNLVKNKCVNFNFNGLTGTGVLTESNKKFLPFQQFGRDIADTTDAVRDPQTLEILDITPCSFGGVSVITPGTNTSNQVAVLYQGVNCTEVPVAIHADQLTPTWRVYSTGSNVFQTRAGCLIGAEHVNNSYECDIPIGAGICASYHTQTNSPRRARSVASQSIIAYTMSLGAENSVAYSNNSIAIPTNFTISVTTEILPVSMTKTSVDCTMYICGDSTECSNLLLQYGSFCTQLNRALTGIAVEQDKNTQEVFAQVKQIYKTPPIKDFGGFNFSQILPDPSKPSKRSFIEDLLFNKVTLADAGFIKQYGDCLGDIAARDLICAQKFNGLTVLPPLLTDEMIAQYTSALLAGTITSGWTFGAGAALQIPFAMQMAYRFNGIGVTQNVLYENQKLIANQFNSAIGKIQDSLSSTASALGKLQDVVNQNAQALNTLVKCLSSNFGAISSVLNDILSRLDKVEAEVQIDRLITGRLQCLQTYVTQQLIRAAEIRASANLAATKMSECVLGQSKRVDFCGKGYHLMSFPQSAPHGVVFLHVTYVPAQEKNFTTAPAICHDGKAHFPREGVFVSNGTHWFVTQRNFYEPQIITTDNTFVSGNCDVVIGIVNNTVYDPLQPELDSFKEELDKYFKNHTSPDVDLGDISGINASVVNIQKEIDRLNEVAKNLNESLIDLQELGKYEQYIKGGGSGGGQIYEGKLTAEGLRFGIVASRFNHALVDRLVEGAIDAIVRHGGREEDITLVRVPGSWEIPVAAGELARKEDIDAVIAIGVLIRGATPHFDYIASEVSKGLADLSLELRKPITFGVITADTLEQAIERAGTKHGNKGWEAALSAIEMANLFKSLR

SEQ ID NO: 4347 - protein, 1371 aa, Artificial Sequence; identical to SEQ ID NO: 4302
  SARS-CoV-2/Iceland/247/2020__EPI_ISL_417575 spike protein (1-1211)(Q965C_S1003C) LumSynth construct

SEQ ID NO: 4348 - protein, 1371 aa, Artificial Sequence
  SARS-CoV-2/Iceland/238/2020__EPI_ISL_417566 spike protein (1-1211)(Q965C_S1003C) LumSynth construct
MFVFLVLLPLVSSQCVNLTTRTQLPPAYTNSFTRGVYYPDKVFRSSVLHSTQDLFLPFFSNVTWFHAIHVSGTNGTKRFDNPVLPFNDGVYFASTEKSNIIRGWIFGTTLDSKTQSLLIVNNATNVVIKVCEFQFCNDPFLGVYYHKNNKSWMESEFRVYSSANNCTFEYVSQPFLMDLEGKQGNFKNLREFVFKNIDGYFKIYSKHTPINLVRDLPQGFSALEPLVDLPIGINITRFQTLLALHRSYLTPGDSSSGWTAGAAAYYVGYLQPRTFLLKYNENGTITDAVDCALDPLSETKCTLKSFTVEKGIYQTSNFRVQPTESIVRFPNITNLCPFGEVFNATRFASVYAWNRKRISNCVADYSVLYNSASFSTFKCYGVSPTKLNDLCFTNVYADSFVIRGDEVRQIAPGQTGKIADYNYKLPDDFTGCVIAWNSNNLDSKVGGNYNYLYRLFRKSNLKPFERDISTEIYQAGSTPCNGVEGFNCYFPLQSYGFQPTNGVGYQPYRVVVLSFELLHAPATVCGPKKSTNLVKNKCVNFNFNGLTGTGVLTESNKKFLPFQQFGRDIADTTDAVRDPQTLEILDITPCSFGGVSVITPGTNTSNQVAVLYQGVNCTEVPVAIHADQLTPTWRVYSTGSNVFQTRAGCLIGAEHVNNSYECDIPIGAGICASYQTQTNSPRRARSVASQSIIAYTMSLGAENSVAYSNNSIAIPTNFTISVTTEILPVSMTKTSVDCTMYICGDSTECSNLLLQYGSFCTQLNRALTGIAVEQDKNTQEVFAQVKQIYKTPPIKDFGGFNFSQILPDPSKPSKRSFIEDLLFNKVTLADVGFIKQYGDCLGDIAARDLICAQKFNGLTVLPPLLTDEMIAQYTSALLAGTITSGWTFGAGAALQIPFAMQMAYRFNGIGVTQNVLYENQKLIANQFNSAIGKIQDSLSSTASALGKLQDVVNQNAQALNTLVKCLSSNFGAISSVLNDILSRLDKVEAEVQIDRLITGRLQCLQTYVTQQLIRAAEIRASANLAATKMSECVLGQSKRVDFCGKGYHLMSFPQSAPHGVVFLHVTYVPAQEKNFTTAPAICHDGKAHFPREGVFVSNGTHWFVTQRNFYEPQIITTDNTFVSGNCDVVIGIVNNTVYDPLQPELDSFKEELDKYFKNHTSPDVDLGDISGINASVVNIQKEIDRLNEVAKNLNESLIDLQELGKYEQYIKGGGSGGGQIYEGKLTAEGLRFGIVASRFNHALVDRLVEGAIDAIVRHGGREEDITLVRVPGSWEIPVAAGELARKEDIDAVIAIGVLIRGATPHFDYIASEVSKGLADLSLELRKPITFGVITADTLEQAIERAGTKHGNKGWEAALSAIEMANLFKSLR

SEQ ID NO: 4349 - protein, 1371 aa, Artificial Sequence
  SARS-CoV-2/Greece/16/2020__EPI_ISL_418265 spike protein (1-1211)(Q965C_S1003C) LumSynth construct
MFVFLVLLPLVSSQCVNLTTRTQLPPAYTNSFTRGVYYPDKVFRSSVLHSTQDLFLPFFSNVTWFHAIHVSGTNGTKRFDNPVLPFNDGVYFASTEKSNIIRGWIFGTTLDSKTQSLLIVNNATNVVIKVCEFQFCNDPFLGVYYHKNNKSWMESEFRVYSSANNCTFEYVSQPFLMDLEGKQGNFKNLREFVFKNVDGYFKIYSKHTPINLVRDLPQGFSALEPLVDLPIGINITRFQTLLALHRSYLTPGDSSSGWTAGAAAYYVGYLQPRTFLLKYNENGTITDAVDCALDPLSETKCTLKSFTVEKGIYQTSNFRVQPTESIVRFPNITNLCPFGEVFNATRFASVYAWNRKRISNCVADYSVLYNSASFSTFKCYGVSPTKLNDLCFTNVYADSFVIRGDEVRQIAPGQTGKIADYNYKLPDDFTGCVIAWNSNNLDSKVGGNYNYLYRLFRKSNLKPFERDISTEIYQAGSTPCNGVEGFNCYFPLQSYGFQPTNGVGYQPYRVVVLSFELLHAPATVCGPKKSTNLVKNKCVNFNFNGLTGTGVLTESNKKFLPFQQFGRDIADTTDAVRDPQTLEILDITPCSFGGVSVITPGTNTSNQVAVLYQDVNCTEVPVAIHADQLTPTWRVYSTGSNVFQTRAGCLIGAEHVNNSYECDIPIGAGICASYQTQTNSPRRARSVASQSIIAYTMSLGAENSVAYSNNSIAIPTNFTISVTTEILPVSMTKTSVDCTMYICGDSTECSNLLLQYGSFCTQLNRALTGIAVEQDKNTQEVFAQVKQIYKTPPIKDFGGFNFSQILPDPSKPSKRSFIEDLLFNKVTLADAGFIKQYGDCLGDIAARDLICAQKFNGLTVLPPLLTDEMIAQYTSALLAGTITSGWTFGAGAALQIPFAMQMAYRFNGIGVTQNVLYENQKLIANQFNSAIGKIQDSLSSTASALGKLQDVVNQNAQALNTLVKCLSSNFGAISSVLNDILSRLDKVEAEVQIDRLITGRLQCLQTYVTQQLIRAAEIRASANLAATKMSECVLGQSKRVDFCGKGYHLMSFPQSAPHGVVFLHVTYVPAQEKNFTTAPAICHDGKAHFPREGVFVSNGTHWFVTQRNFYEPQIITTDNTFVSGNCDVVIGIVNNTVYDPLQPELDSFKEELDKYFKNHTSPDVDLGDISGINASVVNIQKEIDRLNEVAKNLNESLIDLQELGKYEQYIKGGGSGGGQIYEGKLTAEGLRFGIVASRFNHALVDRLVEGAIDAIVRHGGREEDITLVRVPGSWEIPVAAGELARKEDIDAVIAIGVLIRGATPHFDYIASEVSKGLADLSLELRKPITFGVITADTLEQAIERAGTKHGNKGWEAALSAIEMANLFKSLR

SEQ ID NO: 4350 - protein, 1371 aa, Artificial Sequence
  SARS-CoV-2/Iceland/319/2020__EPI_ISL_417648 spike protein (1-1211)(Q965C_S1003C) LumSynth construct
MFVFLVLLPLVSSQCVNLTTRTQLPPAYTNSFTRGVYYPDKVFRSSVLHSTQDLFLPFFSNVTWFHAIHVSGTNGTKRFDNPVLPFNDGVYFASTEKSNIIRGWIFGTTLDSKTQSLLIVNNATNVVIKVCEFQFCNDPFLGVYYHKNNKSWMESEFRVYSSANNCTFEYVSQPFLIDLEGKQGNFKNLREFVFKNIDGYFKIYSKHTPINLVRDLPQGFSALEPLVDLPIGINITRFQTLLALHRSYLTPGDSSSGWTAGAAAYYVGYLQPRTFLLKYNENGTITDAVDCALDPLSETKCTLKSFTVEKGIYQTSNFRVQPTESIVRFPNITNLCPFGEVFNATRFASVYAWNRKRISNCVADYSVLYNSASFSTFKCYGVSPTKLNDLCFTNVYADSFVIRGDEVRQIAPGQTGKIADYNYKLPDDFTGCVIAWNSNNLDSKVGGNYNYLYRLFRKSNLKPFERDISTEIYQAGSTPCNGVEGFNCYFPLQSYGFQPTNGVGYQPYRVVVLSFELLHAPATVCGPKKSTNLVKNKCVNFNFNGLTGTGVLTESNKKFLPFQQFGRDIADTTDAVRDPQTLEILDITPCSFGGVSVITPGTNTSNQVAVLYQGVNCTEVPVAIHADQLTPTWRVYSTGSNVFQTRAGCLIGAEHVNNSYECDIPIGAGICASYQTQTNSPRRARSVASQSIIAYTMSLGAENSVAYSNNSIAIPTNFTISVTTEILPVSMTKTSVDCTMYICGDSTECSNLLLQYGSFCTQLNRALTGIAVEQDKNTQEVFAQVKQIYKTPPIKDFGGFNFSQILPDPSKPSKRSFIEDLLFNKVTLADAGFIKQYGDCLGDIAARDLICAQKFNGLTVLPPLLTDEMIAQYTSALLAGTITSGWTFGAGAALQIPFAMQMAYRFNGIGVTQNVLYENQKLIANQFNSAIGKIQDSLSSTASALGKLQDVVNQNAQALNTLVKCLSSNFGAISSVLNDILSRLDKVEAEVQIDRLITGRLQCLQTYVTQQLIRAAEIRASANLAATKMSECVLGQSKRVDFCGKGYHLMSFPQSAPHGVVFLHVTYVPAQEKNFTTAPAICHDGKAHFPREGVFVSNGTHWFVTQRNFYEPQIITTDNTFVSGNCDVVIGIVNNTVYDPLQPELDSFKEELDKYFKNHTSPDVDLGDISGINASVVNIQKEIDRLNEVAKNLNESLIDLQELGKYEQYIKGGGSGGGQIYEGKLTAEGLRFGIVASRFNHALVDRLVEGAIDAIVRHGGREEDITLVRVPGSWEIPVAAGELARKEDIDAVIAIGVLIRGATPHFDYIASEVSKGLADLSLELRKPITFGVITADTLEQAIERAGTKHGNKGWEAALSAIEMANLFKSLR

SEQ ID NO: 4351 - protein, 1371 aa, Artificial Sequence
  SARS-CoV-2/Congo/94/2020__EPI_ISL_417947 spike protein (1-1211)(Q965C_S1003C) LumSynth construct
MFVFLVLLPLVSSQCVNLTTRTQLPPAYTNSFTRGVYYPDKVFRSSVLHSTQDLFLPFFSNVTWFHAIHVSGTNGTKRFDNPVLPFNDGVYFASTEKSNIIRGWIFGTTLDSKTQSLLIVNNATNVVIKVCEFQFCNDPFLGVYYHKNNKSWMESEFRVYSSANNCTFEYVSQPFLMDLEGKQGNFKNLREFVFKNIDGYFKIYSKHTPINLVRDLPQGFSALEPLVDLPIGINITRFQTLLALHRSYLTPGDSSSGWTAGAAAYYVGYLQPRTFLLKYNENGTITDAVDCALDPLSETKCTLKSFTVEKGIYQTSNFRVQPTESIVRFPNITNLCPFGEVFNATRFASVYAWNRKRISNCVADYSVLYNSASFSTFKCYGVSPTKLNDLCFTNVYADSFVIRGDEVRQIAPGQTGKIADYNYKLPDDFTGCVIAWNSNNLDSKVGGNYNYLYRLFRKSNLKPFERDISTEIYQAGSTPCNGVEGFNCYFPLQSYGFQPTNGVGYQPYRVVVLSFELLHAPATVCGPKKSTNLVKNKCVNFNFNGLTGTGVLTESNKKFLPFQQFGRDIADTTDAVRDPQTLEILDITPCSFGGVSVITPGTNTSNQVAVLYQGVNCTEVPVAIHADQLTPTWRVYSTGSNVFQTRAGCLIGAEHVNNSYECDIPIGAGICASYQTQTNSPRRARSVASQSIIAYTMSLGAENSVAYSNNSIAIPTNFTISVTTEILPVSMTKTSVDCTMYICGDSTECSNLLLQYGSFCTQLNRALTGIAVEQDKNTQEVFAQVKQIYKTPPIKDFGGFNFSQILPDPSKPSKRSFIEDILFNKVTLADAGFIKQYGDCLGDIAARDLICAQKFNGLTVLPPLLTDEMIAQYTSALLAGTITSGWTFGAGAALQIPFAMQMAYRFNGIGVTQNVLYENQKLIANQFNSAIGKIQDSLSSTASALGKLQDVVNQNAQALNTLVKCLSSNFGAISSVLNDILSRLDKVEAEVQIDRLITGRLQCLQTYVTQQLIRAAEIRASANLAATKMSECVLGQSKRVDFCGKGYHLMSFPQSAPHGVVFLHVTYVPAQEKNFTTAPAICHDGKAHFPREGVFVSNGTHWFVTQRNFYEPQIITTDNTFVSGNCDVVIGIVNNTVYDPLQPELDSFKEELDKYFKNHTSPDVDLGDISGINASVVNIQKEIDRLNEVAKNLNESLIDLQELGKYEQYIKGGGSGGGQIYEGKLTAEGLRFGIVASRFNHALVDRLVEGAIDAIVRHGGREEDITLVRVPGSWEIPVAAGELARKEDIDAVIAIGVLIRGATPHFDYIASEVSKGLADLSLELRKPITFGVITADTLEQAIERAGTKHGNKGWEAALSAIEMANLFKSLR

SEQ ID NO: 4352 - protein, 1371 aa, Artificial Sequence
  SARS-CoV-2/Congo/158/2020__EPI_ISL_417950 spike protein (1-1211)(Q965C_S1003C) LumSynth construct
MFVFLVLLPLVSSQCVNLTTRTQLPPAYTNSFTRGVYYPDKVFRSSVLHSTQDLFLPFFSNVTWFHAIHVSGTNGTKRFDNPVLPFNDGVYFASTEKSNIIRGWIFGTTLDSKTQSLLIVNNATNVVIKVCEFQFCNDPFLGVYYHKNNKSWMESEFRVYSSANNCTFEYVSQPFLMDLEGKQGNFKNLREFVFKNIDGYFKIYSKHTPINLVRDLPQGFSALEPLVDLPIGINITRFQTLLALHRSYLTPGDSSSGWTAGAAAYYVGYLQPRTFLLKYNENGTITDAVDCALDPLSETKCTLKSFTVEKGIYQTSNFRVQPTESIVRFPNITNLCPFGEVFNATRFASVYAWNRKRISNCVADYSVLYNSASFSTFKCYGVSPTKLNDLCFTNVYADSFVIRGDEVRQIAPGQTGKIADYNYKLPDDFTGCVIAWNSNNLDSKVGGNYNYLYRLFRKSNLKPFERDISTEIYQAGSTPCNGVEGFNCYFPLQSYGFQPTNGVGYQPYRVVVLSFELLHAPATVCGPKKSTNLVKNKCVNFNFNGLTGTGVLTESNKKFLPFQQFGRDIADTTDAVRDPQTLEILDITPCSFGGVSVITPGTNTSNQVAVLYQDVNCTEVPVAIHADQLTPTWRVYSTGSNVFQTRAGCLIGAEHVNNSYECDIPIGAGICASYQTQTNSPRRARSVASQSIIAYTMSLGAENSVAYSNNSIAIPTNFTISVTTEILPVSMTKTSVDCTMYICGDSTECSNLLLQYGSFCTQLNRALTGIAVEQDKNTQEVFAQVKQIYKTPPIKDFGGFNFSQILPDPSKPSKRSFIEDLLFNKVTLADAGFIKQYGDCLGDIAARDLICAQKFNGLTVLPPLLTDEMIAQYTSALLAGTITSGWTFGAGAALQIPFAMQMAYRFNGIGVTQNVLYENQKLIANQFNSAIGKIQDSLSSTASALGKLQDVVNQNAQALNTLVKCLSSNFGAISSVLNDILSRLDKVEAEVQIDRLITGRLQCLQTYVTQQLIRAAEIRASANLAATKMSECVLGQSKRVDFCGKGYHLMSFPQSAPHGVVFLHVTYVPAQEKNFTTAPAICHDGKAHFPREGVFVSNGTHWFVTQRNFYEPQIITTDNTFLSGNCDVVIGIVNNTVYDPLQPELDSFKEELDKYFKNHTSPDVDLGDISGINASVVNIQKEIDRLNEVAKNLNESLIDLQELGKYEQYIKGGGSGGGQIYEGKLTAEGLRFGIVASRFNHALVDRLVEGAIDAIVRHGGREEDITLVRVPGSWEIPVAAGELARKEDIDAVIAIGVLIRGATPHFDYIASEVSKGLADLSLELRKPITFGVITADTLEQAIERAGTKHGNKGWEAALSAIEMANLFKSLR

SEQ ID NO: 4353 - protein, 1371 aa, Artificial Sequence
  SARS-CoV-2/USA/UT-00034/2020__EPI_ISL_417977 spike protein (1-1211)(Q965C_S1003C) LumSynth construct
MFVFLVLLPLVSSQCVNLTTRTQLPPAYTNSFTRGVYYPDKVFRSSVLHSTQDLFLPFFSNVTWFHAIHVSGTNGTKRFDNPVLPFNDGVYFASTEKSNIIRGWIFGTTLDSKTQSLLIVNNATNVVIKVCEFQFCNDPFLGVYYYKNNKSWMESEFRVYSSANNCTFEYVSQPFLMDLEGKQGNFKNLREFVFKNIDGYFKIYSKHTPINLVRDLPQGFSALEPLVDLPIGINITRFQTLLALHRSYLTPGDSSSGWTAGAAAYYVGYLQPRTFLLKYNENGTITDAVDCALDPLSETKCTLKSFTVEKGIYQTSNFRVQPTESIVRFPNITNLCPFGEVFNATRFASVYAWNRKRISNCVADYSVLYNSASFSTFKCYGVSPTKLNDLCFTNVYADSFVIRGDEVRQIAPGQTGKIADYNYKLPDDFTGCVIAWNSNNLDSKVGGNYNYLYRLFRKSNLKPFERDISTEIYQAGSTPCNGVEGFNCYFPLQSYGFQPTNGVGYQPYRVVVLSFELLHAPATVCGPKKSTNLVKNKCVNFNFNGLTGTGVLTESNKKFLPFQQFGRDIADTTDAVRDPQTLEILDITPCSFGGVSVITPGTNTSNQVAVLYQGVNCTEVPVAIHADQLTPTWRVYSTGSNVFQTRAGCLIGAEHVNNSYECDIPIGAGICASYQTQTNSPRRARSVASQSIIAYTMSLGAENSVAYSNNSIAIPTNFTISVTTEILPVSMTKTSVDCTMYICGDSTECSNLLLQYGSFCTQLNRALTGIAVEQDKNTQEVFAQVKQIYKTPPIKDFGGFNFSQILPDPSKPSKRSFIEDLLFNKVTLADAGFIKQYGDCLGDIAARDLICAQKFNGLTVLPPLLTDEMIAQYTSALLAGTITSGWTFGAGAALQIPFAMQMAYRFNGIGVTQNVLYENQKLIANQFNSAIGKIQDSLSSTASALGKLQDVVNQNAQALNTLVKCLSSNFGAISSVLNDILSRLDKVEAEVQIDRLITGRLQCLQTYVTQQLIRAAEIRASANLAATKMSECVLGQSKRVDFCGKGYHLMSFPQSAPHGVVFLHVTYVPAQEKNFTTAPAICHDGKAHFPREGVFVSNGTHWFVTQRNFYEPQIITTDNTFVSGNCDVVIGIVNNTVYDPLQPELDSFKEELDKYFKNHTSPDVDLGDISGINASVVNIQKEIDRLNEVAKNLNESLIDLQELGKYEQYIKGGGSGGGQIYEGKLTAEGLRFGIVASRFNHALVDRLVEGAIDAIVRHGGREEDITLVRVPGSWEIPVAAGELARKEDIDAVIAIGVLIRGATPHFDYIASEVSKGLADLSLELRKPITFGVITADTLEQAIERAGTKHGNKGWEAALSAIEMANLFKSLR

SEQ ID NO: 4354 - protein, 1371 aa, Artificial Sequence
  SARS-CoV-2/USA/UT-00033/2020__EPI_ISL_417976 spike protein (1-1211)(Q965C_S1003C) LumSynth construct
MFVFLVLLPLVSSQCVNLTTRTQLPPAYTNSFTRGVYYPDKVFRSSVLHSTQDLFLPFFSNVTWFHAIHVSGTNGTKRFDNPVLPFNDGVYFASTEKSNIIRGWIFGTTLDSKTQSLLIVNNATNVVIKVCEFQFCNDPFLGVYYHKNNKSWMESEFRVYSSANNCTFEYVSQPFLMDLEGKQGNFKNLREFVFKNIDGYFKIYSKHTPINLVRDLPQGFSALEPLVDLPIGINITRFQTLLALHRSYLTPGDSSSGLTAGAAAYYVGYLQPRTFLLKYNENGTITDAVDCALDPLSETKCTLKSFTVEKGIYQTSNFRVQPTESIVRFPNITNLCPFGEVFNATRFASVYAWNRKRISNCVADYSVLYNSASFSTFKCYGVSPTKLNDLCFTNVYADSFVIRGDEVRQIAPGQTGKIADYNYKLPDDFTGCVIAWNSNNLDSKVGGNYNYLYRLFRKSNLKPFERDISTEIYQAGSTPCNGVEGFNCYFPLQSYGFQPTNGVGYQPYRVVVLSFELLHAPATVCGPKKSTNLVKNKCVNFNFNGLTGTGVLTESNKKFLPFQQFGRDIADTTDAVRDPQTLEILDITPCSFGGVSVITPGTNTSNQVAVLYQGVNCTEVPVAIHADQLTPTWRVYSTGSNVFQTRAGCLIGAEHVNNSYECDIPIGAGICASYQTQTNSPRRARSVASQSIIAYTMSLGAENSVAYSNNSIAIPTNFTISVTTEILPVSMTKTSVDCTMYICGDSTECSNLLLQYGSFCTQLNRALTGIAVEQDKNTQEVFAQVKQIYKTPPIKDFGGFNFSQILPDPSKPSKRSFIEDLLFNKVTLADAGFIKQYGDCLGDIAARDLICAQKFNGLTVLPPLLTDEMIAQYTSALLAGTITSGWTFGAGAALQIPFAMQMAYRFNGIGVTQNVLYENQKLIANQFNSAIGKIQDSLSSTASALGKLQDVVNQNAQALNTLVKCLSSNFGAISSVLNDILSRLDKVEAEVQIDRLITGRLQCLQTYVTQQLIRAAEIRASANLAATKMSECVLGQSKRVDFCGKGYHLMSFPQSAPHGVVFLHVTYVPAQEKNFTTAPAICHDGKAHFPREGVFVSNGTHWFVTQRNFYEPQIITTDNTFVSGNCDVVIGIVNNTVYDPLQPELDSFKEELDKYFKNHTSPDVDLGDISGINASVVNIQKEIDRLNEVAKNLNESLIDLQELGKYEQYIKGGGSGGGQIYEGKLTAEGLRFGIVASRFNHALVDRLVEGAIDAIVRHGGREEDITLVRVPGSWEIPVAAGELARKEDIDAVIAIGVLIRGATPHFDYIASEVSKGLADLSLELRKPITFGVITADTLEQAIERAGTKHGNKGWEAALSAIEMANLFKSLR

SEQ ID NO: 4355 - protein, 1371 aa, Artificial Sequence
  SARS-CoV-2/USA/WI-13/2020__EPI_ISL_417516 spike protein (1-1211)(Q965C_S1003C) LumSynth construct
MFVFLVLLPLVSSQCVNLTTRTQLPPAYTNSFTRGVYYPDKVFRSSVLHSTQDLFLPFFSNVTWFHAIHVSGTNGTKRFDNPVLPFNDGVYFASTEKSNIIRGWIFGTTLDSKTQSLLIVNNATNVVIKVCEFQFCNDPFLGVYYHKNNKSWMESEFRVYSSANNCTFEYVSQPFLMDLEGKQGNFKNLREFVFKNIDGYFKIYSKHTPINLVRDLPQGFSALEPLVDLPIGINITRFQTLLALHRSYLTPGDSSSGWTAGAAAYYVGYLQPRTFLLKYNENGTITDAVDCALDPLSETKCTLKSFTVEKGIYQTSNFRVLPTESIVRFPNITNLCPFGEVFNATRFASVYAWNRKRISNCVADYSVLYNSASFSTFKCYGVSPTKLNDLCFTNVYADSFVIRGDEVRQIAPGQTGKIADYNYKLPDDFTGCVIAWNSNNLDSKVGGNYNYLYRLFRKSNLKPFERDISTEIYQAGSTPCNGVEGFNCYFPLQSYGFQPTNGVGYQPYRVVVLSFELLHAPATVCGPKKSTNLVKNKCVNFNFNGLTGTGVLTESNKKFLPFQQFGRDIADTTDAVRDPQTLEILDITPCSFGGVSVITPGTNTSNQVAVLYQGVNCTEVPVAIHADQLTPTWRVYSTGSNVFQTRAGCLIGAEHVNNSYECDIPIGAGICASYQTQTNSPRRARSVASQSIIAYTMSLGAENSVAYSNNSIAIPTNFTISVTTEILPVSMTKTSVDCTMYICGDSTECSNLLLQYGSFCTQLNRALTGIAVEQDKNTQEVFAQVKQIYKTPPIKDFGGFNFSQILPDPSKPSKRSFIEDLLFNKVTLADAGFIKQYGDCLGDIAARDLICAQKFNGLTVLPPLLTDEMIAQYTSALLAGTITSGWTFGAGAALQIPFAMQMAYRFNGIGVTQNVLYENQKLIANQFNSAIGKIQDSLSSTASALGKLQDVVNQNAQALNTLVKCLSSNFGAISSVLNDILSRLDKVEAEVQIDRLITGRLQCLQTYVTQQLIRAAEIRASANLAATKMSECVLGQSKRVDFCGKGYHLMSFPQSAPHGVVFLHVTYVPAQEKNFTTAPAICHDGKAHFPREGVFVSNGTHWFVTQRNFYEPQIITTDNTFVSGNCDVVIGIVNNTVYDPLQPELDSFKEELDKYFKNHTSPDVDLGDISGINASVVNIQKEIDRLNEVAKNLNESLIDLQELGKYEQYIKGGGSGGGQIYEGKLTAEGLRFGIVASRFNHALVDRLVEGAIDAIVRHGGREEDITLVRVPGSWEIPVAAGELARKEDIDAVIAIGVLIRGATPHFDYIASEVSKGLADLSLELRKPITFGVITADTLEQAIERAGTKHGNKGWEAALSAIEMANLFKSLR

SEQ ID NO: 4356 - protein, 1370 aa, Artificial Sequence
  SARS-CoV-2/India/1-27/2020__EPI_ISL_413522 spike protein (1-1210)(Q964C_S1002C) LumSynth construct
MFVFLVLLPLVSSQCVNLTTRTQLPPAYTNSFTRGVYYPDKVFRSSVLHSTQDLFLPFFSNVTWFHAIHVSGTNGTKRFDNPVLPFNDGVYFASTEKSNIIRGWIFGTTLDSKTQSLLIVNNATNVVIKVCEFQFCNDPFLGVYHKNNKSWMESEFRVYSSANNCTFEYVSQPFLMDLEGKQGNFKNLREFVFKNIDGYFKIYSKHTPINLVRDLPQGFSALEPLVDLPIGINITRFQTLLALHRSYLTPGDSSSGWTAGAAAYYVGYLQPRTFLLKYNENGTITDAVDCALDPLSETKCTLKSFTVEKGIYQTSNFRVQPTESIVRFPNITNLCPFGEVFNATRFASVYAWNRKRISNCVADYSVLYNSASFSTFKCYGVSPTKLNDLCFTNVYADSFVIRGDEVIQIAPGQTGKIADYNYKLPDDFTGCVIAWNSNNLDSKVGGNYNYLYRLFRKSNLKPFERDISTEIYQAGSTPCNGVEGFNCYFPLQSYGFQPTNGVGYQPYRVVVLSFELLHAPATVCGPKKSTNLVKNKCVNFNFNGLTGTGVLTESNKKFLPFQQFGRDIADTTDAVRDPQTLEILDITPCSFGGVSVITPGTNTSNQVAVLYQDVNCTEVPVAIHADQLTPTWRVYSTGSNVFQTRAGCLIGAEHVNNSYECDIPIGAGICASYQTQTNSPRRARSVASQSIIAYTMSLGAENSVAYSNNSIAIPTNFTISVTTEILPVSMTKTSVDCTMYICGDSTECSNLLLQYGSFCTQLNRALTGIAVEQDKNTQEVFAQVKQIYKTPPIKDFGGFNFSQILPDPSKPSKRSFIEDLLFNKVTLADAGFIKQYGDCLGDIAARDLICAQKFNGLTVLPPLLTDEMIAQYTSALLAGTITSGWTFGAGAALQIPFAMQMAYRFNGIGVTQNVLYENQKLIANQFNSAIGKIQDSLSSTASALGKLQDVVNQNAQALNTLVKCLSSNFGAISSVLNDILSRLDKVEAEVQIDRLITGRLQCLQTYVTQQLIRAAEIRASANLAATKMSECVLGQSKRVDFCGKGYHLMSFPQSAPHGVVFLHVTYVPAQEKNFTTAPAICHDGKAHFPREGVFVSNGTHWFVTQRNFYEPQIITTDNTFVSGNCDVVIGIVNNTVYDPLQPELDSFKEELDKYFKNHTSPDVDLGDISGINASVVNIQKEIDRLNEVAKNLNESLIDLQELGKYEQYIKGGGSGGGQIYEGKLTAEGLRFGIVASRFNHALVDRLVEGAIDAIVRHGGREEDITLVRVPGSWEIPVAAGELARKEDIDAVIAIGVLIRGATPHFDYIASEVSKGLADLSLELRKPITFGVITADTLEQAIERAGTKHGNKGWEAALSAIEMANLFKSLR

SEQ ID NO: 4357 - protein, 1365 aa, Artificial Sequence
  SARS-CoV-2/pangolin/Guangxi/P4L/2017__EPI_ISL_410538 spike protein (1-1205)(Q959C_S997C) LumSynth construct
MFVFLFVLPLVSSQCVNLTTRTGIPPGYTNSSTRGVYYPDKVFRSSILHLTQDLFLPFFSNVTWFNTINYQGGFKKFDNPVLPFNDGVYFASTEKSNIIRGWIFGTTLDARTQSLLIVNNATNVVIKVCEFQFCTDPFLGVYYHNNNKTWVENEFRVYSSANNCTFEYISQPFLMDLEGKQGNFKNLREFVFKNVDGYFKIYSKHTPIDLVRDLPRGFAALEPLVDLPIGINITRFQTLLALHRSYLTPGNLESGWTTGAAAYYVGYLQQRTFLLSYNQNGTITDAVDCSLDPLSETKCTLKSLTVEKGIYQTSNFRVQPTISIVRFPNITNLCPFGEVFNASKFASVYAWNRKRISNCVADYSVLYNSTSFSTFKCYGVSPTKLNDLCFTNVYADSFVVKGDEVRQIAPGQTGVIADYNYKLPDDFTGCVIAWNSVKQDALTGGNYGYLYRLFRKSKLKPFERDISTEIYQAGSTPCNGQVGLNCYYPLERYGFHPTTGVNYQPFRVVVLSFELLNGPATVCGPKLSTTLVKDKCVNFNFNGLTGTGVLTTSKKQFLPFQQFGRDISDTTDAVRDPQTLEILDITPCSFGGVSVITPGTNTSNQVAVLYQDVNCTEVPMAIHAEQLTPAWRVYSAGANVFQTRAGCLVGAEHVNNSYECDIPVGAGICASYHSMSSLRSVNQRSIIAYTMSLGAENSVAYSNNSIAIPTNFTISVTTEILPVSMTKTSVDCTMYICGDSIECSNLLLQYGSFCTQLNRALTGIAVEQDKNTQEVFAQVKQIYKTPPIKDFGGFNFSQILPDPSKPSKRSFIEDLLFNKVTLADAGFIKQYGDCLGDIAARDLICAQKFNGLTVLPPLLTDEMIAQYTSALLAGTITSGWTFGAGAALQIPFAMQMAYRFNGIGVTQNVLYENQKLIANQFNSAIGKIQDSLSSTASALGKLQDVVNQNAQALNTLVKCLSSNFGAISSVLNDILSRLDKVEAEVQIDRLITGRLQCLQTYVTQQLIRAAEIRASANLAATKMSECVLGQSKRVDFCGKGYHLMSFPQSAPHGVVFLHVTYVPAQEKNFTTAPAICHEGKAHFPREGVFVSNGTHWFITQRNFYEPQIITTDNTFVSGSCDVVIGIVNNTVYDPLQPELDSFKEELDKYFKNHTSPDVDLGDISGINASVVNIQKEIDRLNEVAKNLNESPIDLQELGKYEQYIKGGGSGGGQIYEGKLTAEGLRFGIVASRFNHALVDRLVEGAIDAIVRHGGREEDITLVRVPGSWEIPVAAGELARKEDIDAVIAIGVLIRGATPHFDYIASEVSKGLADLSLELRKPITFGVITADTLEQAIERAGTKHGNKGWEAALSAIEMANLFKSLR

SEQ ID NO: 4358 - protein, 1365 aa, Artificial Sequence
  SARS-CoV-2/pangolin/Guangxi/P5L/2017__EPI_ISL_410540 spike protein (1-1205)(Q959C_S997C) LumSynth construct
MFVFLFVLPLVSSQCVNLTTRTGIPPGYTNSSTRGVYYPDKVFRSSILHLTQDLFLPFFSNVTWFNTINYQGGFKKFDNPVLPFNDGVYFASTEKSNIIRGWIFGTTLDARTQSLLIVNNATNVVIKVCEFQFCTDPFLGVYYHNNNKTWVENEFRVYSSANNCTFEYISQPFLMDLEGKQGNFKNLREFVFKNVDGYFKIYSKHTPIDLVRDLPRGFAALEPLVDLPIGINITRFQTLLALHRSYLTPGKLESGWTTGAAAYYVGYLQQRTFLLSYNQNGTITDAVDCSLDPLSETKCTLKSLTVEKGIYQTSNFRVQPTISIVRFPNITNLCPFGEVFNASKFASVYAWNRKRISNCVADYSVLYNSTSFSTFKCYGVSPTKLNDLCFTNVYADSFVVKGDEVRQIAPGQTGVIADYNYKLPDDFTGCVIAWNSVKQDALTGGNYGYLYRLFRKSKLKPFERDISTEIYQAGSTPCNGQVGLNCYYPLERYGFHPTTGVNYQPFRVVVLSFELLNGPATVCGPKLSTTLVKDKCVNFNFNGLTGTGVLTTSKKQFLPFQQFGRDISDTTDAVRDPQTLEILDITPCSFGGVSVITPGTNTSNQVAVLYQDVNCTEVPMAIHAEQLTPAWRVYSAGANVFQTRAGCLVGAEHVNNSYECDIPVGAGICASYHSMSSFRSVNQRSIIAYTMSLGAENSVAYSNNSIAIPTNFTISVTTEILPVSMTKTSVDCTMYICGDSIECSNLLLQYGSFCTQLNRALTGIAVEQDKNTQEVFAQVKQIYKTPPIKDFGGFNFSQILPDPSKPSKRSFIEDLLFNKVTLADAGFIKQYGDCLGDIAARDLICAQKFNGLTVLPPLLTDEMIAQYTSALLAGTITSGWTFGAGAALQIPFAMQMAYRFNGIGVTQNVLYENQKLIANQFNSAIGKIQDSLSSTASALGKLQDVVNQNAQALNTLVKCLSSNFGAISSVLNDILSRLDKVEAEVQIDRLITGRLQCLQTYVTQQLIRAAEIRASANLAATKMSECVLGQSKRVDFCGKGYHLMSFPQSAPHGVVFLHVTYVPAQEKNFTTAPAICHEGKAHFPREGVFVSNGTHWFITQRNFYEPQIITTDNTFVSGSCDVVIGIVNNTVYDPLQPELDSFKEELDKYFKNHTSPDVDLGDISGINASVVNIQKEIDRLNEVAKNLNESLIDLQELGKYEQYIKGGGSGGGQIYEGKLTAEGLRFGIVASRFNHALVDRLVEGAIDAIVRHGGREEDITLVRVPGSWEIPVAAGELARKEDIDAVIAIGVLIRGATPHFDYIASEVSKGLADLSLELRKPITFGVITADTLEQAIERAGTKHGNKGWEAALSAIEMANLFKSLR

SEQ ID NO: 4359 - protein, 1365 aa, Artificial Sequence
  SARS-CoV-2/pangolin/Guangxi/P5E/2017__EPI_ISL_410541 spike protein (1-1205)(Q959C_S997C) LumSynth construct
MFVFLFVLPLVSSQCVNLTTRTGIPPGYTNSSTRGVYYPDKVFRSSILHLTQDLFLPFFSNVTWFNTITYQGGSKKFDNPVLPFNDGVYFASTEKSNIIRGWIFGTTLDARTQSLLIVNNATNVVIKVCEFQFCTDPFLGVYYHNNNKTWVENEFRVYSSANNCTFEYISQPFLMDLEGKQGNFKNLREFVFKNVDGYFKIYSKHTPIDLVRDLPRGFAALEPLVDLPIGINITRFQTLLALHRSYLTPGKLESGWTTGAAAYYVGYLQQRTFLLSYNQNGTITDAVDCSLDPLSETKCTLKSLTVEKGIYQTSNFRVQPTISIVRFPNITNLCPFGEVFNASKFASVYAWNRKRISNCVADYSVLYNSTSFSTFKCYGVSPTKLNDLCFTNVYADSFVVKGDEVRQIAPGQTGVIADYNYKLPDDFTGCVIAWNSVKQDALTGDNYGYLYRLFRKSKLKPFERDISTEIYQAGSTPCNGQVGLNCYYPLERYGFHPTTGVNYQPFRVVVLSFELLNGPATVCGPKLSTTLVKDKCVNFNFNGLTGTGVLTTSKKQFLPFQQFGRDISDTTDAVRDPQTLEILDITPCSFGGVSVITPGTNTSNQVAVLYQDVNCTEVPMAIHAEQLTPAWRVYSAGANVFQTRAGCLVGAEHVNNSYECDIPVGAGICASYHSMSSFRSVNQRSIIAYTMSLGAENSVAYSNNSIAIPTNFTISVTTEILPVSMTKTSVDCTMYICGDSIECSNLLLQYGSFCTQLNRALTGIAVEQDKNTQEVFAQVKQIYKTPPIKDFGGFNFSQILPDPSKPSKRSFIEDLLFNKVTLADAGFIKQYGDCLGDIAARDLICAQKFNGLTVLPPLLTDEMIAQYTSALLAGTITSGWTFGAGAALQIPFAMQMAYRFNGIGVTQNVLYENQKLIANQFNSAIGKIQDSLSSTASALGKLQDVVNQNAQALNTLVKCLSSNFGAISSVLNDILSRLDKVEAEVQIDRLITGRLQCLQTYVTQQLIRAAEIRASANLAATKMSECVLGQSKRVDFCGKGYHLMSFPQSAPHGVVFLHVTYVPAQEKNFTTAPAICHEGKAHFPREGVFVSNGTHWFITQRNFYEPQIITTDNTFVSGSCDVVIGIVNNTVYDPLQPELDSFKEELDKYFKNHTSPDVDLGDISGINASVVNIQKEIDRLNEVAKNLNESLIDLQELGKYEQYIKGGGSGGGQIYEGKLTAEGLRFGIVASRFNHALVDRLVEGAIDAIVRHGGREEDITLVRVPGSWEIPVAAGELARKEDIDAVIAIGVLIRGATPHFDYIASEVSKGLADLSLELRKPITFGVITADTLEQAIERAGTKHGNKGWEAALSAIEMANLFKSLR

SEQ ID NO: 4360 - protein, 1363 aa, Artificial Sequence
  SARS-CoV-2/pangolin/Guangxi/P1E/2017__EPI_ISL_410539 spike protein (1-1203)(Q957C_S995C) LumSynth construct
MFVFLFVLPLVSSQCVNLTTRTGIQPGYTNSSTRGVYYPDKVFRSSILHLTQDLFLPFFSNVTWFNTINYQGGFKKFDNPVLPFNDGVYFASTEKSNIIRGWIFGTTLDARTQSLLIVNNATNVVIKVCEFQFCTDPFLGVYYHNNNKTWVENEFRVYSSANNCTFEYISQPFLMDLEGKQGNFKNLREFVFKNVDGYFKIYSKHTPIDLVRDLPRGFAALEPLVDLPIGINITRFQTLLALHRSYLTPGKLESGWTTGAAAYYVGYLQQRTFLLSYNQNGTITDAVDCSLDPLSETKCTLKSLTVEKGIYQTSNFRVQPTISIVRFPNITNLCPFGEVFNASKFASVYAWNRKRISNCVADYSVLYNSTSFSTFKCYGVSPTKLNDLCFTNVYADSFVVKGDEVRQIAPGQTGVIADYNYKLPDDFTGCVIAWNSVKQDALTGGNYLYRLFRKSKLKPFERDISTEIYQAGSTPCNGQVGLNCYYPLERYGFHPTTGVNYQPFRVVVLSFELLNGPATVCGPKLSTTLVKDKCVNFNFNGLTGTGVLTTSKKQFLPFQQFGRDISDTTDAVRDPQTLEILDITPCSFGGVSVITPGTNTSNQVAVLYQDVNCTEVPMAIHAEQLTPAWRVYSAGANVFQTRAGCLVGAEHVNNSYECDIPVGAGICASYHSMSSLRSVNQRSIIAYTMSLGAENSVAYSNNSIAIPTNFTISVTTEILPVSMTKTSVDCTMYICGDSIECSNLLLQYGSFCTQLNRALTGIAVEQDKNTQEVFAQVKQIYKTPPIKDFGGFNFSQILPDPSKPSKRSFIEDLLFNKVTLADAGFIKQYGDCLGDIAARDLICAQKFNGLTVLPPLLTDEMIAQYTSALLAGTITSGWTFGAGAALQIPFAMQMAYRFNGIGVTQNVLYENQKLIANQFNSAIGKIQDSLSSTASALGKLQDVVNQNAQALNTLVKCLSSNFGAISSVLNDILSRLDKVEAEVQIDRLITGRLQCLQTYVTQQLIRAAEIRASANLAATKMSECVLGQSKRVDFCGKGYHLMSFPQSAPHGVVFLHVTYVPAQEKNFTTAPAICHEGKAHFPREGVFVSNGTHWFITQRNFYEPQIITTDNTFVSGSCDVVIGIVNNTVYDPLQPELDSFKEELDKYFKNHTSPDVDLGDISGINASVVNIQKEIDRLNEVAKNLNESLIDLQELGKYEQYIKGGGSGGGQIYEGKLTAEGLRFGIVASRFNHALVDRLVEGAIDAIVRHGGREEDITLVRVPGSWEIPVAAGELARKEDIDAVIAIGVLIRGATPHFDYIASEVSKGLADLSLELRKPITFGVITADTLEQAIERAGTKHGNKGWEAALSAIEMANLFKSLR

SEQ ID NO: 4361 - protein, 1371 aa, Artificial Sequence
  SARS-CoV-2/Wuhan/WIV05/2019__EPI_ISL_402128 spike protein (1-1211)(F970C_G999C) LumSynth construct
MFVFLVLLPLVSSQCVNLTTRTQLPPAYTNSFTRGVYYPDKVFRSSVLHSTQDLFLPFFSNVTWFHAIHVSGTNGTKRFDNPVLPFNDGVYFASTEKSNIIRGWIFGTTLDSKTQSLLIVNNATNVVIKVCEFQFCNDPFLGVYYHKNNKSWMESEFRVYSSANNCTFEYVSQPFLMDLEGKQGNFKNLREFVFKNIDGYFKIYSKHTPINLVRDLPQGFSALEPLVDLPIGINITRFQTLLALHRSYLTPGDSSSGWTAGAAAYYVGYLQPRTFLLKYNENGTITDAVDCALDPLSETKCTLKSFTVEKGIYQTSNFRVQPTESIVRFPNITNLCPFGEVFNATRFASVYAWNRKRISNCVADYSVLYNSASFSTFKCYGVSPTKLNDLCFTNVYADSFVIRGDEVRQIAPGQTGKIADYNYKLPDDFTGCVIAWNSNNLDSKVGGNYNYLYRLFRKSNLKPFERDISTEIYQAGSTPCNGVEGFNCYFPLQSYGFQPTNGVGYQPYRVVVLSFELLHAPATVCGPKKSTNLVKNKCVNFNFNGLTGTGVLTESNKKFLPFQQFGRDIADTTDAVRDPQTLEILDITPCSFGGVSVITPGTNTSNQVAVLYQDVNCTEVPVAIHADQLTPTWRVYSTGSNVFQTRAGCLIGAEHVNNSYECDIPIGAGICASYQTQTNSPRRARSVASQSIIAYTMSLGAENSVAYSNNSIAIPTNFTISVTTEILPVSMTKTSVDCTMYICGDSTECSNLLLQYGSFCTQLNRALTGIAVEQDKNTQEVFAQVKQIYKTPPIKDFGGFNFSQILPDPSKPSKRSFIEDLLFNKVTLADAGFIKQYGDCLGDIAARDLICAQKFNGLTVLPPLLTDEMIAQYTSALLAGTITSGWTFGAGAALQIPFAMQMAYRFNGIGVTQNVLYENQKLIANQFNSAIGKIQDSLSSTASALGKLQDVVNQNAQALNTLVKQLSSNCGAISSVLNDILSRLDKVEAEVQIDRLITCRLQSLQTYVTQQLIRAAEIRASANLAATKMSECVLGQSKRVDFCGKGYHLMSFPQSAPHGVVFLHVTYVPAQEKNFTTAPAICHDGKAHFPREGVFVSNGTHWFVTQRNFYEPQIITTDNTFVSGNCDVVIGIVNNTVYDPLQPELDSFKEELDKYFKNHTSPDVDLGDISGINASVVNIQKEIDRLNEVAKNLNESLIDLQELGKYEQYIKGGGSGGGQIYEGKLTAEGLRFGIVASRFNHALVDRLVEGAIDAIVRHGGREEDITLVRVPGSWEIPVAAGELARKEDIDAVIAIGVLIRGATPHFDYIASEVSKGLADLSLELRKPITFGVITADTLEQAIERAGTKHGNKGWEAALSAIEMANLFKSLR

SEQ ID NO: 4362 - protein, 1367 aa, Artificial Sequence
  SARS-CoV-2/bat/Yunnan/RaTG13/2013__EPI_ISL_402131 spike protein (1-1207)(F966C_G995C) LumSynth construct
MFVFLVLLPLVSSQCVNLTTRTQLPPAYTNSSTRGVYYPDKVFRSSVLHLTQDLFLPFFSNVTWFHAIHVSGTNGIKRFDNPVLPFNDGVYFASTEKSNIIRGWIFGTTLDSKTQSLLIVNNATNVVIKVCEFQFCNDPFLGVYYHKNNKSWMESEFRVYSSANNCTFEYVSQPFLMDLEGKQGNFKNLREFVFKNIDGYFKIYSKHTPINLVRDLPPGFSALEPLVDLPIGINITRFQTLLALHRSYLTPGDSSSGWTAGAAAYYVGYLQPRTFLLKYNENGTITDAVDCALDPLSETKCTLKSFTVEKGIYQTSNFRVQPTDSIVRFPNITNLCPFGEVFNATTFASVYAWNRKRISNCVADYSVLYNSTSFSTFKCYGVSPTKLNDLCFTNVYADSFVITGDEVRQIAPGQTGKIADYNYKLPDDFTGCVIAWNSKHIDAKEGGNFNYLYRLFRKANLKPFERDISTEIYQAGSKPCNGQTGLNCYYPLYRYGFYPTDGVGHQPYRVVVLSFELLNAPATVCGPKKSTNLVKNKCVNFNFNGLTGTGVLTESNKKFLPFQQFGRDIADTTDAVRDPQTLEILDITPCSFGGVSVITPGTNASNQVAVLYQDVNCTEVPVAIHADQLTPTWRVYSTGSNVFQTRAGCLIGAEHVNNSYECDIPIGAGICASYQTQTNSRSVASQSIIAYTMSLGAENSVAYSNNSIAIPTNFTISVTTEILPVSMTKTSVDCTMYICGDSTECSNLLLQYGSFCTQLNRALTGIAVEQDKNTQEVFAQVKQIYKTPPIKDFGGFNFSQILPDPSKPSKRSFIEDLLFNKVTLADAGFIKQYGDCLGDIAARDLICAQKFNGLTVLPPLLTDEMIAQYTSALLAGTITSGWTFGAGAALQIPFAMQMAYRFNGIGVTQNVLYENQKLIANQFNSAIGKIQDSLSSTASALGKLQDVVNQNAQALNTLVKQLSSNCGAISSVLNDILSRLDKVEAEVQIDRLITCRLQSLQTYVTQQLIRAAEIRASANLAATKMSECVLGQSKRVDFCGKGYHLMSFPQSAPHGVVFLHVTYVPAQEKNFTTAPAICHDGKAHFPREGVFVSNGTHWFVTQRNFYEPQIITTDNTFVSGSCDVVIGIVNNTVYDPLQPELDSFKEELDKYFKNHTSPDVDLGDISGINASVVNIQKEIDRLNEVAKNLNESLIDLQELGKYEQYIKGGGSGGGQIYEGKLTAEGLRFGIVASRFNHALVDRLVEGAIDAIVRHGGREEDITLVRVPGSWEIPVAAGELARKEDIDAVIAIGVLIRGATPHFDYIASEVSKGLADLSLELRKPITFGVITADTLEQAIERAGTKHGNKGWEAALSAIEMANLFKSLR

SEQ ID NO: 4363 - protein, 1371 aa, Artificial Sequence
  SARS-CoV-2/Wuhan/HBCDC-HB-01/2019__EPI_ISL_402132 spike protein (1-1211)(F970C_G999C) LumSynth construct
MFVFLVLLPLVSSQCVNLTTRTQLPPAYTNSITRGVYYPDKVFRSSVLHSTQDLFLPFFSNVTWFHAIHVSGTNGTKRFDNPVLPFNDGVYFASTEKSNIIRGWIFGTTLDSKTQSLLIVNNATNVVIKVCEFQFCNDPFLGVYYHKNNKSWMESEFRVYSSANNCTFEYVSQPFLMDLEGKQGNFKNLREFVFKNIDGYFKIYSKHTPINLVRDLPQGFSALEPLVDLPIGINITRFQTLLALHRSYLTPGDSSSGWTAGAAAYYVGYLQPRTFLLKYNENGTITDAVDCALDPLSETKCTLKSFTVEKGIYQTSNFRVQPTESIVRFPNITNLCPFGEVFNATRFASVYAWNRKRISNCVADYSVLYNSASFSTFKCYGVSPTKLNDLCFTNVYADSFVIRGDEVRQIAPGQTGKIADYNYKLPDDFTGCVIAWNSNNLDSKVGGNYNYLYRLFRKSNLKPFERDISTEIYQAGSTPCNGVEGFNCYFPLQSYGFQPTNGVGYQPYRVVVLSFELLHAPATVCGPKKSTNLVKNKCVNFNFNGLTGTGVLTESNKKFLPFQQFGRDIADTTDAVRDPQTLEILDITPCSFGGVSVITPGTNTSNQVAVLYQDVNCTEVPVAIHADQLTPTWRVYSTGSNVFQTRAGCLIGAEHVNNSYECDIPIGAGICASYQTQTNSPRRARSVASQSIIAYTMSLGAENSVAYSNNSIAIPTNFTISVTTEILPVSMTKTSVDCTMYICGDSTECSNLLLQYGSFCTQLNRALTGIAVEQDKNTQEVFAQVKQIYKTPPIKDFGGFNFSQILPDPSKPSKRSFIEDLLFNKVTLADAGFIKQYGDCLGDIAARDLICAQKFNGLTVLPPLLTDEMIAQYTSALLAGTITSGWTFGAGAALQIPFAMQMAYRFNGIGVTQNVLYENQKLIANQFNSAIGKIQDSLSSTASALGKLQDVVNQNAQALNTLVKQLSSNCGAISSVLNDILSRLDKVEAEVQIDRLITCRLQSLQTYVTQQLIRAAEIRASANLAATKMSECVLGQSKRVDFCGKGYHLMSFPQSAPHGVVFLHVTYVPAQEKNFTTAPAICHDGKAHFPREGVFVSNGTHWFVTQRNFYEPQIITTDNTFVSGNCDVVIGIVNNTVYDPLQPELDSFKEELDKYFKNHTSPDVDLGDISGINASVVNIQKEIDRLNEVAKNLNESLIDLQELGKYEQYIKGGGSGGGQIYEGKLTAEGLRFGIVASRFNHALVDRLVEGAIDAIVRHGGREEDITLVRVPGSWEIPVAAGELARKEDIDAVIAIGVLIRGATPHFDYIASEVSKGLADLSLELRKPITFGVITADTLEQAIERAGTKHGNKGWEAALSAIEMANLFKSLR

SEQ ID NO: 4364 - protein, 1371 aa, Artificial Sequence
  SARS-CoV-2/Guangdong/20SF028/2020__EPI_ISL_403936 spike protein (1-1211)(F970C_G999C) LumSynth construct
MFVFLVLLPLVSSQCVNLTTRTQLPPAYTNSFTRGVYYPDKVFRSSVLYSTQDLFLPFFSNVTWFHAIHVSGTNGTKRFDNPVLPFNDGVYFASTEKSNIIRGWIFGTTLDSKTQSLLIVNNATNVVIKVCEFQFCNDPFLGVYYHKNNKSWMESEFRVYSSANNCTFEYVSQPFLMDLEGKQGNFKNLREFVFKNIDGYFKIYSKHTPINLVRDLPQGFSALEPLVDLPIGINITRFQTLLALHRSYLTPGDSSSGWTAGAAAYYVGYLQPRTFLLKYNENGTITDAVDCALDPLSETKCTLKSFTVEKGIYQTSNFRVQPTESIVRFPNITNLCPFGEVFNATRFASVYAWNRKRISNCVADYSVLYNSASFSTFKCYGVSPTKLNDLCFTNVYADSFVIRGDEVRQIAPGQTGKIADYNYKLPDDFTGCVIAWNSNNLDSKVGGNYNYLYRLFRKSNLKPFERDISTEIYQAGSTPCNGVEGFNCYFPLQSYGFQPTNGVGYQPYRVVVLSFELLHAPATVCGPKKSTNLVKNKCVNFNFNGLTGTGVLTESNKKFLPFQQFGRDIADTTDAVRDPQTLEILDITPCSFGGVSVITPGTNTSNQVAVLYQDVNCTEVPVAIHADQLTPTWRVYSTGSNVFQTRAGCLIGAEHVNNSYECDIPIGAGICASYQTQTNSPRRARSVASQSIIAYTMSLGAENSVAYSNNSIAIPTNFTISVTTEILPVSMTKTSVDCTMYICGDSTECSNLLLQYGSFCTQLNRALTGIAVEQDKNTQEVFAQVKQIYKTPPIKDFGGFNFSQILPDPSKPSKRSFIEDLLFNKVTLADAGFIKQYGDCLGDIAARDLICAQKFNGLTVLPPLLTDEMIAQYTSALLAGTITSGWTFGAGAALQIPFAMQMAYRFNGIGVTQNVLYENQKLIANQFNSAIGKIQDSLSSTASALGKLQDVVNQNAQALNTLVKQLSSNCGAISSVLNDILSRLDKVEAEVQIDRLITCRLQSLQTYVTQQLIRAAEIRASANLAATKMSECVLGQSKRVDFCGKGYHLMSFPQSAPHGVVFLHVTYVPAQEKNFTTAPAICHDGKAHFPREGVFVSNGTHWFVTQRNFYEPQIITTDNTFVSGNCDVVIGIVNNTVYDPLQPELDSFKEELDKYFKNHTSPDVDLGDISGINASVVNIQKEIDRLNEVAKNLNESLIDLQELGKYEQYIKGGGSGGGQIYEGKLTAEGLRFGIVASRFNHALVDRLVEGAIDAIVRHGGREEDITLVRVPGSWEIPVAAGELARKEDIDAVIAIGVLIRGATPHFDYIASEVSKGLADLSLELRKPITFGVITADTLEQAIERAGTKHGNKGWEAALSAIEMANLFKSLR

SEQ ID NO: 4365 - protein, 1371 aa, Artificial Sequence
  SARS-CoV-2/Shenzhen/SZTH-001/2020__EPI_ISL_406592 spike protein (1-1211)(F970C_G999C) LumSynth construct
MFVFLVLLPLVSSQCVNLTTRTQLPPAYTNSFTRGVYYPDKVFRSSVLHSTQDLFLPFFSNVTWFHAIHVSGTNGTKRFDNPVLPFNDGVYFASTEKSNIIRGWIFGTTLDSKTQSLLIVNNATNVVIKVCEFQFCNDPFLGVYYHKNNKSWMESEFRVYSSANNCTFEYVSQPFLMDLEGKQGNFKNLREFVFKNIDGYFKIYSKHTPINLVRDLPQGFSALEPLVDLPIGINITRFQTLLALHRSYLTPGDSSSGWTAGAAAYYVGYLQPRTFLLKYNENGTITDAVDCALDPLSETKCTLKSFTVEKGIYQTSNFRVQPTESIVRFPNITNLCPFGEVFNATRFASVYAWNRKRISNCVADYSVLYNSASFSTFKCYGVSPTKLNDLCFTNVYADSFVIRGDEVRQIAPGQTGKIADYNYKLPDDFTGCVIAWNSNNLDSKVGGNYNYLYRLFRKSNLKPFERDISTEIYQAGSTPCNGVEGFNCYFPLQSYGFQPTNGVGYQPYRVVVLSFELLHAPATVCGPKKSTNLVKNKCVNFNFNGLTGTGVLTESNKKFLPFQQFGRDIADTTDAVRDPQTLEILDITPCSFGGVSVITPGTNTSNQVAVLYQDVNCTEVPVAIHADQLTPTWRVYSTGSNVFQTRAGCLIGAEHVNNSYECDIPIGAGICASYQTQTNSPRRARSVASQSIIAYTMSLGAENSVAYSNNSIAIPTNFTISVTTEILPVSMTKTSVDCTMYICGDSTECSNLLLQYGSFCTQLNRALTGIAVEQDKNTQEVFAQVKQIYKTPPIKDFGGFNFSQILPDPSKPSKRSFIEDLLFNKVTLADAGFIKQYGDCLGDIAARDLICAQKFNGLTVLPPLLTDEMIAQYTSALLAGTITSGWTFGAGAALQIPFAMQMAYRFNGIGVTQNVLYENQKLIANQFNSAIGKIQDSLSSTASALGKLQDVVNQNAQALNTLVKQLSSNCGAISSVLNDILSRLDKVEAEVQIDRLITCRLQSLQTYVTQQLIRAAEIRASANLAATKMSECVLGQSKRVDFCGKGYHLMSFPQSAPHGVVFLHVTYVPAQEKNFTTAPAICHDGKAHFPREGVFVSNGTHWFVTQRNFYEPQIITTDNTFVSGNCDVLIGIVNNTVYDPLQPELDSFKEELDKYFKNHTSPDVDLGDISGINASVVNIQKEIDRLNEVAKNLNESLIDLQELGKYEQYIKGGGSGGGQIYEGKLTAEGLRFGIVASRFNHALVDRLVEGAIDAIVRHGGREEDITLVRVPGSWEIPVAAGELARKEDIDAVIAIGVLIRGATPHFDYIASEVSKGLADLSLELRKPITFGVITADTLEQAIERAGTKHGNKGWEAALSAIEMANLFKSLR

SEQ ID NO: 4366 - protein, 1371 aa, Artificial Sequence
  SARS-CoV-2/Shenzhen/SZTH-004/2020__EPI_ISL_406595 spike protein (1-1211)(F970C_G999C) LumSynth construct
MFVFLVLLPLVSSQCVNLTTRTQLPPAYTNSFTRGVYYPDKVFRSSVLHSTQDLFLPFFSNVTWFHAIHVSGTNGTKRFDNPVLPFNDGVYFASTEKSNIIRGWIFGTTLDSKTQSLLIVNNATNVVIKVCEFQFCNDPFLGVYYHKNNKSWMESEFRVYSSANNCTFEYVSQPFLMDLEGKQGNFKNLREFVFKNIDGYFKIYSKHTPINLVRDLPQGFSALEPLVDLPIGINITRFQTLLALHRSYLTPGDSSSGWTAGAAAYYVGYLQPRTFLLKYNENGTITDAVDCALDPLSETKCTLKSFTVEKGIYQTSNFRVQPTESIVRFPNITNLCPFGEVFNATRFASVYAWDRKRISNCVAYYSVLYNSASFSTFKCYGVSPTKLNDLCFTNVYADSFVIRGDEVRQIAPGQTGKIADYNYKLPDDFTGCVIAWNSNNLDSKVGGNYNYLYRLFRKSNLKPFERDISTEIYQAGSTPCNGVEGFNCYFPLQSYGFQPTNGVGYQPYRVVVLSFELLHAPATVCGPKKSTNLVKNKCVNFNFNGLTGTGVLTESNKKFLPFQQFGRDIADTTDAVRDPQTLEILDITPCSFGGVSVITPGTNTSNQVAVLYQDVNCTEVPVAIHADQLTPTWRVYSTGSNVFQTRAGCLIGAEHVNNSYECDIPIGAGICASYQTQTNSPRRARSVASQSIIAYTMSLGAENSVAYSNNSIAIPTNFTISVTTEILPVSMTKTSVDCTMYICGDSTECSNLLLQYGSFCTQLNRALTGIAVEQDKNTQEVFAQVKQIYKTPPIKDFGGFNFSQILPDPSKPSKRSFIEDLLFNKVTLADAGFIKQYGDCLGDIAARDLICAQKFNGLTVLPPLLTDEMIAQYTSALLAGTITSGWTFGAGAALQIPFAMQMAYRFNGIGVTQNVLYENQKLIANQFNSAIGKIQDSLSSTASALGKLQDVVNQNAQALNTLVKQLSSNCGAISSVLNDILSRLDKVEAEVQIDRLITCRLQSLQTYVTQQLIRAAEIRASANLAATKMSECVLGQSKRVDFCGKGYHLMSFPQSAPHGVVFLHVTYVPAQEKNFTTAPAICHDGKAHFPREGVFVSNGTHWFVTQRNFYEPQIITTDNTFVSGNCDVVIGIVNNTVYDPLQPELDSFKEELDKYFKNHTSPDVDLGDISGINASVVNIQKEIDRLNEVAKNLNESLIDLQELGKYEQYIKGGGSGGGQIYEGKLTAEGLRFGIVASRFNHALVDRLVEGAIDAIVRHGGREEDITLVRVPGSWEIPVAAGELARKEDIDAVIAIGVLIRGATPHFDYIASEVSKGLADLSLELRKPITFGVITADTLEQAIERAGTKHGNKGWEAALSAIEMANLFKSLR

SEQ ID NO: 4367 - protein, 1371 aa, Artificial Sequence
  SARS-CoV-2/France/IDF0372/2020__EPI_ISL_406596 spike protein (1-1211)(F970C_G999C) LumSynth construct
MFVFLVLLPLVSSQCVNLTTRTQLPPAYTNSFTRGVYYPDKVFRSSVLHSTQDLFLPFFSNVTWFHAIHVSGTNGTKRFDNPVLPFNDGVYFASTEKSNIIRGWIFGTTLDSKTQSLLIVNNATNVVIKVCEFQFCNDPFLGVYYHKNNKSWMESEFRVYSSANNCTFEYVSQPFLMDLEGKQGNFKNLREFVFKNIDGYFKIYSKHTPINLVRDLPQGFSALEPLVDLPIGINITRFQTLLALHRSYLTPGDSSSGWTAGAAAYYVGYLQPRTFLLKYNENGTITDAVDCALDPLSETKCTLKSFTVEKGIYQTSNFRVQPTESIVRFPNITNLCPFGEVFNATRFASVYAWNRKRISNCVADYSFLYNSASFSTFKCYGVSPTKLNDLCFTNVYADSFVIRGDEVRQIAPGQTGKIADYNYKLPDDFTGCVIAWNSNNLDSKVGGNYNYLYRLFRKSNLKPFERDISTEIYQAGSTPCNGVEGFNCYFPLQSYGFQPTNGVGYQPYRVVVLSFELLHAPATVCGPKKSTNLVKNKCVNFNFNGLTGTGVLTESNKKFLPFQQFGRDIADTTDAVRDPQTLEILDITPCSFGGVSVITPGTNTSNQVAVLYQDVNCTEVPVAIHADQLTPTWRVYSTGSNVFQTRAGCLIGAEHVNNSYECDIPIGAGICASYQTQTNSPRRARSVASQSIIAYTMSLGAENSVAYSNNSIAIPTNFTISVTTEILPVSMTKTSVDCTMYICGDSTECSNLLLQYGSFCTQLNRALTGIAVEQDKNTQEVFAQVKQIYKTPPIKDFGGFNFSQILPDPSKPSKRSFIEDLLFNKVTLADAGFIKQYGDCLGDIAARDLICAQKFNGLTVLPPLLTDEMIAQYTSALLAGTITSGWTFGAGAALQIPFAMQMAYRFNGIGVTQNVLYENQKLIANQFNSAIGKIQDSLSSTASALGKLQDVVNQNAQALNTLVKQLSSNCGAISSVLNDILSRLDKVEAEVQIDRLITCRLQSLQTYVTQQLIRAAEIRASANLAATKMSECVLGQSKRVDFCGKGYHLMSFPQSAPHGVVFLHVTYVPAQEKNFTTAPAICHDGKAHFPREGVFVSNGTHWFVTQRNFYEPQIITTDNTFVSGNCDVVIGIVNNTVYDPLQPELDSFKEELDKYFKNHTSPDVDLGDISGINASVVNIQKEIDRLNEVAKNLNESLIDLQELGKYEQYIKGGGSGGGQIYEGKLTAEGLRFGIVASRFNHALVDRLVEGAIDAIVRHGGREEDITLVRVPGSWEIPVAAGELARKEDIDAVIAIGVLIRGATPHFDYIASEVSKGLADLSLELRKPITFGVITADTLEQAIERAGTKHGNKGWEAALSAIEMANLFKSLR

SEQ ID NO: 4368 - protein, 1371 aa, Artificial Sequence
  SARS-CoV-2/Australia/VIC01/2020__EPI_ISL_406844 spike protein (1-1211)(F970C_G999C) LumSynth construct
MFVFLVLLPLVSSQCVNLTTRTQLPPAYTNSFTRGVYYPDKVFRSSVLHSTQDLFLPFFSNVTWFHAIHVSGTNGTKRFDNPVLPFNDGVYFASTEKSNIIRGWIFGTTLDSKTQSLLIVNNATNVVIKVCEFQFCNDPFLGVYYHKNNKSWMESEFRVYSSANNCTFEYVSQPFLMDLEGKQGNFKNLREFVFKNIDGYFKIYSKHTPINLVRDLPQGFSALEPLVDLPIGINITRFQTLLALHRRYLTPGDSSSGWTAGAAAYYVGYLQPRTFLLKYNENGTITDAVDCALDPLSETKCTLKSFTVEKGIYQTSNFRVQPTESIVRFPNITNLCPFGEVFNATRFASVYAWNRKRISNCVADYSVLYNSASFSTFKCYGVSPTKLNDLCFTNVYADSFVIRGDEVRQIAPGQTGKIADYNYKLPDDFTGCVIAWNSNNLDSKVGGNYNYLYRLFRKSNLKPFERDISTEIYQAGSTPCNGVEGFNCYFPLQSYGFQPTNGVGYQPYRVVVLSFELLHAPATVCGPKKSTNLVKNKCVNFNFNGLTGTGVLTESNKKFLPFQQFGRDIADTTDAVRDPQTLEILDITPCSFGGVSVITPGTNTSNQVAVLYQDVNCTEVPVAIHADQLTPTWRVYSTGSNVFQTRAGCLIGAEHVNNSYECDIPIGAGICASYQTQTNSPRRARSVASQSIIAYTMSLGAENSVAYSNNSIAIPTNFTISVTTEILPVSMTKTSVDCTMYICGDSTECSNLLLQYGSFCTQLNRALTGIAVEQDKNTQEVFAQVKQIYKTPPIKDFGGFNFSQILPDPSKPSKRSFIEDLLFNKVTLADAGFIKQYGDCLGDIAARDLICAQKFNGLTVLPPLLTDEMIAQYTSALLAGTITSGWTFGAGAALQIPFAMQMAYRFNGIGVTQNVLYENQKLIANQFNSAIGKIQDSLSSTASALGKLQDVVNQNAQALNTLVKQLSSNCGAISSVLNDILSRLDKVEAEVQIDRLITCRLQSLQTYVTQQLIRAAEIRASANLAATKMSECVLGQSKRVDFCGKGYHLMSFPQSAPHGVVFLHVTYVPAQEKNFTTAPAICHDGKAHFPREGVFVSNGTHWFVTQRNFYEPQIITTDNTFVSGNCDVVIGIVNNTVYDPLQPELDSFKEELDKYFKNHTSPDVDLGDISGINASVVNIQKEIDRLNEVAKNLNESLIDLQELGKYEQYIKGGGSGGGQIYEGKLTAEGLRFGIVASRFNHALVDRLVEGAIDAIVRHGGREEDITLVRVPGSWEIPVAAGELARKEDIDAVIAIGVLIRGATPHFDYIASEVSKGLADLSLELRKPITFGVITADTLEQAIERAGTKHGNKGWEAALSAIEMANLFKSLR

SEQ ID NO: 4369 - protein, 1371 aa, Artificial Sequence
  SARS-CoV-2/Germany/BavPat1/2020__EPI_ISL_406862 spike protein (1-1211)(F970C_G999C) LumSynth construct
MFVFLVLLPLVSSQCVNLTTRTQLPPAYTNSFTRGVYYPDKVFRSSVLHSTQDLFLPFFSNVTWFHAIHVSGTNGTKRFDNPVLPFNDGVYFASTEKSNIIRGWIFGTTLDSKTQSLLIVNNATNVVIKVCEFQFCNDPFLGVYYHKNNKSWMESEFRVYSSANNCTFEYVSQPFLMDLEGKQGNFKNLREFVFKNIDGYFKIYSKHTPINLVRDLPQGFSALEPLVDLPIGINITRFQTLLALHRSYLTPGDSSSGWTAGAAAYYVGYLQPRTFLLKYNENGTITDAVDCALDPLSETKCTLKSFTVEKGIYQTSNFRVQPTESIVRFPNITNLCPFGEVFNATRFASVYAWNRKRISNCVADYSVLYNSASFSTFKCYGVSPTKLNDLCFTNVYADSFVIRGDEVRQIAPGQTGKIADYNYKLPDDFTGCVIAWNSNNLDSKVGGNYNYLYRLFRKSNLKPFERDISTEIYQAGSTPCNGVEGFNCYFPLQSYGFQPTNGVGYQPYRVVVLSFELLHAPATVCGPKKSTNLVKNKCVNFNFNGLTGTGVLTESNKKFLPFQQFGRDIADTTDAVRDPQTLEILDITPCSFGGVSVITPGTNTSNQVAVLYQGVNCTEVPVAIHADQLTPTWRVYSTGSNVFQTRAGCLIGAEHVNNSYECDIPIGAGICASYQTQTNSPRRARSVASQSIIAYTMSLGAENSVAYSNNSIAIPTNFTISVTTEILPVSMTKTSVDCTMYICGDSTECSNLLLQYGSFCTQLNRALTGIAVEQDKNTQEVFAQVKQIYKTPPIKDFGGFNFSQILPDPSKPSKRSFIEDLLFNKVTLADAGFIKQYGDCLGDIAARDLICAQKFNGLTVLPPLLTDEMIAQYTSALLAGTITSGWTFGAGAALQIPFAMQMAYRFNGIGVTQNVLYENQKLIANQFNSAIGKIQDSLSSTASALGKLQDVVNQNAQALNTLVKQLSSNCGAISSVLNDILSRLDKVEAEVQIDRLITCRLQSLQTYVTQQLIRAAEIRASANLAATKMSECVLGQSKRVDFCGKGYHLMSFPQSAPHGVVFLHVTYVPAQEKNFTTAPAICHDGKAHFPREGVFVSNGTHWFVTQRNFYEPQIITTDNTFVSGNCDVVIGIVNNTVYDPLQPELDSFKEELDKYFKNHTSPDVDLGDISGINASVVNIQKEIDRLNEVAKNLNESLIDLQELGKYEQYIKGGGSGGGQIYEGKLTAEGLRFGIVASRFNHALVDRLVEGAIDAIVRHGGREEDITLVRVPGSWEIPVAAGELARKEDIDAVIAIGVLIRGATPHFDYIASEVSKGLADLSLELRKPITFGVITADTLEQAIERAGTKHGNKGWEAALSAIEMANLFKSLR

SEQ ID NO: 4370 - protein, 1371 aa, Artificial Sequence
  SARS-CoV-2/Wuhan/HBCDC-HB-02/2020__EPI_ISL_412978 spike protein (1-1211)(F970C_G999C) LumSynth construct
MFVFLVLLPLVSSQCVNLTTRTQLPPAYTNSFTRGVYYPDKVFRSSVLHSTQDLFLPFFSNVTWFHAIHVSGTNGTKRFDNPVLPFNDGVYFASTEKSNIIRGWIFGTTLDSKTQSLLIVNNATNVVIKVCEFQFCNDPFLGVYYHKNNKSWMESEFRVYSSANNCTFEYVSQPFLMDLEGKQGNFKNLREFVFKNIDGYFKIYSKHTPINLVRDLPQGFSALEPLVDLPIGINITRFQTLLALHRSYLTPGDSSSGWTAGAAAYYVGYLQPRTFLLKYNENGTITDAVDCALDPLSETKCTLKSFTVEKGIYQTSNFRVQPTESIVRFPNITNLCPFGEVFNATRFASVYAWNRKRISNCVADYSVLYNSASFSTFKCYGVSPTKLNDLCFTNVYADSFVIRGDEVRQIAPGQTGKIADYNYKLPDDFTGCVIAWNSNNLDSKVGGNYNYLYRLFRKSNLKPFERDISTEIYQAGSTPCNGVEGFNCYFPLQSYGFQPTNGVGYQPYRVVVLSFELLHAPATVCGPKKSTNLVKNKCVNFNFNGLTGTGVLTESNKKFLPFQQFGRDIADTTDAVRDPQTLEILDITPCSFGGVSVITPGTNTSNQVAVLYQDVNCTEVPVAIHADQLTPTWRVYSTGSNVFQTRAGCLIGAEHVNNSYECDIPIGAGICASYQTQTNSPRRARSVASQSIIAYTMSLGAENSVAYSNNSIAIPTNFTISVTTEILPVSMTKTSVDCTMYICGDSTECSNFLLQYGSFCTQLNRALTGIAVEQDKNTQEVFAQVKQIYKTPPIKDFGGFNFSQILPDPSKPSKRSFIEDLLFNKVTLADAGFIKQYGDCLGDIAARDLICAQKFNGLTVLPPLLTDEMIAQYTSALLAGTITSGWTFGAGAALQIPFAMQMAYRFNGIGVTQNVLYENQKLIANQFNSAIGKIQDSLSSTASALGKLQDVVNQNAQALNTLVKQLSSNCGAISSVLNDILSRLDKVEAEVQIDRLITCRLQSLQTYVTQQLIRAAEIRASANLAATKMSECVLGQSKRVDFCGKGYHLMSFPQSAPHGVVFLHVTYVPAQEKNFTTAPAICHDGKAHFPREGVFVSNGTHWFVTQRNFYEPQIITTDNTFVSGNCDVVIGIVNNTVYDPLQPELDSFKEELDKYFKNHTSPDVDLGDISGINASVVNIQKEIDRLNEVAKNLNESLIDLQELGKYEQYIKGGGSGGGQIYEGKLTAEGLRFGIVASRFNHALVDRLVEGAIDAIVRHGGREEDITLVRVPGSWEIPVAAGELARKEDIDAVIAIGVLIRGATPHFDYIASEVSKGLADLSLELRKPITFGVITADTLEQAIERAGTKHGNKGWEAALSAIEMANLFKSLR

SEQ ID NO: 4371 - protein, 1371 aa, Artificial Sequence
  SARS-CoV-2/Australia/QLD02/2020__EPI_ISL_407896 spike protein (1-1211)(F970C_G999C) LumSynth construct
MFVFLVLLPLVSSQCVNLTTRTQLPPAYTNSFTRGVYYPDKVFRSSVLHSTQDLFLPFFSNVTWFHAIHVSGTNGTKRFDNPVLPFNDGVYFASTEKSNIIRGWIFGTTLDSKTQSLLIVNNATNVVIKVCEFQFCNDPFLGVYYHKNNKSWMESEFRVYSSANNCTFEYVSQPFLMDLEGKQGNFKNLREFVFKNIDGYFKIYSKHTPINLVRDLPQGFSALEPLVDLPIGINITRFQTLLALHRSYLTPGDSSSGWTAGAAAYYVGYLQPRTFLLKYNENGTITDAVDCALDPLSETKCTLKSFTVEKGIYQTSNFRVQPTESIVRFPNITNLCPFGEVFNATRFASVYAWNRKRISNCVADYSVLYNSASFSTFKCYGVSPTKLNDLCFTNVYADSFVIRGDEVRQIAPGQTGKIADYNYKLPDDFTGCVIAWNSNNLDSKVGGNYNYLYRLFRKSNLKPFERDISTEIYQAGSTPCNGVEGFNCYFPLQSYGFQPTNGVGYQPYRVVVLSFELLHAPATVCGPKKSTNLVKNKCVNFNFNGLTGTGVLTESNKKFLPFQQFGRDIADTTDAVRDPQTLEILDITPCSFGGVSVITPGTNTSNQVAVLYQDVNCTEVPVAIHADQLTPTWRVYSTGSNVFQTRAGCLIGAEHVNNSYECDIPIGAGICASYQTQTNSPRRARSVASQSIIAYTMSLGAENSVAYSNNSIAIPTNFTISVTTEILPVSMTKTSVDCTMYICGDSTECSNLLLQYGSFCTQLNRALTGIAVEQDKNTQEVFAQVKQIYKTPPIKDFGGFNFSQILPDPSKPSKRSFIEDLLFNKVTLADAGFIKQYGDCLGDIAARDLICAQKFNGLTVLPPLLTDEMIAQYTSALLAGTITSGWTFGAGAALQIPFAMQMAYRFNGIGVTQNVLYENQKLIANQFNSAIGKIQDSLSSTASALGKLQDVVNQNAQALNTLVKQLSSNCGAISSVLNDILSRLDKVEAEVQIDRLITCRLQSLQTYVTQQLIRAAEIRASANLAATKMSECVLGQSKRVDFCGKGYHLMSFPQSAPHGVVFLHVTYVPAQEKNFTTAPAICHDGKAHFPREGVFVSNGTHWFVTQRNFYEPQIITTDNTFVSGNCDVVIGIVNNTVYDPLQLELDSFKEELDKYFKNHTSPDVDLGDISGINASVVNIQKEIDRLNEVAKNLNESLIDLQELGKYEQYIKGGGSGGGQIYEGKLTAEGLRFGIVASRFNHALVDRLVEGAIDAIVRHGGREEDITLVRVPGSWEIPVAAGELARKEDIDAVIAIGVLIRGATPHFDYIASEVSKGLADLSLELRKPITFGVITADTLEQAIERAGTKHGNKGWEAALSAIEMANLFKSLR

SEQ ID NO: 4372 - protein, 1371 aa, Artificial Sequence
  SARS-CoV-2/India/1-31/2020__EPI_ISL_413523 spike protein (1-1211)(F970C_G999C) LumSynth construct
MFVFLVLLPLVSSQCVNLTTRTQLPPAYTNSFTRGVYYPDKVFRSSVLHSTQDLFLPFFSNVTWFHAIHVSGTNGTKRFDNPVLPFNDGVYFASTEKSNIIRGWIFGTTLDSKTQSLLIVNNATNVVIKVCEFQFCNDPFLGVYYHKNNKSWMESEFRVYSSANNCTFEYVSQPFLMDLEGKQGNFKNLREFVFKNIDGYFKIYSKHTPINLVRDLPQGFSALEPLVDLPIGINITRFQTLLALHRSYLTPGDSSSGWTAGAAAYYVGYLQPRTFLLKYNENGTITDAVDCALDPLSETKCTLKSFTVEKGIYQTSNFRVQPTESIVRFPNITNLCPFGEVFNATRFASVYAWNRKRISNCVADYSVLYNSASFSTFKCYGVSPTKLNDLCFTNVYADSFVIRGDEVRQIAPGQTGKIADYNYKLPDDFTGCVIAWNSNNLDSKVGGNYNYLYRLFRKSNLKPFERDISTEIYQAGSTPCNGVEGFNCYFPLQSYGFQPTNGVGYQPYRVVVLSFELLHAPATVCGPKKSTNLVKNKCVNFNFNGLTGTGVLTESNKKFLPFQQFGRDIADTTDAVRDPQTLEILDITPCSFGGVSVITPGTNTSNQVAVLYQDVNCTEVPVAIHADQLTPTWRVYSTGSNVFQTRAGCLIGAEHVNNSYECDIPIGAGICASYQTQTNSPRRARSVASQSIIAYTMSLGAENSVAYSNNSIAIPTNFTISVTTEILPVSMTKTSVDCTMYICGDSTECSNLLLQYGSFCTQLNRALTGIAVEQDKNTQEVFAQVKQIYKTPPIKDFGGFNFSQILPDPSKPSKRSFIEDLLFNKVTLADAGFIKQYGDCLGDIAARDLICAQKFNGLTVLPPLLTDEMIAQYTSALLAGTITSGWTFGAGAALQIPFAMQMAYRFNGIGVTQNVLYENQKLIANQFNSVIGKIQDSLSSTASALGKLQDVVNQNAQALNTLVKQLSSNCGAISSVLNDILSRLDKVEAEVQIDRLITCRLQSLQTYVTQQLIRAAEIRASANLAATKMSECVLGQSKRVDFCGKGYHLMSFPQSAPHGVVFLHVTYVPAQEKNFTTAPAICHDGKAHFPREGVFVSNGTHWFVTQRNFYEPQIITTDNTFVSGNCDVVIGIVNNTVYDPLQPELDSFKEELDKYFKNHTSPDVDLGDISGINASVVNIQKEIDRLNEVAKNLNESLIDLQELGKYEQYIKGGGSGGGQIYEGKLTAEGLRFGIVASRFNHALVDRLVEGAIDAIVRHGGREEDITLVRVPGSWEIPVAAGELARKEDIDAVIAIGVLIRGATPHFDYIASEVSKGLADLSLELRKPITFGVITADTLEQAIERAGTKHGNKGWEAALSAIEMANLFKSLR

SEQ ID NO: 4373 - protein, 1371 aa, Artificial Sequence
  SARS-CoV-2/Guangdong/GD2020087-P0008/2020__EPI_ISL_413863 spike protein (1-1211)(F970C_G999C) LumSynth construct
MFVFLVLLPLVSSQCVNLTTRTQLPPAYTNSFTRGVYYPDKVFRSSVLHSTQDLFLPFFSNVTWFHAIHVSGTNGTKRFDNPVLPFNDGVYFASTEKSNIIRGWIFGTTLDSKTQSLLIVNNATNVVIKVCEFQFCNDPFLGVYYHKNNKSWMESEFRVYSSANNCTFEYVSQPFLMDLEGKQGNFKNLREFVFKNIDGYFKIYSKHTPINLVRDLPQGFSALEPLVDLPIGINITRFQTLLALHRSYLTPGDSSSGWTAGAAAYYVGYLQPRTFLLKYNENGTITDAVDCALDPLSETKCTLKSFTVEKGIYQTSNFRVQPTESIVRFPNITNLCPFGEVFNATRFASVYAWNRKRISNCVADYSVLYNSASFSTFKCYGVSPTKLNDLCFTNVYADSFVIRGDEVREIAPGQTGKIADYNYKLPDDFTGCVIAWNSNNLDSKVGGNYNYLYRLFRKSNLKPFERDISTEIYQAGSTPCNGVEGFNCYFPLQSYGFQPTNGVGYQPYRVVVLSFELLHAPATVCGPKKSTNLVKNKCVNFNFNGLTGTGVLTESNKKFLPFQQFGRDIADTTDAVRDPQTLEILDITPCSFGGVSVITPGTNTSNQVAVLYQDVNCTEVPVAIHADQLTPTWRVYSTGSNVFQTRAGCLIGAEHVNNSYECDIPIGAGICASYQTQTNSPRRARSVASQSIIAYTMSLGAENSVAYSNNSIAIPTNFTISVTTEILPVSMTKTSVDCTMYICGDSTECSNLLLQYGSFCTQLNRALTGIAVEQDKNTQEVFAQVKQIYKTPPIKDFGGFNFSQILPDPSKPSKRSFIEDLLFNKVTLADAGFIKQYGDCLGDIAARDLICAQKFNGLTVLPPLLTDEMIAQYTSALLAGTITSGWTFGAGAALQIPFAMQMAYRFNGIGVTQNVLYENQKLIANQFNSAIGKIQDSLSSTASALGKLQDVVNQNAQALNTLVKQLSSNCGAISSVLNDILSRLDKVEAEVQIDRLITCRLQSLQTYVTQQLIRAAEIRASANLAATKMSECVLGQSKRVDFCGKGYHLMSFPQSAPHGVVFLHVTYVPAQEKNFTTAPAICHDGKAHFPREGVFVSNGTHWFVTQRNFYEPQIITTDNTFVSGNCDVVIGIVNNTVYDPLQPELDSFKEELDKYFKNHTSPDVDLGDISGINASVVNIQKEIDRLNEVAKNLNESLIDLQELGKYEQYIKGGGSGGGQIYEGKLTAEGLRFGIVASRFNHALVDRLVEGAIDAIVRHGGREEDITLVRVPGSWEIPVAAGELARKEDIDAVIAIGVLIRGATPHFDYIASEVSKGLADLSLELRKPITFGVITADTLEQAIERAGTKHGNKGWEAALSAIEMANLFKSLR

SEQ ID NO: 4374 - protein, 1371 aa, Artificial Sequence
  SARS-CoV-2/Sweden/01/2020__EPI_ISL_411951 spike protein (1-1211)(F970C_G999C) LumSynth construct
MFVFLVLLPLVSSQCVNLTTRTQLPPAYTNSFTRGVYYPDKVFRSSVLHSTQDLFLPFFSNVTWFHAIHVSGTNGTKRFDNPVLPFNDGVYFASTEKSNIIRGWIFGTTLDSKTQSLLIVNNATNVVIKVCEFQFCNDPFLGVYYHKNNKSWMESEFRVYSSANNCTFEYVSQPFLMDLEGKQGNFKNLREFVFKNIDGYFKIYSKHTPINLVRDLPQGFSALEPLVDLPIGINITRFQTLLALHRSYLTPGDSSSGWTAGAAAYYVGYLQPRTFLLKYNENGTITDAVDCALDPLSETKCTLKSFTVEKGIYQTSNFRVQPTESIVRFPNITNLCPFGEVFNATRFASVYAWNRKRISNCVADYSVLYNSASFSTFKCYGVSPTKLNDLCFTNVYADSFVIRGDEVRQIAPGQTGKIADYNYKLPDDFTGCVIAWNSNNLDSKVGGNYNYLYRLFRKSNLKPFERDISTEIYQAGSTPCNGVEGFNCYFPLQSYGFQPTNGVGYQPYRVVVLSFELLHAPATVCGPKKSTNLVKNKCVNFNFNGLTGTGVLTESNKKFLPFQQFGRDIADTTDAVRDPQTLEILDITPCSFGGVSVITPGTNTSNQVAVLYQDVNCTEVPVAIHADQLTPTWRVYSTGSNVFQTRAGCLIGAEHVNNSYECDIPIGAGICASYQTQTNSPRRARSVASQSIIAYTMSLGAENSVAYSNNSIAIPTNFTISVTTEILPVSMTKTSVDCTMYICGDSTECSNLLLQYGSFCTQLNRALTGIAVEQDKNTQEVFAQVKQIYKTPPIKDCGGFNFSQILPDPSKPSKRSFIEDLLFNKVTLADAGFIKQYGDCLGDIAARDLICAQKFNGLTVLPPLLTDEMIAQYTSALLAGTITSGWTFGAGAALQIPFAMQMAYRFNGIGVTQNVLYENQKLIANQFNSAIGKIQDSLSSTASALGKLQDVVNQNAQALNTLVKQLSSNCGAISSVLNDILSRLDKVEAEVQIDRLITCRLQSLQTYVTQQLIRAAEIRASANLAATKMSECVLGQSKRVDFCGKGYHLMSFPQSAPHGVVFLHVTYVPAQEKNFTTAPAICHDGKAHFPREGVFVSNGTHWFVTQRNFYEPQIITTDNTFVSGNCDVVIGIVNNTVYDPLQPELDSFKEELDKYFKNHTSPDVDLGDISGINASVVNIQKEIDRLNEVAKNLNESLIDLQELGKYEQYIKGGGSGGGQIYEGKLTAEGLRFGIVASRFNHALVDRLVEGAIDAIVRHGGREEDITLVRVPGSWEIPVAAGELARKEDIDAVIAIGVLIRGATPHFDYIASEVSKGLADLSLELRKPITFGVITADTLEQAIERAGTKHGNKGWEAALSAIEMANLFKSLR

SEQ ID NO: 4375 - protein, 1371 aa, Artificial Sequence
  SARS-CoV-2/Tianmen/HBCDC-HB-07/2020__EPI_ISL_412983 spike protein (1-1211)(F970C_G999C) LumSynth construct
MFVFLVLLPLVSSQCVNLTTRTQLPPAYTNSFTRGVYYPDKVFRSSVLHSTQDLFLPFFSNVTWFHAIHVSGTNGTKRFDNPVLPFNDGVYFASTEKSNIIRGWIFGTTLDSKTQSLLIVNNATNVVIKVCEFQFCNDPFLGVYYHKNNKSWMESEFRVYSSANNCTFEYVSQPFLMDLEGKQGNFKNLREFVFKNIDGYFKIYSKHTPINLVRDLPQGFSALEPLVDLPIGINITRFQTLLALHRSYLTPGDSSSGWTAGAAAYYVGYLQPRTFLLKYNENGTITDAVDCALDPLSETKCTLKSFTVEKGIYQTSNFRVQPTESIVRFPNITNLCPFGEVFNATRFASVYAWNRKRISNCVADYSVLYNSASFSTFKCYGVSPTKLNDLCFTNVYADSFVIRGDEVRQIAPGQTGKIADYNYKLPDDFTGCVIAWNSNNLDSKVGGNYNYLYRLFRKSNLKPFERDISTEIYQAGSTPCNGVEGFNCYFPLQSYGFQPTNGVGYQPYRVVVLSFELLHAPATVCGPKKSTNLVKNKCVNFNFNGLTGTGVLTESNKKFLPFQQFGRDIADTTDAVRDPQTLEILDITPCSFGGVSVITPGTNTSNQVAVLYQDLNCTEVPVAIHADQLTPTWRVYSTGSNVFQTRAGCLIGAEHVNNSYECDIPIGAGICASYQTQTNSPRRARSVASQSIIAYTMSLGAENSVAYSNNSIAIPTNFTISVTTEILPVSMTKTSVDCTMYICGDSTECSNLLLQYGSFCTQLNRALTGIAVEQDKNTQEVFAQVKQIYKTPPIKDFGGFNFSQILPDPSKPSKRSFIEDLLFNKVTLADAGFIKQYGDCLGDIAARDLICAQKFNGLTVLPPLLTDEMIAQYTSALLAGTITSGWTFGAGAALQIPFAMQMAYRFNGIGVTQNVLYENQKLIANQFNSAIGKIQDSLSSTASALGKLQDVVNQNAQALNTLVKQLSSNCGAISSVLNDILSRLDKVEAEVQIDRLITCRLQSLQTYVTQQLIRAAEIRASANLAATKMSECVLGQSKRVDFCGKGYHLMSFPQSAPHGVVFLHVTYVPAQEKNFTTAPAICHDGKAHFPREGVFVSNGTHWFVTQRNFYEPQIITTDNTFVSGNCDVVIGIVNNTVYDPLQPELDSFKEELDKYFKNHTSPDVDLGDISGINASVVNIQKEIDRLNEVAKNLNESLIDLQELGKYEQYIKGGGSGGGQIYEGKLTAEGLRFGIVASRFNHALVDRLVEGAIDAIVRHGGREEDITLVRVPGSWEIPVAAGELARKEDIDAVIAIGVLIRGATPHFDYIASEVSKGLADLSLELRKPITFGVITADTLEQAIERAGTKHGNKGWEAALSAIEMANLFKSLR

SEQ ID NO: 4376 - protein, 1371 aa, Artificial Sequence
  SARS-CoV-2/Hong Kong/case42_VM20002493/2020__EPI_ISL_414527 spike protein (1-1211)(F970C_G999C) LumSynth construct
MFVFLVLLPLVSSQCVNLTTRTQLPPAYTNSFTRGVYYPDKVFRSSVLHSTQDLFLPFFSNVTWFHAIHVSGTNGTKRFDNPVLPFNDGVYFASTEKSNIIRGWIFGTTLDSKTQSLLIVNNATNVVIKVCEFQFCNDPFLGVYYHKNNKSWMESEFRVYSSANNCTFEYVSQPFLMDLEGKQGNFKNLREFVFKNIDGYFKIYSKHTPINLVRDLPQGFSALEPLVDLPIGINITRFQTLLALHRSYLTPGDSSSGWTAGAAAYYVGYLQPRTFLLKYNENGTITDAVDCALDPLSETKCTLKSFTVEKGIYQTSNFRVQPTESIVRFPNITNLCPFGEVFNATRFASVYAWNRKRISNCVADYSVLYNSASFSTFKCYGVSPTKLNDLCFTNVYADSFVIRGDEVRQIAPGQTGKIADYNYKLPDDFTGCVIAWNSNNLDSKVGGNYNYLYRLFRKSNLKPFERDISTEIYQAGSTPCNGVEGFNCYFPLQSYGFQPTNGVGYQPYRVVVLSFELLHAPATVCGPKKSTNLVKNKCVNFNFNGLTGTGVLTESNKKFLPFQQFGRDIADTTDAVRDPQTLEILDITPCSFGGVSVITPGTNTSNQVAVLYQDVNCTEVPVAIHADQLTPTWRVYSTGSNVFQTRAGCLIGAEHVNNSYECDIPIGAGICASYQTQTNSPRRARSVASQSIIAYTMSLGAENSVAYSNNSIAIPTNFAISVTTEILPVSMTKTSVDCTMYICGDSTECSNLLLQYGSFCTQLNRALTGIAVEQDKNTQEVFAQVKQIYKTPPIKDFGGFNFSQILPDPSKPSKRSFIEDLLFNKVTLADAGFIKQYGDCLGDIAARDLICAQKFNGLTVLPPLLTDEMIAQYTSALLAGTITSGWTFGAGAALQIPFAMQMAYRFNGIGVTQNVLYENQKLIANQFNSAIGKIQDSLSSTASALGKLQDVVNQNAQALNTLVKQLSSNCGAISSVLNDILSRLDKVEAEVQIDRLITCRLQSLQTYVTQQLIRAAEIRASANLAATKMSECVLGQSKRVDFCGKGYHLMSFPQSAPHGVVFLHVTYVPAQEKNFTTAPAICHDGKAHFPREGVFVSNGTHWFVTQRNFYEPQIITTDNTFVSGNCDVVIGIVNNTVYDPLQPELDSFKEELDKYFKNHTSPDVDLGDISGINASVVNIQKEIDRLNEVAKNLNESLIDLQELGKYEQYIKGGGSGGGQIYEGKLTAEGLRFGIVASRFNHALVDRLVEGAIDAIVRHGGREEDITLVRVPGSWEIPVAAGELARKEDIDAVIAIGVLIRGATPHFDYIASEVSKGLADLSLELRKPITFGVITADTLEQAIERAGTKHGNKGWEAALSAIEMANLFKSLR

SEQ ID NO: 4377 - protein, 1371 aa, Artificial Sequence
  SARS-CoV-2/USA/CruiseA-23/2020__EPI_ISL_414482 spike protein (1-1211)(F970C_G999C) LumSynth construct
MFVFLVLLPLVSSQCVNLTTRTQLPPAYTNSFTRGVYYPDKVFRSSVLHSTQDLFLPFFSNVTWFHAIHVSGTNGTKRFDNPVLPFNDGVYFASTEKSNIIRGWIFGTTLDSKTQSLLIVNNATNVVIKVCEFQFCNDPFLGVYYHKNNKSWMESEFRVYSSANNCTFEYVSQPFLMDLEVKQGNFKNLREFVFKNIDGYFKIYSKHTPINLVRDLPQGFSALEPLVDLPIGINITRFQTLLALHRSYLTPGDSSSGWTAGAAAYYVGYLQPRTFLLKYNENGTITDAVDCALDPLSETKCTLKSFTVEKGIYQTSNFRVQPTESIVRFPNITNLCPFGEVFNATRFASVYAWNRKRISNCVADYSVLYNSASFSTFKCYGVSPTKLNDLCFTNVYADSFVIRGDEVRQIAPGQTGKIADYNYKLPDDFTGCVIAWNSNNLDSKVGGNYNYLYRLFRKSNLKPFERDISTEIYQAGSTPCNGVEGFNCYFPLQSYGFQPTNGVGYQPYRVVVLSFELLHAPATVCGPKKSTNLVKNKCVNFNFNGLTGTGVLTESNKKFLPFQQFGRDIADTTDAVRDPQTLEILDITPCSFGGVSVITPGTNTSNQVAVLYQDVNCTEVPVAIHADQLTPTWRVYSTGSNVFQTRAGCLIGAEHVNNSYECDIPIGAGICASYQTQTNSPRRARSVASQSIIAYTMSLGAENSVAYSNNSIAIPTNFTISVTTEILPVSMTKTSVDCTMYICGDSTECSNLLLQYGSFCTQLNRALTGIAVEQDKNTQEVFAQVKQIYKTPPIKDFGGFNFSQILPDPSKPSKRSFIEDLLFNKVTLADAGFIKQYGDCLGDIAARDLICAQKFNGLTVLPPLLTDEMIAQYTSALLAGTITSGWTFGAGAALQIPFAMQMAYRFNGIGVTQNVLYENQKLIANQFNSAIGKIQDSLSSTASALGKLQDVVNQNAQALNTLVKQLSSNCGAISSVLNDILSRLDKVEAEVQIDRLITCRLQSLQTYVTQQLIRAAEIRASANLAATKMSECVLGQSKRVDFCGKGYHLMSFPQSAPHGVVFLHVTYVPAQEKNFTTAPAICHDGKAHFPREGVFVSNGTHWFVTQRNFYEPQIITTDNTFVSGNCDVVIGIVNNTVYDPLQPELDSFKEELDKYFKNHTSPDVDLGDISGINASVVNIQKEIDRLNEVAKNLNESLIDLQELGKYEQYIKGGGSGGGQIYEGKLTAEGLRFGIVASRFNHALVDRLVEGAIDAIVRHGGREEDITLVRVPGSWEIPVAAGELARKEDIDAVIAIGVLIRGATPHFDYIASEVSKGLADLSLELRKPITFGVITADTLEQAIERAGTKHGNKGWEAALSAIEMANLFKSLR

SEQ ID NO: 4378 - protein, 1371 aa, Artificial Sequence
  SARS-CoV-2/Hong Kong/case85_VM20002868/2020__EPI_ISL_414519 spike protein (1-1211)(F970C_G999C) LumSynth construct
MFVFLVLVPLVSSQCVNLTTRTQLPPAYTNSFTRGVYYPDKVFRSSVLHSTQDLFLPFFSNVTWFHAIHVSGTNGTKRFDNPVLPFNDGVYFASTEKSNIIRGWIFGTTLDSKTQSLLIVNNATNVVIKVCEFQFCNDPFLGVYYHKNNKSWMESEFRVYSSANNCTFEYVSQPFLMDLEGKQGNFKNLREFVFKNIDGYFKIYSKHTPINLVRDLPQGFSALEPLVDLPIGINITRFQTLLALHRSYLTPGDSSSGWTAGAAAYYVGYLQPRTFLLKYNENGTITDAVDCALDPLSETKCTLKSFTVEKGIYQTSNFRVQPTESIVRFPNITNLCPFGEVFNATRFASVYAWNRKRISNCVADYSVLYNSASFSTFKCYGVSPTKLNDLCFTNVYADSFVIRGDEVRQIAPGQTGKIADYNYKLPDDFTGCVIAWNSNNLDSKVGGNYNYLYRLFRKSNLKPFERDISTEIYQAGSTPCNGVEGFNCYFPLQSYGFQPTNGVGYQPYRVVVLSFELLHAPATVCGPKKSTNLVKNKCVNFNFNGLTGTGVLTESNKKFLPFQQFGRDIADTTDAVRDPQTLEILDITPCSFGGVSVITPGTNTSNQVAVLYQDVNCTEVPVAIHADQLTPTWRVYSTGSNVFQTRAGCLIGAEHVNNSYECDIPIGAGICASYQTQTNSPRRARSVASQSIIAYTMSLGAENSVAYSNNSIAIPTNFTISVTTEILPVSMTKTSVDCTMYICGDSTECSNLLLQYGSFCTQLNRALTGIAVEQDKNTQEVFAQVKQIYKTPPIKDFGGFNFSQILPDPSKPSKRSFIEDLLFNKVTLADAGFIKQYGDCLGDIAARDLICAQKFNGLTVLPPLLTDEMIAQYTSALLAGTITSGWTFGAGAALQIPFAMQMAYRFNGIGVTQNVLYENQKLIANQFNSAIGKIQDSLSSTASALGKLQDVVNQNAQALNTLVKQLSSNCGAISSVLNDILSRLDKVEAEVQIDRLITCRLQSLQTYVTQQLIRAAEIRASANLAATKMSECVLGQSKRVDFCGKGYHLMSFPQSAPHGVVFLHVTYVPAQEKNFTTAPAICHDGKAHFPREGVFVSNGTHWFVTQRNFYEPQIITTDNTFVSGNCDVVIGIVNNTVYDPLQPELDSFKEELDKYFKNHTSPDVDLGDISGINASVVNIQKEIDRLNEVAKNLNESLIDLQELGKYEQYIKGGGSGGGQIYEGKLTAEGLRFGIVASRFNHALVDRLVEGAIDAIVRHGGREEDITLVRVPGSWEIPVAAGELARKEDIDAVIAIGVLIRGATPHFDYIASEVSKGLADLSLELRKPITFGVITADTLEQAIERAGTKHGNKGWEAALSAIEMANLFKSLR

SEQ ID NO: 4379 - protein, 1371 aa, Artificial Sequence; identical to SEQ ID NO: 4369
  SARS-CoV-2/England/200990660/2020__EPI_ISL_414523 spike protein (1-1211)(F970C_G999C) LumSynth construct

SEQ ID NO: 4380 - protein, 1371 aa, Artificial Sequence
  SARS-CoV-2/Australia/NSW09/2020__EPI_ISL_413595 spike protein (1-1211)(F970C_G999C) LumSynth construct
MFVFLVLLPLVSSQCVNLTTRTQLPPAYTNSFTRGVYYPDKVFRSSVLHSTQDLFLPFFSNVTWFHAIHVSGTNGTKRFDNPVLPFNDGVYFASTEKSNIIRGWIFGTTLDSKTQSLLIVNNATNVVIKVCEFQFCNDPFLGVYYHKNNKSWMESEFRVYSSANNCTFEYVSQPFLMDLEGKQGNFKNLREFVFKNIDGYFKIYSKHTPINLVRDLPQGFSALEPLVDLPIGINITRFQTLLALHRSYLTPGDSSSGWTAGAAAYYVGYLQPRTFLLKYNENGTITDAVDCALDPLSETKCTLKSFTVEKGIYQTSNFRVQPTESIVRFPNITNLCPFGEVFNATRFASVYAWNRKRISNCVADYSVLYNSASFSTFKCYGVSPTKLNDLCFTNVYADSFVIRGDEVRQIAPGQTGKIADYNYKLPDDFTGCVIAWNSNNLDSKVGGNYNYLYRLFRKSNLKPFERDISTEIYQAGSTPCNGVEGFNCYFPLQSYGFQPTNGVGYQPYRVVVLSFELLHAPATVCGPKKSTNLVKNKCVNFNFNGLTGTGVLTESNKKFLPFQQFGRDIADTTDAVRDPQTLEILDITPCSFGGVSVITPGTNTSNQVAVLYQDVNCTEVPVAIHADQLTPTWRVYSTGSNVFQTRAGCLIGAEHVNNSYECDIPIGAGICASYQTQTNSPRRARSVASQSIIAYTMSLGAENSVAYSNNSIAIPTNFTISVTTEILPVSMTKTSVDCTMYICGDSTECSNLLLQYGSFCTQLNRALTGIAVEQDKNTQEVFAQVKQIYKTPPIKDFGGFNFSQILPDPSKPSKRSFIEDLLFNKVTLADAGFIKQYGDCLGDIAARDLICAQKFNGLTVLPPLLTDEMIAQYTSALLAGTITSGWTFGAGAALQIPFAMQMAYRFNGIGVTQNVLYENQKLIANQFNSAIGKIQDSLSFTASALGKLQDVVNQNAQALNTLVKQLSSNCGAISSVLNDILSRLDKVEAEVQIDRLITCRLQSLQTYVTQQLIRAAEIRASANLAATKMSECVLGQSKRVDFCGKGYHLMSFPQSAPHGVVFLHVTYVPAQEKNFTTAPAICHDGKAHFPREGVFVSNGTHWFVTQRNFYEPQIITTDNTFVSGNCDVVIGIVNNTVYDPLQPELDSFKEELDKYFKNHTSPDVDLGDISGINASVVNIQKEIDRLNEVAKNLNESLIDLQELGKYEQYIKGGGSGGGQIYEGKLTAEGLRFGIVASRFNHALVDRLVEGAIDAIVRHGGREEDITLVRVPGSWEIPVAAGELARKEDIDAVIAIGVLIRGATPHFDYIASEVSKGLADLSLELRKPITFGVITADTLEQAIERAGTKHGNKGWEAALSAIEMANLFKSLR

SEQ ID NO: 4381 - protein, 1371 aa, Artificial Sequence; identical to SEQ ID NO: 4361
  SARS-CoV-2/Australia/NSW10/2020__EPI_ISL_413596 spike protein (1-1211)(F970C_G999C) LumSynth construct

SEQ ID NO: 4382 - protein, 1371 aa, Artificial Sequence
  SARS-CoV-2/Switzerland/1000477797/2020__EPI_ISL_413023 spike protein (1-1211)(F970C_G999C) LumSynth construct
MFVFLVLLPLVSSQCVNLTTRTQLPPAYTNSFTRGVYYPDKVFRSSVLHSTQDLFLPFFSNVTWFHAIHVSGTNGTKRFDNPVLPFNDGVYFASTEKSNIIRGWIFGTTLDSKTQSLLIVNNATNVVIKVCEFQFCNDPFLGVYYHKNNKSWMESEFRVYSSANNCTFEYVSQPFLMDLEGKQGNFKNLREFVFKNIDGYFNIYSKHTPINLVRDLPQGFSALEPLVDLPIGINITRFQTLLALHRSYLTPGDSSSGWTAGAAAYYVGYLQPRTFLLKYNENGTITDAVDCALDPLSETKCTLKSFTVEKGIYQTSNFRVQPTESIVRFPNITNLCPFGEVFNATRFASVYAWNRKRISNCVADYSVLYNSASFSTFKCYGVSPTKLNDLCFTNVYADSFVIRGDEVRQIAPGQTGKIADYNYKLPDDFTGCVIAWNSNNLDSKVGGNYNYLYRLFRKSNLKPFERDISTEIYQAGSTPCNGVEGFNCYFPLQSYGFQPTNGVGYQPYRVVVLSFELLHAPATVCGPKKSTNLVKNKCVNFNFNGLTGTGVLTESNKKFLPFQQFGRDIADTTDAVRDPQTLEILDITPCSFGGVSVITPGTNTSNQVAVLYQGVNCTEVPVAIHADQLTPTWRVYSTGSNVFQTRAGCLIGAEHVNNSYECDIPIGAGICASYQTQTNSPRRARSVASQSIIAYTMSLGAENSVAYSNNSIAIPTNFTISVTTEILPVSMTKTSVDCTMYICGDSTECSNLLLQYGSFCTQLNRALTGIAVEQDKNTQEVFAQVKQIYKTPPIKDFGGFNFSQILPDPSKPSKRSFIEDLLFNKVTLADAGFIKQYGDCLGDIAARDLICAQKFNGLTVLPPLLTDEMIAQYTSALLAGTITSGWTFGAGAALQIPFAMQMAYRFNGIGVTQNVLYENQKLIANQFNSAIGKIQDSLSSTASALGKLQDVVNQNAQALNTLVKQLSSNCGAISSVLNDILSRLDKVEAEVQIDRLITCRLQSLQTYVTQQLIRAAEIRASANLAATKMSECVLGQSKRVDFCGKGYHLMSFPQSAPHGVVFLHVTYVPAQEKNFTTAPAICHDGKAHFPREGVFVSNGTHWFVTQRNFYEPQIITTDNTFVSGNCDVVIGIVNNTVYDPLQPELDSFKEELDKYFKNHTSPDVDLGDISGINASVVNIQKEIDRLNEVAKNLNESLIDLQELGKYEQYIKGGGSGGGQIYEGKLTAEGLRFGIVASRFNHALVDRLVEGAIDAIVRHGGREEDITLVRVPGSWEIPVAAGELARKEDIDAVIAIGVLIRGATPHFDYIASEVSKGLADLSLELRKPITFGVITADTLEQAIERAGTKHGNKGWEAALSAIEMANLFKSLR

SEQ ID NO: 4383 - protein, 1371 aa, Artificial Sequence
  SARS-CoV-2/Belgium/BA-02291/2020__EPI_ISL_415159 spike protein (1-1211)(F970C_G999C) LumSynth construct
MFVFLVLLPLVSSQCVNLTTRTQLPPAYTNSFTRGVYYPDKVFRSSVLHSTQDLFLPFFSNVTWFHAIHVSGTNGTKRFDNPVLPFNDGVYFASTEKSNIIRGWIFGTTLDSKTQSLLIVNNATNVVIKVCEFQFCNDPFLGVYYHKNNKSWMESEFRVYSSANNCTFEYVSQPFLMDLEGKQGNFKNLREFVFKNIDGYFKIYSKHTPINLVRDLPQGFSALEPLVDLPIGINITRFQTLLALHRSYLTPGDSSSGWTAGAAAYYVGYLQPRTFLLKYNENGTITDAVDCALDPLSETKCTLKSFTVEKGIYQTSNFRVQPTESIVRFPNITNLCPFGEVFNATRFASVYAWNRKRISNCVADYSVLYNSASFSTFKCYGVSPTKLNDLCFTNVYADSFVIRGDEVRQIAPGQTGKIADYNYKLPDDFTGCVIAWNSNNLDSKVGGNYNYLYRLFRRSNLKPFERDISTEIYQAGSTPCNGVEGFNCYFPLQSYGFQPTNGVGYQPYRVVVLSFELLPAPATVCGPKKSTNLVKNKCVNFNFNGLTGTGVLTESNKKFLPFQQFGRDIADTTDAVRDPQTLEILDITPCSFGGVSVITPGTNTSNQVAVLYQGVNCTEVPVAIHADQLTPTWRVYSTGSNVFQTRAGCLIGAEHVNNSYECDIPIGAGICASYQTQTNSPRRARSVASQSIIAYTMSLGAENSVAYSNNSIAIPTNFTISVTTEILPVSMTKTSVDCTMYICGDSTECSNLLLQYGSFCTQLNRALTGIAVEQDKNTQEVFAQVKQIYKTPPIKDFGGFNFSQILPDPSKPSKRSFIEDLLFNKVTLADAGFIKQYGDCLGDIAARDLICAQKFNGLTVLPPLLTDEMIAQYTSALLAGTITSGWTFGAGAALQIPFAMQMAYRFNGIGVTQNVLYENQKLIANQFNSAIGKIQDSLSSAAPALGKLQDVVNQNAQALNTLVKQLSSNCGAISSVLNDILSRLDKVEAEVQIDRLITCRLQSLQTYVTQQLIRAAEIRASANLAATKMSECVLGQSKRVDFCGKGYHLMSFPQSAPHGVVFLHVTYVPAQEKNFTTAPAICHDGKAHFPREGVFVSNGTHWFVTQRNFYEPQIITTDNTFVSGNCDVVIGIVNNTVYDPLQPELDSFKEELDKYFKNHTSPDVDLGDISGINASVVNIQKEIDRLNEVAKNLNESLIDLQELGKYEQYIKGGGSGGGQIYEGKLTAEGLRFGIVASRFNHALVDRLVEGAIDAIVRHGGREEDITLVRVPGSWEIPVAAGELARKEDIDAVIAIGVLIRGATPHFDYIASEVSKGLADLSLELRKPITFGVITADTLEQAIERAGTKHGNKGWEAALSAIEMANLFKSLR

SEQ ID NO: 4384 - protein, 1371 aa, Artificial Sequence
  SARS-CoV-2/USA/WA8-UW5/2020__EPI_ISL_413486 spike protein (1-1211)(F970C_G999C) LumSynth construct
MFVFLVLLPLVSSQCVNLTTRTQLPPAYTNSFTRGVYYPDKVFRSSVLHSTQDLFLPFFSNVTWFHAIHVSGTNGTKRFDNPVLPFNDGVYFASTEKSNIIRGWIFGTTLDSKTQSLLIVNNATNVVIKVCEFQFCNDPFLGVYYHKNNKSWMESEFRVYSSANNCTFEYVSQPFLMDLEGKQGNFKNLREFVFKNIDGYFKIYSKHTPINLVRDLPQGFSALEPLVDLPIGINITRFQTLLALHRSYLTPGDSSSGWTAGAAAYYVGYLQPRTFLLKYNENGTITDAVDCALDPLSETKCTLKSFTVEKGIYQTSNFRVQPTESIVRFPNITNLCPFGEVFNATRFASVYAWNRKRISNCVADYSVLYNSASFSTFKCYGVSPTKLNDLCFTNVYADSFVIRGDEVRQIAPGQTGKIADYNYKLPDDFTGCVIAWNSNNLDSKVGGNYNYLYRLFRKSNLKPFERDISTEIYQAGSTPCNGVEGFNCYFPLQSYGFQPTNGVGYQPYRVVVLSFELLHAPATVCGPKKSTNLVKNKCVNFNFNGLTGTGVLTESNKKFLPFQQFGRDIADTTDAVRDPQTLEILDITPCSFGGVSVITPGTNTSNQVAVLYQDVNCTEVPVAIHADQLTPTWRVYSTGSNVFQTRAGCLIGAEYVNNSYECDIPIGAGICASYQTQTNSPRRARSVASQSIIAYTMSLGAENSVAYSNNSIAIPTNFTISVTTEILPVSMTKTSVDCTMYICGDSTECSNLLLQYGSFCTQLNRALTGIAVEQDKNTQEVFAQVKQIYKTPPIKDFGGFNFSQILPDPSKPSKRSFIEDLLFNKVTLADAGFIKQYGDCLGDIAARDLICAQKFNGLTVLPPLLTDEMIAQYTSALLAGTITSGWTFGAGAALQIPFAMQMAYRFNGIGVTQNVLYENQKLIANQFNSAIGKIQDSLSSTASALGKLQDVVNQNAQALNTLVKQLSSNCGAISSVLNDILSRLDKVEAEVQIDRLITCRLQSLQTYVTQQLIRAAEIRASANLAATKMSECVLGQSKRVDFCGKGYHLMSFPQSAPHGVVFLHVTYVPAQEKNFTTAPAICHDGKAHFPREGVFVSNGTHWFVTQRNFYEPQIITTDNTFVSGNCDVVIGIVNNTVYDPLQPELDSFKEELDKYFKNHTSPDVDLGDISGINASVVNIQKEIDRLNEVAKNLNESLIDLQELGKYEQYIKGGGSGGGQIYEGKLTAEGLRFGIVASRFNHALVDRLVEGAIDAIVRHGGREEDITLVRVPGSWEIPVAAGELARKEDIDAVIAIGVLIRGATPHFDYIASEVSKGLADLSLELRKPITFGVITADTLEQAIERAGTKHGNKGWEAALSAIEMANLFKSLR

SEQ ID NO: 4385 - protein, 1371 aa, Artificial Sequence
  SARS-CoV-2/England/20102000506/2020__EPI_ISL_415147 spike protein (1-1211)(F970C_G999C) LumSynth construct
MFVFLVLLPLVSSQCVNLTTRTQLPPAYTNSFTRGVYYPDKVFRSSVLHSTQDLFLPFFSNVTWFHAIHVSGTNGTKRFDNPVLPFNDGVYFASTEKSNIIRGWIFGTTLDSKTQSLLIVNNATNVVIKVCEFQFCNDPFLGVYYHKNNKSWMESEFRVYSSANNCTFEYVSQPFLMDLEGKQGNFKNLREFVFKNIDGYFKIYSKHTPINLVRDLPQGFSALEPLVDLPIGINITRFQTLLALHRSYLTPGDSSSGWTAGAAAYYVGYLQPRTFLLKYNENGTITDAVDCALDPLSETKCTLKSFTVEKGIYQTSNFRVQPTESIVRFPNITNLCPFGEVFNATRFASVYAWNRKRISNCVADYSVLYNSASFSTFKCYGVSPTKLNDLCFTNVYADSFVIRGDEVRQIAPGQTGKIADYNYKLPDDFTGCVIAWNSNNLDSKVGGNYNYLYRLFRKSNLKPFERDISTEIYQAGSTPCNGVEGFNCYFPLQSYGFQPTNGVGYQPYRVVVLSFELLHAPATVCGPKKSTNLVKNKCVNFNFNGLTGTGVLTESNKKFLPFQQFGRDIADTTDAVRDPQTLEILDITPCSFGGVSVITPGTNTSNQVAVLYQGVNCTEVPVAIHADQLTPTWRVYSTGSNVFQTRAGCLIGAEHVNNSYECDIPIGAGICASYQTQTNSPRRARSVASQSIIAYTMSLGAENSVAYSNNSIAIPTNFTISVTTEILPVSMTKTSVDCTMYICGDSTECSNLLLQYGSFCTQLNRALTGIAVEQDKNTQEVFAQVKQIYKTPPIKDFGGFNFSQILPDPSKPSKRSFIEDLLFNKVTLADAGFIKQYGYCLGDIAARDLICAQKFNGLTVLPPLLTDEMIAQYTSALLAGTITSGWTFGAGAALQIPFAMQMAYRFNGIGVTQNVLYENQKLIANQFNSAIGKIQDSLSSTASALGKLQDVVNQNAQALNTLVKQLSSNCGAISSVLNDILSRLDKVEAEVQIDRLITCRLQSLQTYVTQQLIRAAEIRASANLAATKMSECVLGQSKRVDFCGKGYHLMSFPQSAPHGVVFLHVTYVPAQEKNFTTAPAICHDGKAHFPREGVFVSNGTHWFVTQRNFYEPQIITTDNTFVSGNCDVVIGIVNNTVYDPLQPELDSFKEELDKYFKNHTSPDVDLGDISGINASVVNIQKEIDRLNEVAKNLNESLIDLQELGKYEQYIKGGGSGGGQIYEGKLTAEGLRFGIVASRFNHALVDRLVEGAIDAIVRHGGREEDITLVRVPGSWEIPVAAGELARKEDIDAVIAIGVLIRGATPHFDYIASEVSKGLADLSLELRKPITFGVITADTLEQAIERAGTKHGNKGWEAALSAIEMANLFKSLR

SEQ ID NO: 4386 - protein, 1371 aa, Artificial Sequence
  SARS-CoV-2/Belgium/VAG-03013/2020__EPI_ISL_415155 spike protein (1-1211)(F970C_G999C) LumSynth construct
MFVFLVLLPLVSSQCVNLTTRTQLPPAYTNSFTRGVYYPDKVFRSSVLHSTQDLFLPFFSNVTWFHAIHVSGTNGTKRFDNPVLPFNDGVYFASTEKSNIIRGWIFGTTLDSKTQSLLIVNNATNVVIKVCEFQFCNDPFLGVYYHKNNKSWMESEFRVYSSANNCTFEYVSQPFLMDLEGKQGNFKNLREFVFKNIDGYFKIYSKHTPINLVRDLPQGFSALEPLVDLPIGINITRFQTLLALHRSYLTPGDSSSGWTAGAAAYYVGYLQPRTFLLKYNENGTITDAVDCALDPLSETKCTLKSFTVEKGIYQTSNFRVQPTESIVRFPNITNLCPFGEVFNATRFASVYAWNRKRISNCVADYSVLYNSASFSTFKCYGVSPTKLNDLCFTNVYADSFVIRGDEVRQIAPGQTGKIADYNYKLPDDFTGCVIAWNSNNLDSKVGGNYNYLYRLFRKSNLKPFERDISTEIYQAGSTPCNGVEGFNCYFPLQSYGFQPTNGVGYQPYRVVVLSFELLHAPATVCGPKKSTNLVKNKCVNFNFNGLTGTGVLTESNKKFLPFQQFGRDIADTTDAVRDPQTLEILDITPCSFGGVSVITPGTNTSNQVAVLYQGVNCTEVPVAIHADQLTPTWRVYSTGSNVFQTRAGCLIGAEHVNNSYECDIPIGAGICASYQTQTNSPRRARSVASQSIIAYTMSLGAENSVAYSNNSIAIPTNFTISVTTEILPVSMTKTSVDCTMYICGDSTECSNLLLQYGSFCTQLNRALTGIAVEQDKNTQEVFAQVKQIYKTPPIKDFGGFNFSQILPDPSKPSKRSFIEDLLFNKVTLADAGFIKQYGDCLGDIAARDLICAQKFNGLTVLPPLLTDEMIAQYTSALLAGTITSGWTFGAGAALQIPFAMQMAYRFNGIGVTQNVLYENQKLIANQFNSAIGKIQDSLSSTATALGKLQDVVNQNAQALNTLVKQLSSNCGAISSVLNDILSRLDKVEAEVQIDRLITCRLQSLQTYVTQQLIRAAEIRASANLAATKMSECVLGQSKRVDFCGKGYHLMSFPQSAPHGVVFLHVTYVPAQEKNFTTAPAICHDGKAHFPREGVFVSNGTHWFVTQRNFYEPQIITTDNTFVSGNCDVVIGIVNNTVYDPLQPELDSFKEELDKYFKNHTSPDVDLGDISGINASVVNIQKEIDRLNEVAKNLNESLIDLQELGKYEQYIKGGGSGGGQIYEGKLTAEGLRFGIVASRFNHALVDRLVEGAIDAIVRHGGREEDITLVRVPGSWEIPVAAGELARKEDIDAVIAIGVLIRGATPHFDYIASEVSKGLADLSLELRKPITFGVITADTLEQAIERAGTKHGNKGWEAALSAIEMANLFKSLR

SEQ ID NO: 4387 - protein, 1371 aa, Artificial Sequence
  SARS-CoV-2/Belgium/BC-03016/2020__EPI_ISL_415157 spike protein (1-1211)(F970C_G999C) LumSynth construct
MFVFLVLLPLVSSQCVNLTTRTQLPPAYTNSFTRGVYYPDKVFRSSVLHSTQDLFLPFFSNVTWFHAIHVSGTNGTKRFDNPVLPFNDGVYFASTEKSNIIRGWIFGTTLDSKTQSLLIVNNATNVVIKVCEFQFCNDPFLGVYYHKNNKSWMESEFRVYSSANNCTFEYVSQPFLMDLEGKQGNFKNLREFVFKNIDGYFKIYSKHTPINLVRDLPQGFSALEPLVDLPIGINITRFQTLLALHRSYLTPGDSSSGWTAGAAAYYVGYLQPRTFLLKYNENGTITDAVDCALDPLSETKCTLKSFTVEKGIYQTSNFRVQPTESIVRFPNITNLCPFGEVFNATRFASVYAWNRKRISNCVADYSVLYNSASFSTFKCYGVSPTKLNDLCFTNVYADSFVIRGDEVRQIAPGQTGKIADYNYKLPDDFTGCVIAWNSNNLDSKVGGNYNYLYRLFRKSNLKPFERDISTEIYQAGSTPCNGVEGFNCYFPLQSYGFQPTNGVGYQPYRVVVLSFELLHAPATVCGPKKSTNLVKNKCVNFNFNGLTGTGVLTESNKKFLPFQQFGRDIADTTDAVRDPQTLEILDITPCSFGGVSVITPGTNTSNQVAVLYQGVNCTEVPVAIHADQLTPTWRVYSTGSNVFQTRAGCLIGAEHVNNSYECDIPIGAGICASYQTQTNSPRRARSVASQSIIAYTMSLGAENSVAYSNNSIAIPTNFTISVTTEILPVSMTKTSVDCTMYICGDSTECSNLLLQYGSFCTQLNRALTGIAVEQDKNTQEVFAQVKQIYKTPPIKDFGGFNFSQILPDPSKPSKRSFIEDLLFNKVTLADAGFIKQYGDCLGDIAARDLICAQKFNGLTVLPPLLTDEMIAQYTSALLAGTITSGWTFGAGAALQIPFAMQMAYRFNGIGVTQNVLYENQKLIANQFNSAIGKIQDSLSSTAPALGKLQDVVNQNAQALNTLVKQLSSNCGAISSVLNDILSRLDKVEAEVQIDRLITCRLQSLQTYVTQQLIRAAEIRASANLAATKMSECVLGQSKRVDFCGKGYHLMSFPQSAPHGVVFLHVTYVPAQEKNFTTAPAICHDGKAHFPREGVFVSNGTHWFVTQRNFYEPQIITTDNTFVSGNCDVVIGIVNNTVYDPLQPELDSFKEELDKYFKNHTSPDVDLGDISGINASVVNIQKEIDRLNEVAKNLNESLIDLQELGKYEQYIKGGGSGGGQIYEGKLTAEGLRFGIVASRFNHALVDRLVEGAIDAIVRHGGREEDITLVRVPGSWEIPVAAGELARKEDIDAVIAIGVLIRGATPHFDYIASEVSKGLADLSLELRKPITFGVITADTLEQAIERAGTKHGNKGWEAALSAIEMANLFKSLR

SEQ ID NO: 4388 - protein, 1371 aa, Artificial Sequence
  SARS-CoV-2/Germany/BavPat3/2020__EPI_ISL_414521 spike protein (1-1211)(F970C_G999C) LumSynth construct
MFVFLVLLPLVSSQCVNLTTRTQLPPAYTNSFTRGVYYPDKVFRSSVLHSTQDLFLPFFSNVTWFHAIHVSGTNGTKRFDNPVLPFNDGVYFASTEKSNIIRGWIFGTTLDSKTQSLLIVNNATNVVIKVCEFQFCNDPFLGVYYHKNNKSWMESEFRVYSSANNCTFEYVSQPFLMDLEGKQGNFKNLREFVFKNIDGYFKIYSKHTPINLVRDLPQGFSALEPLVDLPIGINITRFQTLLALHRSYLTPGDSSSGWTAGAAAYYVGYLQPRTFLLKYNENGTITDAVDCALDPLSETKCTLKSFTVEKGIYQTSNFRVQPTESIVRFPNITNLCPFGEVFNATRFASVYAWNRKRISNCVADYSVLYNSASFSTFKCYGVSPTKLNDLCFTNVYADSFVIRGDEVRQIAPGQTGKIADYNYKLPDDFTGCVIAWNSNNLDSKVGGNYNYLYRLFRKSNLKPFERDISTEIYQAGSTPCNGVEGFNCYFPLQSYGFQPTNGVGYQPYRVVVLSFELLHAPATVCGPKKSTNLVKNKCVNFNFNGLTGTGVLTESNKKFLPFQQFGRDIADTTDAVRDPQTLEILDITPCSFGGVSVITPGTNTSNQVAVLYQDVNCTEVPVAIHADQLTPTWRVYSTGSNVFQTRAGCLIGAEHVNNSYECDIPIGAGICASYQTQTNSPRRARSVASQSIIAYTMSLGAENSVAYSNNSIAIPTNFTISVTTEILPVSMTKTSVDCTMYICGDSTECSNLLLQYGSFCTQLNRALTGIAVEQDKNTQQVFAQVKQIYKTPPIKDFGGFNFSQILPDPSKPSKRSFIEDLLFNKVTLADAGFIKQYGDCLGDIAARDLICAQKFNGLTVLPPLLTDEMIAQYTSALLAGTITSGWTFGAGAALQIPFAMQMAYRFNGIGVTQNVLYENQKLIANQFNSAIGKIQDSLSSTASALGKLQDVVNQNAQALNTLVKQLSSNCGAISSVLNDILSRLDKVEAEVQIDRLITCRLQSLQTYVTQQLIRAAEIRASANLAATKMSECVLGQSKRVDFCGKGYHLMSFPQSAPHGVVFLHVTYVPAQEKNFTTAPAICHDGKAHFPREGVFVSNGTHWFVTQRNFYEPQIITTDNTFVSGNCDVVIGIVNNTVYDPLQPELDSFKEELDKYFKNHTSPDVDLGDISGINASVVNIQKEIDRLNEVAKNLNESLIDLQELGKYEQYIKGGGSGGGQIYEGKLTAEGLRFGIVASRFNHALVDRLVEGAIDAIVRHGGREEDITLVRVPGSWEIPVAAGELARKEDIDAVIAIGVLIRGATPHFDYIASEVSKGLADLSLELRKPITFGVITADTLEQAIERAGTKHGNKGWEAALSAIEMANLFKSLR

SEQ ID NO: 4389 - protein, 1371 aa, Artificial Sequence
  SARS-CoV-2/France/HF1805/2020__EPI_ISL_414628 spike protein (1-1211)(F970C_G999C) LumSynth construct
MFVFLVLLPLVSSQCVNLTTRTQLPPAYTNSFTRGVYYPDKVFRSSVLHSTQDLFLPFFSNVTWFHAIHVSGTNGTKRFDNPVLPFNDGVYFASTEKSNIIRGWIFGTTLDSKTQSLLIVNNATNVVIKVCEFQFCNDPFLGVYYHKNNKSWMESEFRVYSSANNCTFEYVSQPFLMDLEGKQGNFKNLREFVFKNIDGYFKIYSKHTPINLVRDLPQGFSALEPLVDLPIGINITRFQTLLALHRSYLTPGDSSSGWTAGAAAYYVGYLQPRTFLLKYNENGTITDAVDCALDPLSETKCTLKSFTVEKGIYQTSNFRVQPTESIVRFPNITNLCPFGEVFNATRFASVYAWNRKRISNCVADYSVLYNSASFSTFKCYGVSPTKLNDLCFTNVYADSFVIRGDEVRQIAPGQTGKIADYNYKLPDDFTGCVIAWNSNNLDSKVGGNYNYLYRLFRKSNLKPFERDISTEIYQAGSTPCNGVEGFNCYFPLQSYGFQPTNGVGYQPYRVVVLSFELLHAPATVCGPKKSTNLVKNKCVNFNFNGLTGTGVLTESNKKFLPFQQFGRDIADTTDAVRDPQTLEILDITPCSFGGVSVITPGTNTSNQVAVLYQGVNCTEVPVAIHADQLTPTWRVYSTGSNVFQTRAGCLIGAEHVNNSYECDIPIGAGICASYQTQTNSPRRARSVASQSIIAYTMSLGAENSVAYSNNSIAIPTNFTISVTTEILPVSMTKTSVDCTMYICGDSTECSNLLLQYGSFCTQLNRALTGIAVEQDKNTQEVFAQVKQIYKTPPIKDFGGFNFSQILPDPSKPSKRSFIEDLLFNKVTLADAGFIKQYGDCLGDIAARDLICAQKFNGLTVLPPLLTDEMIAQYTSALLAGTITSGWTFGAGAALQIPFAMQMAYRFNGIGVTQNVLYENQKLIANQFNSAIGKIQDSLSSTASALGKLQDVVNQNAQALNTLVKQLSSNCGAISSVLNDILSRLDKVEAEVQIDRLITCRLQSLQTYVTQQLIRAAEIRASANLAATKMSECVLGQSKRVDFCGKGYHLMSFPQSAPHGVVFLHVTYVPAQEKNFTTAPAICHDGKAHFPREGVFVSNGTHWFVTQRNFYEPQIITTDNTFVSGNCDVVIGVVNNTVYDPLQPELDSFKEELDKYFKNHTSPDVDLGDISGINASVVNIQKEIDRLNEVAKNLNESLIDLQELGKYEQYIKGGGSGGGQIYEGKLTAEGLRFGIVASRFNHALVDRLVEGAIDAIVRHGGREEDITLVRVPGSWEIPVAAGELARKEDIDAVIAIGVLIRGATPHFDYIASEVSKGLADLSLELRKPITFGVITADTLEQAIERAGTKHGNKGWEAALSAIEMANLFKSLR

SEQ ID NO: 4390 - protein, 1371 aa, Artificial Sequence
  SARS-CoV-2/Netherlands/ZuidHolland_9/2020__EPI_ISL_414445 spike protein (1-1211)(F970C_G999C) LumSynth construct
MFVFLVLLPLVSSQCVNLTTRTQLPPAYTNSFTRGVYYPDKVFRSSVLHSTQDLFLPFFSNVTWFHAIHVSGTNGTKRFDNPVLPFNDGVYFASTEKSNIIRGWIFGTTLDSKTQSLLIVNNATNVVIKVCEFQFCNDPFLGVYYHKNNKSWMESEFRVYSSANNCTFEYVSQPFLMDLEGKQGNFKNLREFVFKNIDGYFKIYSKHTPINLVRDLPQGFSALEPLVDLPIGINITRFQTLLALHRSYLTPGDSSSGWTAGAAAYYVGYLQPRTFLLKYNENGTITDAVDCALDPLSETKCTLKSFTVEKGIYQTSNFRVQPTESIVRFPNITNLCPFGEVFNATRFASVYAWNRKRISNCVADYSVLYNSASFSTFKCYGVSPTKLNDLCFTNVYADSFVIRGDEVRQIAPGQTGKIADYNYKLPDDFTGCVIAWNSNNLDSKVGGNYNYLYRLFRKSNLKPFERDISTEIYQAGSTPCNGVEGFNCYFPLQSYGFQPTNGVGYQPYRVVVLSFELLHAPATVCGPKKSTNLVKNKCVNFNFNGLTGTGVLTESNKKFLPFQQFGRDIADTTDAVRDPQTLEILDITPCSFGGVSVITPGTNTSNQVAVLYQGVNCTEVPVAIHADQLTPTWRVYSTGSNVFQTRAGCLIGAEHVNNSYECDIPIGAGICASYQTQTNSPRRARSVASQSIIAYTMSLGAENSVAYSNNSIAIPTNFTISVTTEILPVSMTKTSVDCTMYICGDSTECSNLLLQYGSFCTQLNRALTGIAVEQDKNTQEVFAQVKQIYKTPPIKDFGGFNFSQILPDPSKPSKRSFIEDLLFNKVTLADAGFIKQYGDCLGDIAARDLICVQKFNGLTVLPPLLTDEMIAQYTSALLAGTITSGWTFGAGAALQIPFAMQMAYRFNGIGVTQNVLYENQKLIANQFNSAIGKIQDSLSSTASALGKLQDVVNQNAQALNTLVKQLSSNCGAISSVLNDILSRLDKVEAEVQIDRLITCRLQSLQTYVTQQLIRAAEIRASANLAATKMSECVLGQSKRVDFCGKGYHLMSFPQSAPHGVVFLHVTYVPAQEKNFTTAPAICHDGKAHFPREGVFVSNGTHWFVTQRNFYEPQIITTDNTFVSGNCDVVIGIVNNTVYDPLQPELDSFKEELDKYFKNHTSPDVDLGDISGINASVVNIQKEIDRLNEVAKNLNESLIDLQELGKYEQYIKGGGSGGGQIYEGKLTAEGLRFGIVASRFNHALVDRLVEGAIDAIVRHGGREEDITLVRVPGSWEIPVAAGELARKEDIDAVIAIGVLIRGATPHFDYIASEVSKGLADLSLELRKPITFGVITADTLEQAIERAGTKHGNKGWEAALSAIEMANLFKSLR

SEQ ID NO: 4391 - protein, 1371 aa, Artificial Sequence
  SARS-CoV-2/Finland/FIN03032020A/2020__EPI_ISL_413602 spike protein (1-1211)(F970C_G999C) LumSynth construct
MFVFLVLLPLVSSQCVNLTTRTQLPPAYTNSFTRGVYYPDKVFRSSVLHSTQDLFLPFFSNVTWFHAIHVSGTNGTKRFDNPVLPFNDGVYFASTEKSNIIRGWIFGTTLDSKTQSLLIVNNATNVVIKVCEFQFCNDPFLGVYYHKNNKSWMESEFRVYSSANNCTFEYVSQPFLMDLEGKQGNFKNLREFVFKNIDGYFKIYSKHTPINLVRDLPQGFSALEPLVDLPIGINITRFQTLLALHRSYLTPGDSSSGWTAGAAAYYVGYLQPRTFLLKYNENGTITDAVDCALDPLSETKCTLKSFTVEKGIYQTSNFRVQPTESIVRFPNITNLCPFGEVFNATRFASVYAWNRKRISNCVADYSVLYNSASFSTFKCYGVSPTKLNDLCFTNVYADSFVIRGDEVRQIAPGQTGKIADYNYKLPDDFTGCVISWNSNNLDSKVGGNYNYLYRLFRKSNLKPFERDISTEIYQAGSTPCNGVEGFNCYFPLQSYGFQPTNGVGYQPYRVVVLSFELLHAPATVCGPKKSTNLVKNKCVNFNFNGLTGTGVLTESNKKFLPFQQFGRDIADTTDAVRDPQTLEILDITPCSFGGVSVITPGTNTSNQVAVLYQGVNCTEVPVAIHADQLTPTWRVYSTGSNVFQTRAGCLIGAEHVNNSYECDIPIGAGICASYQTQTNSPRRARSVASQSIIAYTMSLGAENSVAYSNNSIAIPTNFTISVTTEILPVSMTKTSVDCTMYICGDSTECSNLLLQYGSFCTQLNRALTGIAVEQDKNTQEVFAQVKQIYKTPPIKDFGGFNFSQILPDPSKPSKRSFIEDLLFNKVTLADAGFIKQYGDCLGDIAARDLICAQKFNGLTVLPPLLTDEMIAQYTSALLAGTITSGWTFGAGAALQIPFAMQMAYRFNGIGVTQNVLYENQKLIANQFNSAIGKIQDSLSSTASALGKLQDVVNQNAQALNTLVKQLSSNCGAISSVLNDILSRLDKVEAEVQIDRLITCRLQSLQTYVTQQLIRAAEIRASANLAATKMSECVLGQSKRVDFCGKGYHLMSFPQSAPHGVVFLHVTYVPAQEKNFTTAPAICHDGKAHFPREGVFVSNGTHWFVTQRNFYEPQIITTDNTFVSGNCDVVIGIVNNTVYDPLQPELDSFKEELDKYFKNHTSPDVDLGDISGINASVVNIQKEIDRLNEVAKNLNESLIDLQELGKYEQYIKGGGSGGGQIYEGKLTAEGLRFGIVASRFNHALVDRLVEGAIDAIVRHGGREEDITLVRVPGSWEIPVAAGELARKEDIDAVIAIGVLIRGATPHFDYIASEVSKGLADLSLELRKPITFGVITADTLEQAIERAGTKHGNKGWEAALSAIEMANLFKSLR

SEQ ID NO: 4392 - protein, 1371 aa, Artificial Sequence
  SARS-CoV-2/France/GE1977/2020__EPI_ISL_414632 spike protein (1-1211)(F970C_G999C) LumSynth construct
MFVFLVLLPLVSSQCVNLTTRTQLPPAYTNSFTRGVYYPDKVFRSSVLHSTQDLFLPFFSNVTWFHAIHVSGTNGTKRFDNPVLPFNDGVYFASTEKSNIIRGWIFGTTLDSKTQSLLIVNNATNVVIKVCEFQFCNDPFLGVYYHKNNKSWMESEFRVYSSANNCTFEYVSQPFLMDLEGKQGNFKNLREFVFKNIDGYFKIYSKHTPINLVRDLPQGFSALEPLVDLPIGINITRFQTLLALHRSYLTPGDSSSGWTAGAAAYYVGYLQPRTFLLKYNENGTITDAVDCALDPLSETKCTLKSFTVEKGIYQTSNFRVQPTESIVRFPNITNLCPFGEVFNATRFASVYAWNRKRISNCVADYSVLYNSASFSTFKCYGVSPTKLNDLCFTNVYADSFVIRGDEVRQIAPGQTGKIADYNYKLPDDFTGCVIAWNSNNLDSKVGGNYNYLYRLFRKSNLKPFERDISTEIYQAGSTPCNGVEGFNCYFPLQSYGFQPTNGVGYQPYRVVVLSFELLHAPATVCGPKKSTNLVKNKCVNFNFNGLTGTGVLTESNKKFLPFQQFGRDIADTTDAVRDPQTLEILDITPCSFGGVSVITPGTNTSNQVAVLYQGVNCTEVPVAIHADQLTPTWRVYSTGSNVFQTRAGCLIGAEHVNNSYECDIPIGAGICASYQTQTNSPRRARSVASQSIIAYTMSLGAENSVAYSNNSIAIPTNFTISVTTEILPVSMTKTSVDCTMYICGDSTECSNLLLQYGSFCTQLNRALTGIAVEQDKNTQEVFAQVKQIYKTPPIKDFGGFNFSQILPDPSKPSKRSFIEDLLFNKVTLADAGFIKQYGDCLGDIAARDLICAQKFNGLTVLPPLLTDEMIAQYTSALLAGTITSGWTFGAGAALQIPFAMQMAYRFNGIGVTQNVLYENQKLIANQFNSAIGKIQDSLFSTASALGKLQDVVNQNAQALNTLVKQLSSNCGAISSVLNDILSRLDKVEAEVQIDRLITCRLQSLQTYVTQQLIRAAEIRASANLAATKMSECVLGQSKRVDFCGKGYHLMSFPQSAPHGVVFLHVTYVPAQEKNFTTAPAICHDGKAHFPREGVFVSNGTHWFVTQRNFYEPQIITTDNTFVSGNCDVVIGIVNNTVYDPLQPELDSFKEELDKYFKNHTSPDVDLGDISGINASVVNIQKEIDRLNEVAKNLNESLIDLQELGKYEQYIKGGGSGGGQIYEGKLTAEGLRFGIVASRFNHALVDRLVEGAIDAIVRHGGREEDITLVRVPGSWEIPVAAGELARKEDIDAVIAIGVLIRGATPHFDYIASEVSKGLADLSLELRKPITFGVITADTLEQAIERAGTKHGNKGWEAALSAIEMANLFKSLR

SEQ ID NO: 4393 - protein, 1371 aa, Artificial Sequence
  SARS-CoV-2/Finland/FIN-313/2020__EPI_ISL_414641 spike protein (1-1211)(F970C_G999C) LumSynth construct
MFVFLVLLPLVSSQCVNLTTRTQLPPAYTNSFTRGVYYPDKVFRSSVLHSTQDLFLPFFSNVTWFHAIHVSGTNGTKRFDNPVLPFNDGVYFASTEKSNIIRGWIFGTTLDSKTQSLLIVNNATNVVIKVCEFQFCNDPFLGVYYHKNNKSWMESEFRVYSSANNCTFEYVSQPFLMDLEGKQGNFKNLREFVFKNIDGYFKIYSKHTPINLVRDLPQGFSALEPLVDLPIGINITRFKTLLALHRSYLTPGDSSSGWTAGAAAYYVGYLQPRTFLLKYNENGTITDAVDCALDPLSETKCTLKSFTVEKGIYQTSNFRVQPTESIVRFPNITNLCPFGEVFNATRFASVYAWNRKRISNCVADYSVLYNSASFSTFKCYGVSPTKLNDLCFTNVYADSFVIRGDEVRQIAPGQTGKIADYNYKLPDDFTGCVIAWNSNNLDSKVGGNYNYLYRLFRKSNLKPFERDISTEIYQAGSTPCNGVEGFNCYFPLQSYGFQPTNGVGYQPYRVVVLSFELLHAPATVCGPKKSTNLVKNKCVNFNFNGLTGTGVLTESNKKFLPFQQFGRDIADTTDAVRDPQTLEILDITPCSFGGVSVITPGTNTSNQVAVLYQGVNCTEVPVAIHADQLTPTWRVYSTGSNVFQTRAGCLIGAEHVNNSYECDIPIGAGICASYQTQTNSPRRARSVASQSIIAYTMSLGAENSVAYSNNSIAIPTNFTISVTTEILPVSMTKTSVDCTMYICGDSTECSNLLLQYGSFCTQLNRALTGIAVEQDKNTQEVFAQVKQIYKTPPIKDFGGFNFSQILPDPSKPSKRSFIEDLLFNKVTLADAGFIKQYGDCLGDIAARDLICAQKFNGLTVLPPLLTDEMIAQYTSALLAGTITSGWTFGAGAALQIPFAMQMAYRFNGIGVTQNVLYENQKLIANQFNSAIGKIQDSLSSTASALGKLQDVVNQNAQALNTLVKQLSSNCGAISSVLNDILSRLDKVEAEVQIDRLITCRLQSLQTYVTQQLIRAAEIRASANLAATKMSECVLGQSKRVDFCGKGYHLMSFPQSAPHGVVFLHVTYVPAQEKNFTTAPAICHDGKAHFPREGVFVSNGTHWFVTQRNFYEPQIITTDNTFVSGNCDVVIGIVNNTVYDPLQPELDSFKEELDKYFKNHTSPDVDLGDISGINASVVNIQKEIDRLNEVAKNLNESLIDLQELGKYEQYIKGGGSGGGQIYEGKLTAEGLRFGIVASRFNHALVDRLVEGAIDAIVRHGGREEDITLVRVPGSWEIPVAAGELARKEDIDAVIAIGVLIRGATPHFDYIASEVSKGLADLSLELRKPITFGVITADTLEQAIERAGTKHGNKGWEAALSAIEMANLFKSLR

SEQ ID NO: 4394 - protein, 1371 aa, Artificial Sequence
  SARS-CoV-2/Netherlands/ZuidHolland_2/2020__EPI_ISL_414556 spike protein (1-1211)(F970C_G999C) LumSynth construct
MFVFLVLLPLVSSQCVNLTTRTQLPPAYTNSFTRGVYYPDKVFRSSVLHSTQDLFLPFFSNVTWFHAIHVSGTNGTKRFDNPVLPFNDGVYFASTEKSNIIRGWIFGTTLDSKTQSLLIVNNATNVVIKVCEFQFCNDPFLGVYYHKNNKSWMESEFRVYSSANNCTFEYVSQPFLMDLEGKQGNFKNLREFVFKNIDGYFKIYSKHTPINLVRDLPQGFSALEPLVDLPIGINITRFQTLLALHRSYLTPGDSSSGWTAGAAAYYVGYLQPRTFLLKYNENGTITDAVDCALDPLSETKCTLKSFTVEKGIYQTSNFRVQPTESIVRFPNITNLCPFGEVFNATRFASVYAWNRKRISNCVADYSVLYNSASFSTFKCYGVSPTKLNDLCFTNVYADSFVIRGDEVRQIAPGQTGKIADYNYKLPDDFTGCVIAWNSNNLDSKVGGNYNYLYRLFRKSNLKPFERDISTEIYQAGSTPCNGVEGFNCYFPLQSYGFQPTNGVGYQPYRVVVLSFELLHAPATVCGPKKSTNLVKNKCVNFNFNGLTGTGVLTESNKKFLPFQQFGRDIADTTDAVRDPQTLEILDITPCSFGGVSVITPGTNTSNQVAVLYQGVNCTEVPVAIHADQLTPTWRVYSTGSNVFQTRAGCLIGAEHVNNSYECDIPIGAGICASYQTQTNSPRRARSVASQSIIAYTMSLGAENSVAYSNNSIAIPTNFTISVTTEILPVSMTKTSVDCTMYICGDSTECSNLLLQYGSFCTQLNRALTGIALEQDKNTQEVFAQVKQIYKTPPIKDFGGFNFSQILPDPSKPSKRSFIEDLLFNKVTLADAGFIKQYGDCLGDIAARDLICAQKFNGLTVLPPLLTDEMIAQYTSALLAGTITSGWTFGAGAALQIPFAMQMAYRFNGIGVTQNVLYENQKLIANQFNSAIGKIQDSLSSTASALGKLQDVVNQNAQALNTLVKQLSSNCGAISSVLNDILSRLDKVEAEVQIDRLITCRLQSLQTYVTQQLIRAAEIRASANLAATKMSECVLGQSKRVDFCGKGYHLMSFPQSAPHGVVFLHVTYVPAQEKNFTTAPAICHDGKAHFPREGVFVSNGTHWFVTQRNFYEPQIITTDNTFVSGNCDVVIGIVNNTVYDPLQPELDSFKEELDKYFKNHTSPDVDLGDISGINASVVNIQKEIDRLNEVAKNLNESLIDLQELGKYEQYIKGGGSGGGQIYEGKLTAEGLRFGIVASRFNHALVDRLVEGAIDAIVRHGGREEDITLVRVPGSWEIPVAAGELARKEDIDAVIAIGVLIRGATPHFDYIASEVSKGLADLSLELRKPITFGVITADTLEQAIERAGTKHGNKGWEAALSAIEMANLFKSLR

SEQ ID NO: 4395 - protein, 1371 aa, Artificial Sequence
  SARS-CoV-2/USA/WA-UW31/2020__EPI_ISL_414618 spike protein (1-1211)(F970C_G999C) LumSynth construct
MFVFLVLLPLVSSQCVNLTTRTQLPPAYTNSFTRGVYYPDKVFRSSVLHSTQDLFLPFFSNVTWFHAIHVSGTNGTKRFDNPVLPFNDGVYFASTEKSNIIRGWIFGTTLDSKTQSLLIVNNATNVVIKVCEFQFCNDPFLGVYYHKNNKSWMESEFRVYSSANNCTFEYVSQPFLMDLEGKQGNFKNLREFVFKNIDGYFKIYSKHTPINLVRDLPQGFSALEPLVDLPIGINITRFQTLLALHRSYLTPGDSSSGWTAGAAAYYVGYLQPRTFLLKYNENGTITDAVDCALDPLSETKCTLKSFTVEKGIYQTSNFRVQPTESIVRFPNITNLCPFGEVFNATRFASVYAWNRKRISNCVADYSVLYNSASFSTFKCYGVSPTKLNDLCFTNVYADSFVIRGDEVRQIAPGQTGKIADYNYKLPDDFTGCVIAWNSNNLDSKVGGNYNYLYRLFRKSNLKPFERDISTEIYQAGSTPCNGAEGFNCYFPLQSYGFQPTNGVGYQPYRVVVLSFELLHAPATVCGPKKSTNLVKNKCVNFNFNGLTGTGVLTESNKKFLPFQQFGRDIADTTDAVRDPQTLEILDITPCSFGGVSVITPGTNTSNQVAVLYQDVNCTEVPVAIHADQLTPTWRVYSTGSNVFQTRAGCLIGAEHVNNSYECDIPIGAGICASYQTQTNSPRRARSVASQSIIAYTMSLGAENSVAYSNNSIAIPTNFTISVTTEILPVSMTKTSVDCTMYICGDSTECSNLLLQYGSFCTQLNRALTGIAVEQDKNTQEVFAQVKQIYKTPPIKDFGGFNFSQILPDPSKPSKRSFIEDLLFNKVTLADAGFIKQYGDCLGDIAARDLICAQKFNGLTVLPPLLTDEMIAQYTSALLAGTITSGWTFGAGAALQIPFAMQMAYRFNGIGVTQNVLYENQKLIANQFNSAIGKIQDSLSSTASALGKLQDVVNQNAQALNTLVKQLSSNCGAISSVLNDILSRLDKVEAEVQIDRLITCRLQSLQTYVTQQLIRAAEIRASANLAATKMSECVLGQSKRVDFCGKGYHLMSFPQSAPHGVVFLHVTYVPAQEKNFTTAPAICHDGKAHFPREGVFVSNGTHWFVTQRNFYEPQIITTDNTFVSGNCDVVIGIVNNTVYDPLQPELDSFKEELDKYFKNHTSPDVDLGDISGINASVVNIQKEIDRLNEVAKNLNESLIDLQELGKYEQYIKGGGSGGGQIYEGKLTAEGLRFGIVASRFNHALVDRLVEGAIDAIVRHGGREEDITLVRVPGSWEIPVAAGELARKEDIDAVIAIGVLIRGATPHFDYIASEVSKGLADLSLELRKPITFGVITADTLEQAIERAGTKHGNKGWEAALSAIEMANLFKSLR

SEQ ID NO: 4396 - protein, 1371 aa, Artificial Sequence
  SARS-CoV-2/South Korea/SNU01/2020__EPI_ISL_411929 spike protein (1-1211)(F970C_G999C) LumSynth construct
MFVFLVLLPLVSSQCVNLTTRTQLPPAYTNSFTRGVYYPDKVFRSSVLHSTQDLFLPFFSNVTWFHAIHVSGTNGTKRFDNPVLPFNDGVYFASTEKSNIIRGWIFGTTLDSKTQSLLIVNNATNVVIKVCEFQFCNDPFLGVYYHKNNKSWMESEFRVYSSANNCTFEYVSQPFLMDLEGKQGNFKNLREFVFKNIDGYFKIYSKHTPINLVRDLPQGFWALEPLVDLPIGINITRFQTLLALHRSYLTPGDSSSGWTAGAAAYYVGYLQPRTFLLKYNENGTITDAVDCALDPLSETKCTLKSFTVEKGIYQTSNFRVQPTESIVRFPNITNLCPFGEVFNATRFASVYAWNRKRISNCVADYSVLYNSASFSTFKCYGVSPTKLNDLCFTNVYADSFVIRGDEVRQIAPGQTGKIADYNYKLPDDFTGCVIAWNSNNLDSKVGGNYNYLYRLFRKSNLKPFERDISTEIYQAGSTPCNGVEGFNCYFPLQSYGFQPTNGVGYQPYRVVVLSFELLHAPATVCGPKKSTNLVKNKCVNFNFNGLTGTGVLTESNKKFLPFQQFGRDIADTTDAVRDPQTLEILDITPCSFGGVSVITPGTNTSNQVAVLYQDVNCTEVPVAIHADQLTPTWRVYSTGSNVFQTRAGCLIGAEHVNNSYECDIPIGAGICASYQTQTNSPRRARSVASQSIIAYTMSLGAENSVAYSNNSIAIPTNFTISVTTEILPVSMTKTSVDCTMYICGDSTECSNLLLQYGSFCTQLNRALTGIAVEQDKNTQEVFAQVKQIYKTPPIKDFGGFNFSQILPDPSKPSKRSFIEDLLFNKVTLADAGFIKQYGDCLGDIAARDLICAQKFNGLTVLPPLLTDEMIAQYTSALLAGTITSGWTFGAGAALQIPFAMQMAYRFNGIGVTQNVLYENQKLIANQFNSAIGKIQDSLSSTASALGKLQDVVNQNAQALNTLVKQLSSNCGAISSVLNDILSRLDKVEAEVQIDRLITCRLQSLQTYVTQQLIRAAEIRASANLAATKMSECVLGQSKRVDFCGKGYHLMSFPQSAPHGVVFLHVTYVPAQEKNFTTAPAICHDGKAHFPREGVFVSNGTHWFVTQRNFYEPQIITTDNTFVSGNCDVVIGIVNNTVYDPLQPELDSFKEELDKYFKNHTSPDVDLGDISGINASVVNIQKEIDRLNEVAKNLNESLIDLQELGKYEQYIKGGGSGGGQIYEGKLTAEGLRFGIVASRFNHALVDRLVEGAIDAIVRHGGREEDITLVRVPGSWEIPVAAGELARKEDIDAVIAIGVLIRGATPHFDYIASEVSKGLADLSLELRKPITFGVITADTLEQAIERAGTKHGNKGWEAALSAIEMANLFKSLR

SEQ ID NO: 4397 - protein, 1371 aa, Artificial Sequence
  SARS-CoV-2/China/WF0004/2020__EPI_ISL_413694 spike protein (1-1211)(F970C_G999C) LumSynth construct
MFVFLVLLPLVSSQCVNLTTRTQLPPAYTNSFTRGVYYPDKVFRSSVLHSTQDLFLPFFSNVTWFHAIHVSGTNGTKRFDNPVLPFNDGVYFASTEKSNIIRGWIFGTTLDSKTQSLLIVNNATNVVIKVCEFQFCNDPFLGVYYHKNNKSWTESEFRVYSSANNCTFEYVSQPFLMDLEGKQGNFKNLREFVFKNIDGYFKIYSKHTPINLVRDLPQGFSALEPLVDLPIGINITRFQTLLALHRSYLTPGDSSSGWTAGAAAYYVGYLQPRTFLLKYNENGTITDAVDCALDPLSETKCTLKSFTVEKGIYQTSNFRVQPTESIVRFPNITNLCPFGEVFNATRFASVYAWNRKRISNCVADYSVLYNSASFSTFKCYGVSPTKLNDLCFTNVYADSFVIRGDEVRQIAPGQTGKIADYNYKLPDDFTGCVIAWNSNNLDSKVGGNYNYLYRLFRKSNLKPFERDISTEIYQAGSTPCNGVEGFNCYFPLQSYGFQPTNGVGYQPYRVVVLSFELLHAPATVCGPKKSTNLVKNKCVNFNFNGLTGTGVLTESNKKFLPFQQFGRDIADTTDAVRDPQTLEILDITPCSFGGVSVITPGTNTSNQVAVLYQDVNCTEVPVAIHADQLTPTWRVYSTGSNVFQTRAGCLIGAEHVNNSYECDIPIGAGICASYQTQTNSPRRARSVASQSIIAYTMSLGAENSVAYSNNSIAIPTNFTISVTTEILPVSMTKTSVDCTMYICGDSTECSNLLLQYGSFCTQLNRALTGIAVEQDKNTQEVFAQVKQIYKTPPIKDFGGFNFSQILPDPSKPSKRSFIEDLLFNKVTLADAGFIKQYGDCLGDIAARDLICAQKFNGLTVLPPLLTDEMIAQYTSALLAGTITSGWTFGAGAALQIPFAMQMAYRFNGIGVTQNVLYENQKLIANQFNSAIGKIQDSLSSTASALGKLQDVVNQNAQALNTLVKQLSSNCGAISSVLNDILSRLDKVEAEVQIDRLITCRLQSLQTYVTQQLIRAAEIRASANLAATKMSECVLGQSKRFDFCGKGYHLMSFPQSAPHGVVFLHVTYVPAQEKNFTTAPAICHDGKAHFPREGVFVSNGTHWFVTQRNFYEPQIITTDNTFVSGNCDVVIGIVNNTVYDPLQPELDSFKEELDKYFKNHTSPDVDLGDISGINASVVNIQKEIDRLNEVAKNLNESLIDLQELGKYEQYIKGGGSGGGQIYEGKLTAEGLRFGIVASRFNHALVDRLVEGAIDAIVRHGGREEDITLVRVPGSWEIPVAAGELARKEDIDAVIAIGVLIRGATPHFDYIASEVSKGLADLSLELRKPITFGVITADTLEQAIERAGTKHGNKGWEAALSAIEMANLFKSLR

SEQ ID NO: 4398 - protein, 1371 aa, Artificial Sequence
  SARS-CoV-2/China/WF0028/2020__EPI_ISL_413791 spike protein (1-1211)(F970C_G999C) LumSynth construct
MFVFLVLLPLVSSQCVNLTTRTQLPPAYTNSFTRGVYYPDKVFRSSVLHSTQDLFLPFFSNVTWFHAIHVSGTNGTKRFDNPVLPFNDGVYFASTEKSNIIRGWIFGTTLDSKTQSLLIVNNATNVVIKVCEFQFCNDPFLGVYYHKNNKSWMESEFRVYSSANNCTFEYVSQPFLMDLEGKQGNFKNLREFVFKNIDGYFKIYSKHTPINLVRDLPQGFSALEPLVDLPIGINITRFQTLLALHRSYLTPGDSSSGWTAGAAAYYVGYLQPRTFLLKYNENGTITDAVDCALDPLSETKCTLKSFTVEKGIYQTSNFRVQPTESIVRFPNITNLCPFGEVFNATRFASVYAWNRKRISNCVADYSVLYNSASFSTFKCYGVSPTKLNDLCFTNVYADSFVIRGDEVRQIAPGQTGKIADYNYKLPDDFTGCVIAWNSNNLDSKVGGNYNYLYRLFRKSNLKPFERDISTEIYQAGSTPCNGVEGFNCYFPLQSYGFQPTNGVGYQPYRVVVLSFELLHAPATVCGPKKSTNLVKNKCVNFNFNGLTGTGVLTESNKKFLPFQQFGRDIADTTDAVRDPQTLEILDITPCSFGGVSVITPGTNTSNQVAVLYQDVNCTEVPVAIHADQLTPTWRVYSTGSNVFQTRAGCLIGAEHVNNSYECDIPIGAGICASYQTQTNSPRRARSVASQSIIAYTMSLGAENSVAYSNNSIAIPTNFTISVTTEILPVSMTKTSVDCTMYICGDSTECSNLLLQYGSFCTQLNRALTGIAVEQDKNTQEVFAQVKQIYKTPPIKDFGGFNFSQILPDPSKPSKRSFIEDLLFNKVTLADAGFIKQYGDCLGDIAARDLICAQKFNGLTVLPPLLTDEMIAQYTSALLAGTITSGWTFGAGAALQIPFAMQMAYRFNGIGVTQNVLYENQKLIANQFNSAIGKIQDSLSSTASALGKLQDVVNQNAQALNTLVKQLSSNCGAISSVLNDILSRLDKVEAEVQIDRLITCRLQSLQTYVTQQLIRAAEIRASANLAATKMSECVLGQSKRVDFCGKGYHLMSFPQSAPHGVVFLHVTYVPAQEKNFTTAPAICHDGKAHFPREGVFVSNGTHWFVTQRNFYEPQIITTDNTFVSGNCDVVIGIVNNTVYDPLQPELESFKEELDKYFKNHTSPDVDLGDISGINASVVNIQKEIDRLNEVAKNLNESLIDLQELGKYEQYIKGGGSGGGQIYEGKLTAEGLRFGIVASRFNHALVDRLVEGAIDAIVRHGGREEDITLVRVPGSWEIPVAAGELARKEDIDAVIAIGVLIRGATPHFDYIASEVSKGLADLSLELRKPITFGVITADTLEQAIERAGTKHGNKGWEAALSAIEMANLFKSLR

SEQ ID NO: 4399 - protein, 1371 aa, Artificial Sequence
  SARS-CoV-2/2019-nCoV/USA-CruiseA-18/2020__MT159716.1 spike protein (1-1211)(F970C_G999C) LumSynth construct
MFVFLVLLPLVSSQCVNLTTRTQLPPAYTNSFTRGVYYPDKVFRSSVLHSTQDLFLPFFSNVTWFHAIHVSGTNGTKRFDNPVLPFNDGVYFASTEKSNIIRGWIFGTTLDSKTQSLLIVNNATNVVIKVCEFQFCNDPFLGVYYHKNNKSWMESELRVYSSANNCTFEYVSQPFLMDLEGKQGNFKNLREFVFKNIDGYFKIYSKHTPINLVRDLPQGFSALEPLVDLPIGINITRFQTLLALHRSYLTPGDSSSGWTAGAAAYYVGYLQPRTFLLKYNENGTITDAVDCALDPLSETKCTLKSFTVEKGIYQTSNFRVQPTESIVRFPNITNLCPFGEVFNATRFASVYAWNRKRISNCVADYSVLYNSASFSTFKCYGVSPTKLNDLCFTNVYADSFVIRGDEVRQIAPGQTGKIADYNYKLPDDFTGCVIAWNSNNLDSKVGGNYNYLYRLFRKSNLKPFERDISTEIYQAGSTPCNGVEGFNCYFPLQSYGFQPTNGVGYQPYRVVVLSFELLHAPATVCGPKKSTNLVKNKCVNFNFNGLTGTGVLTESNKKFLPFQQFGRDIADTTDAVRDPQTLEILDITPCSFGGVSVITPGTNTSNQVAVLYQDVNCTEVPVAIHADQLTPTWRVYSTGSNVFQTRAGCLIGAEHVNNSYECDIPIGAGICASYQTQTNSPRRARSVASQSIIAYTMSLGAENSVAYSNNSIAIPTNFTISVTTEILPVSMTKTSVDCTMYICGDSTECSNLLLQYGSFCTQLNRALTGIAVEQDKNTQEVFAQVKQIYKTPPIKDFGGFNFSQILPDPSKPSKRSFIEDLLFNKVTLADAGFIKQYGDCLGDIAARDLICAQKFNGLTVLPPLLTDEMIAQYTSALLAGTITSGWTFGAGAALQIPFAMQMAYRFNGIGVTQNVLYENQKLIANQFNSAIGKIQDSLSSTASALGKLQDVVNQNAQALNTLVKQLSSNCGAISSVLNDILSRLDKVEAEVQIDRLITCRLQSLQTYVTQQLIRAAEIRASANLAATKMSECVLGQSKRVDFCGKGYHLMSFPQSAPHGVVFLHVTYVPAQEKNFTTAPAICHDGKAHFPREGVFVSNGTHWFVTQRNFYEPQIITTDNTFVSGNCDVVIGIVNNTVYDPLQPELDSFKEELDKYFKNHTSPDVDLGDISGINASVVNIQKEIDRLNEVAKNLNESLIDLQELGKYEQYIKGGGSGGGQIYEGKLTAEGLRFGIVASRFNHALVDRLVEGAIDAIVRHGGREEDITLVRVPGSWEIPVAAGELARKEDIDAVIAIGVLIRGATPHFDYIASEVSKGLADLSLELRKPITFGVITADTLEQAIERAGTKHGNKGWEAALSAIEMANLFKSLR

SEQ ID NO: 4400 - protein, 1371 aa, Artificial Sequence
  SARS-CoV-2/SARS-CoV-2/Yunnan-01/human/2020/CHN__MT049951.1 spike protein (1-1211)(F970C_G999C) LumSynth construct
MFVFLVLLPLVSSQCVNLTTRTQLPPANTNSFTRGVYYPDKVFRSSVLHSTQDLFLPFFSNVTWFHAIHVSGTNGTKRFDNPVLPFNDGVYFASTEKSNIIRGWIFGTTLDSKTQSLLIVNNATNVVIKVCEFQFCNDPFLGVYYHKNNKSWMESEFRVYSSANNCTFEYVSQPFLMDLEGKQGNFKNLREFVFKNIDGYFKIYSKHTPINLVRDLPQGFSALEPLVDLPIGINITRFQTLLALHRSYLTPGDSSSGWTAGAAAYYVGYLQPRTFLLKYNENGTITDAVDCALDPLSETKCTLKSFTVEKGIYQTSNFRVQPTESIVRFPNITNLCPFGEVFNATRFASVYAWNRKRISNCVADYSVLYNSASFSTFKCYGVSPTKLNDLCFTNVYADSFVIRGDEVRQIAPGQTGKIADYNYKLPDDFTGCVIAWNSNNLDSKVGGNYNYLYRLFRKSNLKPFERDISTEIYQAGSTPCNGVEGFNCYFPLQSYGFQPTNGVGYQPYRVVVLSFELLHAPATVCGPKKSTNLVKNKCVNFNFNGLTGTGVLTESNKKFLPFQQFGRDIADTTDAVRDPQTLEILDITPCSFGGVSVITPGTNTSNQVAVLYQDVNCTEVPVAIHADQLTPTWRVYSTGSNVFQTRAGCLIGAEHVNNSYECDIPIGAGICASYQTQTNSPRRARSVASQSIIAYTMSLGAENSVAYSNNSIAIPTNFTISVTTEILPVSMTKTSVDCTMYICGDSTECSNLLLQYGSFCTQLNRALTGIAVEQDKNTQEVFAQVKQIYKTPPIKDFGGFNFSQILPDPSKPSKRSFIEDLLFNKVTLADAGFIKQYGDCLGDIAARDLICAQKFNGLTVLPPLLTDEMIAQYTSALLAGTITSGWTFGAGAALQIPFAMQMAYRFNGIGVTQNVLYENQKLIANQFNSAIGKIQDSLSSTASALGKLQDVVNQNAQALNTLVKQLSSNCGAISSVLNDILSRLDKVEAEVQIDRLITCRLQSLQTYVTQQLIRAAEIRASANLAATKMSECVLGQSKRVDFCGKGYHLMSFPQSAPHGVVFLHVTYVPAQEKNFTTAPAICHDGKAHFPREGVFVSNGTHWFVTQRNFYEPQIITTDNTFVSGNCDVVIGIVNNTVYDPLQPELDSFKEELDKYFKNHTSPDVDLGDISGINASVVNIQKEIDRLNEVAKNLNESLIDLQELGKYEQYIKGGGSGGGQIYEGKLTAEGLRFGIVASRFNHALVDRLVEGAIDAIVRHGGREEDITLVRVPGSWEIPVAAGELARKEDIDAVIAIGVLIRGATPHFDYIASEVSKGLADLSLELRKPITFGVITADTLEQAIERAGTKHGNKGWEAALSAIEMANLFKSLR

SEQ ID NO: 4401 - protein, 1371 aa, Artificial Sequence
  SARS-CoV-2/USA/WA-UW292/2020__EPI_ISL_418077 spike protein (1-1211)(F970C_G999C) LumSynth construct
MFVFLVLLPLVSSQCVNLTTRTQLPPAYTNSFTRGVYYPDKVFRSSVLHSTQDLFLPFFSNVTWFHAIHVSGTNGTKRFDNPVLPFNDGVYFASTEKSNIIRGWIFGTTLDSKTQSLLIVNNATNVVIKVCEFQFCNDPFLGVYYHKNNKSWMESEFRVYSSANNCTFEYVSQPFLMDLEGKQGNFKNLREFVFKNIDGYFKIYSKHTPINLVRDLPQGFSALEPLVDLPIGINITRFQTLLALHRSYLTPGDSSSGWTAGAAAYYVGYLQPRTFLLKYNENGTITDAVDCALDPLSETKCTLKSFTVEKGIYQTSNFRVQPTESIVRFPNITNLCPFGEVFNATRFASVYAWNRKRISNCVADYSVLYNSASFSTFKCYGVSPTKLNDLCFTNVYADSFVIRGDEVRQIAPGQTGKIADYNYKLPDDFTGCVIAWNSNNLDSKVGGNYNYLYRLFRKSNLKPFERDISTEIYQASSTPCNGVEGFNCYFPLQSYGFQPTNGVGYQPYRVVVLSFELLHAPATVCGPKKSTNLVKNKCVNFNFNGLTGTGVLTESNKKFLPFQQFGRDIADTTDAVRDPQTLEILDITPCSFGGVSVITPGTNTSNQVAVLYQDVNCTEVPVAIHADQLTPTWRVYSTGSNVFQTRAGCLIGAEHVNNSYECDIPIGAGICASYQTQTNSPRRARSVASQSIIAYTMSLGAENSVAYSNNSIAIPTNFTISVTTEILPVSMTKTSVDCTMYICGDSTECSNLLLQYGSFCTQLNRALTGIAVEQDKNTQEVFAQVKQIYKTPPIKDFGGFNFSQILPDPSKPSKRSFIEDLLFNKVTLADAGFIKQYGDCLGDIAARDLICAQKFNGLTVLPPLLTDEMIAQYTSALLAGTITSGWTFGAGAALQIPFAMQMAYRFNGIGVTQNVLYENQKLIANQFNSAIGKIQDSLSSTASALGKLQDVVNQNAQALNTLVKQLSSNCGAISSVLNDILSRLDKVEAEVQIDRLITCRLQSLQTYVTQQLIRAAEIRASANLAATKMSECVLGQSKRVDFCGKGYHLMSFPQSAPHGVVFLHVTYVPAQEKNFTTAPAICHDGKAHFPREGVFVSNGTHWFVTQRNFYEPQIITTDNTFVSGNCDVVIGIVNNTVYDPLQPELDSFKEELDKYFKNHTSPDVDLGDISGINASVVNIQKEIDRLNEVAKNLNESLIDLQELGKYEQYIKGGGSGGGQIYEGKLTAEGLRFGIVASRFNHALVDRLVEGAIDAIVRHGGREEDITLVRVPGSWEIPVAAGELARKEDIDAVIAIGVLIRGATPHFDYIASEVSKGLADLSLELRKPITFGVITADTLEQAIERAGTKHGNKGWEAALSAIEMANLFKSLR

SEQ ID NO: 4402 - protein, 1371 aa, Artificial Sequence
  SARS-CoV-2/Iceland/192/2020__EPI_ISL_417819 spike protein (1-1211)(F970C_G999C) LumSynth construct
MFVFFVLLPLVSSQCVNLTTRTQLPPAYTNSFTRGVYYPDKVFRSSVLHSTQDLFLPFFSNVTWFHAIHVSGTNGTKRFDNPVLPFNDGVYFASTEKSNIIRGWIFGTTLDSKTQSLLIVNNATNVVIKVCEFQFCNDPFLGVYYHKNNKSWMESEFRVYSSANNCTFEYVSQPFLMDLEGKQGNFKNLREFVFKNIDGYFKIYSKHTPINLVRDLPQGFSALEPLVDLPIGINITRFQTLLALHRSYLTPGDSSSGWTAGAAAYYVGYLQPRTFLLKYNENGTITDAVDCALDPLSETKCTLKSFTVEKGIYQTSNFRVQPTESIVRFPNITNLCPFGEVFNATRFASVYAWNRKRISNCVADYSVLYNSASFSTFKCYGVSPTKLNDLCFTNVYADSFVIRGDEVRQIAPGQTGKIADYNYKLPDDFTGCVIAWNSNNLDSKVGGNYNYLYRLFRKSNLKPFERDISTEIYQAGSTPCNGVEGFNCYFPLQSYGFQPTNGVGYQPYRVVVLSFELLHAPATVCGPKKSTNLVKNKCVNFNFNGLTGTGVLTESNKKFLPFQQFGRDIADTTDAVRDPQTLEILDITPCSFGGVSVITPGTNTSNQVAVLYQGVNCTEVPVAIHADQLTPTWRVYSTGSNVFQTRAGCLIGAEHVNNSYECDIPIGAGICASYQTQTNSPRRARSVASQSIIAYTMSLGAENSVAYSNNSIAIPTNFTISVTTEILPVSMTKTSVDCTMYICGDSTECSNLLLQYGSFCTQLNRALTGIAVEQDKNTQEVFAQVKQIYKTPPIKDFGGFNFSQILPDPSKPSKRSFIEDLLFNKVTLADAGFIKQYGDCLGDIAARDLICAQKFNGLTVLPPLLTDEMIAQYTSALLAGTITSGWTFGAGAALQIPFAMQMAYRFNGIGVTQNVLYENQKLIANQFNSAIGKIQDSLSSTASALGKLQDVVNQNAQALNTLVKQLSSNCGAISSVLNDILSRLDKVEAEVQIDRLITCRLQSLQTYVTQQLIRAAEIRASANLAATKMSECVLGQSKRVDFCGKGYHLMSFPQSAPHGVVFLHVTYVPAQEKNFTTAPAICHDGKAHFPREGVFVSNGTHWFVTQRNFYEPQIITTDNTFVSGNCDVVIGIVNNTVYDPLQPELDSFKEELDKYFKNHTSPDVDLGDISGINASVVNIQKEIDRLNEVAKNLNESLIDLQELGKYEQYIKGGGSGGGQIYEGKLTAEGLRFGIVASRFNHALVDRLVEGAIDAIVRHGGREEDITLVRVPGSWEIPVAAGELARKEDIDAVIAIGVLIRGATPHFDYIASEVSKGLADLSLELRKPITFGVITADTLEQAIERAGTKHGNKGWEAALSAIEMANLFKSLR

SEQ ID NO: 4403 - protein, 1371 aa, Artificial Sequence
  SARS-CoV-2/Belgium/ULG-6939/2020__EPI_ISL_417020 spike protein (1-1211)(F970C_G999C) LumSynth construct
MFVFLVLLPLVSSQCVNLTTRTQLPPAYTNSFTRGVYYPDKVFRSSVLHSTQDLFLPFFSNVTWFHAIHVSGTNGTKRFDNPVLPFNDGVYFASTEKSNIIRGWIFGTTLDSKTQSLLIVNNATNVVIKVCEFQFCNDPFLGVYYHKNNKSWMESEFRVYSSANNCTFEYVSQPFLMDLEGKQGNFKNLREFVFKNIDGYFKIYSKHTPINLVRDLPQGFSALEPLVDLPIGINITRFQTLLALHRSYLTPGDSSSGWTAGAAAYYVGYLQPRTFLLKYNENGTITDAVDCALDPLSETKCTLKSFTVEKGIYQTSNFRVQPTESIVRFPNITNLCPFGEVFNATRFASVYAWNRKRISNCVADYSVLYNSASFSTFKCYGVSPTKLNDLCFTNVYADSFVIRGDEVRQIAPGQTGKIADYNYKLPDDFTGCVIAWNSNNLDSKVGGNYNYLYRLFRKSNLKPFERDISTEIYQAGSTPCNGVEGFNCYFPLQSYGFQPTNGVGYQPYRVVVLSFELLHAPATVCGPKKSTNLVKNKCVNFNFNGLTGTGVLTESNKKFLPFQQFGRDIADTTDAVRDPQTLEILDITPCSFGGVSVITPGTNTSNQVAVLYQGVNCTEVPVAIHADQLTPTWRVYSTGSNVFQTRAGCLIGAEHVNNSYECDIPIGAGICASYQTQTNSPRRARSVASQSIIAYTMSLGAENSVVYSNNSIAIPTNFTISVTTEILPVSMTKTSVDCTMYICGDSTECSNLLLQYGSFCTQLNRALTGIAVEQDKNTQEVFAQVKQIYKTPPIKDFGGFNFSQILPDPSKPSKRSFIEDLLFNKVTLADAGFIKQYGDCLGDIAARDLICAQKFNGLTVLPPLLTDEMIAQYTSALLAGTITSGWTFGAGAALQIPFAMQMAYRFNGIGVTQNVLYENQKLIANQFNSAIGKIQDSLSSTASALGKLQDVVNQNAQALNTLVKQLSSNCGAISSVLNDILSRLDKVEAEVQIDRLITCRLQSLQTYVTQQLIRAAEIRASANLAATKMSECVLGQSKRVDFCGKGYHLMSFPQSAPHGVVFLHVTYVPAQEKNFTTAPAICHDGKAHFPREGVFVSNGTHWFVTQRNFYEPQIITTDNTFVSGNCDVVIGIVNNTVYDPLQPELDSFKEELDKYFKNHTSPDVDLGDISGINASVVNIQKEIDRLNEVAKNLNESLIDLQELGKYEQYIKGGGSGGGQIYEGKLTAEGLRFGIVASRFNHALVDRLVEGAIDAIVRHGGREEDITLVRVPGSWEIPVAAGELARKEDIDAVIAIGVLIRGATPHFDYIASEVSKGLADLSLELRKPITFGVITADTLEQAIERAGTKHGNKGWEAALSAIEMANLFKSLR

SEQ ID NO: 4404 - protein, 1371 aa, Artificial Sequence
  SARS-CoV-2/France/HF2496/2020__EPI_ISL_418231 spike protein (1-1211)(F970C_G999C) LumSynth construct
MFVFLVLLPLVSSQCVNLTTRTQLPPAYTNSFTRGVYYPDKVFRSSVLHSTQDLFLPFFSNVTWFHAIHVSGTNGTKRFDNPVLPFNDGVYFASTEKSNIIRGWIFGTTLDSKTQSLLIVNNATNVVIKVCEFQFCNDPFLGVYYHKNNKSWMESEFRVYSSANNCTFEYVSQPFLMDLEGKQGNFKNLREFVFKNIDGYFKIYSKHTPINLVRDLPQGFSALEPLVDLPIGINITRFQTLLALHRSYLTPGDSSSGWTAGAAAYYVGYLQPRTFLLKYNENGTITDAVDCALDPLSETKCTLKSFTVEKGIYQTSNFRVQPTESIVRFPNITNLCPFGEVFNATRFASVYAWNRKRISNCVADYSVLYNSASFSTFKCYGVSPTKLNDLCFTNVYADSFVIRGDEVRQIAPGQTGKIADYNYKLPDDFTGCVIAWNSNNLDSKVGGNYNYLYRLFRKSNLKPFERDISTEIYQAGSTPCNGVEGFNCYFPLQSYGFQPTNGVGYQPYRVVVLSFELLHAPATVCGPKKSTNLVKNKCVNFNFNGLTGTGVLTESNKKFLPFQQFGRDIADTTDAVRDPQTLEILDITPCSFGGVSVITPGTNTSNQVAVLYQGVNCTEVPVAIHADQLTPTWRVYSTGSNVFQTRAGCLIGAEHVNNSYECDIPIGAGICASYQTQTNSPRRARSVASQSIIAYTMSLGAENSVAYSNNSIAIPTNFTISVTTEILPVSMTKTSVDCTMYICGDSTECSNLLLQYGSFCTQLNRALTGIAVEQDKNTQEVFAQVKQIYKTPPIKDFGGFNFSQILPDPSKPSKRSFIEDLLFNKVTLADAGFIKQYGDCLGDIVARDLICAQKFNGLTVLPPLLTDEMIAQYTSALLAGTITSGWTFGAGAALQIPFAMQMAYRFNGIGVTQNVLYENQKLIANQFNSAIGKIQDSLSSTASALGKLQDVVNQNAQALNTLVKQLSSNCGAISSVLNDILSRLDKVEAEVQIDRLITCRLQSLQTYVTQQLIRAAEIRASANLAATKMSECVLGQSKRVDFCGKGYHLMSFPQSAPHGVVFLHVTYVPAQEKNFTTAPAICHDGKAHFPREGVFVSNGTHWFVTQRNFYEPQIITTDNTFVSGNCDVVIGIVNNTVYDPLQPELDSFKEELDKYFKNHTSPDVDLGDISGINASVVNIQKEIDRLNEVAKNLNESLIDLQELGKYEQYIKGGGSGGGQIYEGKLTAEGLRFGIVASRFNHALVDRLVEGAIDAIVRHGGREEDITLVRVPGSWEIPVAAGELARKEDIDAVIAIGVLIRGATPHFDYIASEVSKGLADLSLELRKPITFGVITADTLEQAIERAGTKHGNKGWEAALSAIEMANLFKSLR

SEQ ID NO: 4405 - protein, 1371 aa, Artificial Sequence
  SARS-CoV-2/USA/WA-UW291/2020__EPI_ISL_418076 spike protein (1-1211)(F970C_G999C) LumSynth construct
MFVFLVLLPLVSSQCVNLTTRTQLPPAYTNSFTRGVYYPDKVFRSSVLHSTQDLFLPFFSNVTWFHAIHVSGTNGTKRFDNPVLPFNDGVYFASTEKSNIIRGWIFGTTLDSKTQSLLIVNNATNVVIKVCEFQFCNDPFLGVYYHKNNKSWMESEFRVYSSANNCTFEYVSQPFLMDLEGKQGNFKNLREFVFKNIDGYFKIYSKHTPINLVRDLPQGFSALEPLVDLPIGINITRFQTLLALHRSYLTPGDSSSGWTAGAAAYYVGYLQPRTFLLKYNENGTITDAVDCALDPLSETKCTLKSFTVEKGIYQTSNFRVQPTESIVRFPNITNLCPFGEVFNATRFASVYAWNRKRISNCVADYSVLYNSASFSTFKCYGVSPTKLNDLCFTNVYADSFVIRGDEVRQIAPGQTGKIADYNYKLPDDFTGCVIAWNSNNLDSKVGGNYNYLYRLFRKSNLKPFERDISTEIYQAGSTPCNGVEGFNCYFPLQSYGFQPTNGVGYQPYRVVVLSFELLHAPATVCGPKKSTNLVKNKCVNFNFNGLTGTGVLTESNKKFLPFQQFGRDIADTTDAVRDPQTLEILDITPCSFGGVSVITPGTNTSNQVAVLYQGVNCTEVPVAIHADQLTPTWRVYSTGSNVFQTRAGCLIGAEHVNNSYECDIPIGAGICASYQTQTNSPRRARSVASQSIIAYTMSLGAENSVAYSNNSIAIPTNFTISVTTEILPVSMTKTSVDCTMYICGDSTECSNLLLQYGSFCTQLNRALTGIAVEQDKNTQEVFAQVKQIYKTPPIKDFGGFNFSQILPDPSKPSKRSFIEDLLFNKVTLADAGFIKQYGDCLGDIAARDLICAQKFNGLTVLPPLLTDEMIAQYTSALLAGTITSGWTFGAGAALQIPFAMQMAYRFNGIGVTQNVLYENQKLIANQFNSAIGKIQYSLSSTASALGKLQDVVNQNAQALNTLVKQLSSNCGAISSVLNDILSRLDKVEAEVQIDRLITCRLQSLQTYVTQQLIRAAEIRASANLAATKMSECVLGQSKRVDFCGKGYHLMSFPQSAPHGVVFLHVTYVPAQEKNFTTAPAICHDGKAHFPREGVFVSNGTHWFVTQRNFYEPQIITTDNTFVSGNCDVVIGIVNNTVYDPLQPELDSFKEELDKYFKNHTSPDVDLGDISGINASVVNIQKEIDRLNEVAKNLNESLIDLQELGKYEQYIKGGGSGGGQIYEGKLTAEGLRFGIVASRFNHALVDRLVEGAIDAIVRHGGREEDITLVRVPGSWEIPVAAGELARKEDIDAVIAIGVLIRGATPHFDYIASEVSKGLADLSLELRKPITFGVITADTLEQAIERAGTKHGNKGWEAALSAIEMANLFKSLR

SEQ ID NO: 4406 - protein, 1371 aa, Artificial Sequence; identical to SEQ ID NO: 4369
  SARS-CoV-2/Portugal/PT0034/2020__EPI_ISL_418019 spike protein (1-1211)(F970C_G999C) LumSynth construct

SEQ ID NO: 4407 - protein, 1371 aa, Artificial Sequence
  SARS-CoV-2/Iceland/202/2020__EPI_ISL_417750 spike protein (1-1211)(F970C_G999C) LumSynth construct
MFVFLVLLPLVSSQCVNLTTRTQLPPAYTNSFTRGVYYPDKVFRSSVLHSTQDLFLPFFSNVTWFHAIHVSGTNGTKRFDNPVLPFNDGVYFASTEKSNIIRGWIFGTTLDSKTQSLLIVNNATNVVIKVCEFQFCNDPFLGVYYHKNNKSWMESEFRVYSSANNCTFEYVSQPFLMDLEGKQGNFKNLREFVFKNIDGYFKIYSKHTPINLVRDLPQGFSALEPLVDLPIGINITRFQTLLALHRSYLTPGDSSSGWTAGAAAYYVGYLQPRTFLLKYNENGTITDAVDCALDPLSETKCTLKSFTVEKGIYQTSNFRVQPTESIVRFPNITNLCPFGEVFNATRFASVYAWNRKRISNCVADYSVLYNSASFSTFKCYGVSPTKLNDLCFTNVYADSFVIRGDEVRQIAPGQTGKIADYNYKLPDDFTGCVIAWNSNNLDSKVGGNYNYLYRLFRKSNLKPFERDISTEIYQAGSTPCNGVEGFNCYFPLQSYGFQPTNGVGYQPYRVVVLSFELLHAPATVCGPKKSTNLVKNKCVNFNFNGLTGTGVLTESNKKFLPFQQFGRDIADTTDAVRDPQTLEILDITPCSFGGVSVITPGTNTSNQVAVLYQDVNCTEVPVAIHADQLTPTWRVYSTGSNVFQTRAGCLIGAEHVNNSYECDIPIGAGICASYQTQTNSPRRARSVASQSIIAYTMSLGAENSVAYSNNSIAIPTNFTISVTTEILPVSMTKTSVDCTMYICGDSTECSNLLLQYGSFCTQLNRALTGIAVEQDKNTQEVFAQVKQIYKTPPIKDFGGFNFSQILPDPSKPSKRSFIEDLLFNKVTLADAGFIKQYGDCLGDIAARDLICAQKFNGLTVLPPLLTDEMIAQYTSALLAGTITSGWTFGAGAALQIPFAMQMAYRFNGIGVTQNVLYENQKLIANQFNSAIGKIQDSLSSTASALGKLQDVVNQNAQALNTLVKQLSSNCGAISSVLNDILSRLDKVEAEVQIDRLITCRLQSLQTYVTQQLIRAAEIRASANLAATKMSECVLGQSKRVDFCGKGYHLMSFPQSAPHGVVFLHVTYVPAQEKNFTTAPAICHDGKAHFPREGVFVSNGTHWFVTQRNFYEPQIITTDNTFVSGNCDVVIGIVNNTVYDPLQPELDSFKEELDKYFKNHTSPDVDLGDIPGINASVVNIQKEIDRLNEVAKNLNESLIDLQELGKYEQYIKGGGSGGGQIYEGKLTAEGLRFGIVASRFNHALVDRLVEGAIDAIVRHGGREEDITLVRVPGSWEIPVAAGELARKEDIDAVIAIGVLIRGATPHFDYIASEVSKGLADLSLELRKPITFGVITADTLEQAIERAGTKHGNKGWEAALSAIEMANLFKSLR

SEQ ID NO: 4408 - protein, 1371 aa, Artificial Sequence
  SARS-CoV-2/USA/WA-UW261/2020__EPI_ISL_418046 spike protein (1-1211)(F970C_G999C) LumSynth construct
MFVFLVLLPLVSSQCVNLTTRTQLPPAYTNSFTRGVYYPDKVFRSSVLHSTQDLFLPFFSNVTWFHAIHVSGTNGTKRFDNPVLPFNDGVYFASTEKSNIIRGWIFGTTLDSKTQSLLIVNNATNVVIKVCEFQFCNDPFLGVYYHKNNKSWMESEFRVYSSANNCTFEYVSQPFLMDLEGKQGNFKNLREFVFKNIDGYFKIYSKHTPINLVRDLPQGFSALEPLVDLPIGINITRFQTLLALHRSYLTPGDSSSGWTAGAAAYYVGYLQPRTFLLKYNENGTITDAVDCALDPLSETKCTLKSFTVEKGIYQTSNFRVQPTESIVRFPNITNLCPFGEVFNATRFTSVYAWNRKRISNCVADYSVLYNSASFSTFKCYGVSPTKLNDLCFTNVYADSFVIRGDEVRQIAPGQTGKIADYNYKLPDDFTGCVIAWNSNNLDSKVGGNYNYLYRLFRKSNLKPFERDISTEIYQAGSTPCNGVEGFNCYFPLQSYGFQPTNGVGYQPYRVVVLSFELLHAPATVCGPKKSTNLVKNKCVNFNFNGLTGTGVLTESNKKFLPFQQFGRDIADTTDAVRDPQTLEILDITPCSFGGVSVITPGTNTSNQVAVLYQDVNCTEVPVAIHADQLTPTWRVYSTGSNVFQTRAGCLIGAEHVNNSYECDIPIGAGICASYQTQTNSPRRARSVASQSIIAYTMSLGAENSVAYSNNSIAIPTNFTISVTTEILPVSMTKTSVDCTMYICGDSTECSNLLLQYGSFCTQLNRALTGIAVEQDKNTQEVFAQVKQIYKTPPIKDFGGFNFSQILPDPSKPSKRSFIEDLLFNKVTLADAGFIKQYGDCLGDIAARDLICAQKFNGLTVLPPLLTDEMIAQYTSALLAGTITSGWTFGAGAALQIPFAMQMAYRFNGIGVTQNVLYENQKLIANQFNSAIGKIQDSLSSTASALGKLQDVVNQNAQALNTLVKQLSSNCGAISSVLNDILSRLDKVEAEVQIDRLITCRLQSLQTYVTQQLIRAAEIRASANLAATKMSECVLGQSKRVDFCGKGYHLMSFPQSAPHGVVFLHVTYVPAQEKNFTTAPAICHDGKAHFPREGVFVSNGTHWFVTQRNFYEPQIITTDNTFVSGNCDVVIGIVNNTVYDPLQPELDSFKEELDKYFKNHTSPDVDLGDISGINASVVNIQKEIDRLNEVAKNLNESLIDLQELGKYEQYIKGGGSGGGQIYEGKLTAEGLRFGIVASRFNHALVDRLVEGAIDAIVRHGGREEDITLVRVPGSWEIPVAAGELARKEDIDAVIAIGVLIRGATPHFDYIASEVSKGLADLSLELRKPITFGVITADTLEQAIERAGTKHGNKGWEAALSAIEMANLFKSLR

SEQ ID NO: 4409 - protein, 1371 aa, Artificial Sequence
  SARS-CoV-2/Portugal/PT0035/2020__EPI_ISL_418020 spike protein (1-1211)(F970C_G999C) LumSynth construct
MFVFLVLLPLVSSQCVNLTTRTQLPPAYTNSFTRGVYYPDKVFRSSVLHSTQDLFLPFFSNVTWFHAIHVSGTNGTKRFDNPVLPFNDGVYFASTEKSNIIRGWIFGTTLDSKTQSLLIVNNATNVVIKVCEFQFCNDPFLGVYYHKNNKSWMESEFRVYSSANNCTFEYVSQPFLMDLEGKQGNFKNLREFVFKNIDGYFKIYSKHTPINLVRDLPQGFSALEPLVDLPIGINITRFQTLLALHRSYLTPGDSSSGWTAGAAAYYVGYLQPRTFLLKYNENGTITDAVDCALDPLSETKCTLKSFTVEKGIYQTSNFRVQPTESIVRFPNITNLCPFGEVFNATRFASVYAWNRKRISNCVADYSVLYNSASFSTFKCYGVSPTKLNDLCFTNVYADSFVIRGDEVRQIAPGQTGKIADYNYKLPDDFTGCVIAWNSNNLDSKVGGNYNYLYRLFRKSNLKPFERDISTEIYQAGSTPCNGVEGFNCYFPLQSYGFQPTNGVGYQPYRVVVLSFELLHAPATVCGPKKSTNLVKNKCVNFNFNGLTGTGVLTESNKKFLPFQQFGRDIADTTDAVRDPQTLEILDITPCSFGGVSVITPGTNTSNQVAVLYQDVNCTEVPVAIHADQLTPTWRVYSTGSNVFQTRAGCLIGAEHVNNSYECDIPIGAGICASYQTQTNSPRRARSVASQSIIAYTMSLGAENSVAYSNNSIAIPTNFTISVTTEILPVSMTKTSVDCTMYICGDSTECSNLLLQYGSFCTQLNRALTGIAVEQDKNTQEVFAQVKQIYKTPPIKDFGGFNFSQILPDPSKPSKRSFIEDLLFNKVTLADAGFIKQYGDCLGDISARDLICAQKFNGLTVLPPLLTDEMIAQYTSALLAGTITSGWTFGAGAALQIPFAMQMAYRFNGIGVTQNVLYENQKLIANQFNSAIGKIQDSLSSTASALGKLQDVVNQNAQALNTLVKQLSSNCGAISSVLNDILSRLDKVEAEVQIDRLITCRLQSLQTYVTQQLIRAAEIRASANLAATKMSECVLGQSKRVDFCGKGYHLMSFPQSAPHGVVFLHVTYVPAQEKNFTTAPAICHDGKAHFPREGVFVSNGTHWFVTQRNFYEPQIITTDNTFVSGNCDVVIGIVNNTVYDPLQPELDSFKEELDKYFKNHTSPDVDLGDISGINASVVNIQKEIDRLNEVAKNLNESLIDLQELGKYEQYIKGGGSGGGQIYEGKLTAEGLRFGIVASRFNHALVDRLVEGAIDAIVRHGGREEDITLVRVPGSWEIPVAAGELARKEDIDAVIAIGVLIRGATPHFDYIASEVSKGLADLSLELRKPITFGVITADTLEQAIERAGTKHGNKGWEAALSAIEMANLFKSLR

SEQ ID NO: 4410 - protein, 1371 aa, Artificial Sequence
  SARS-CoV-2/USA/NY-NYUMC7/2020__EPI_ISL_418192 spike protein (1-1211)(F970C_G999C) LumSynth construct
MFVFLVLLPLVSSQCVNLTTRTQLPPAYTNSFTRGVYYPDKVFRSSVLHSTQDLFLPFFSNVTWFHAIHVSGTNGTKRFDNPVLPFNDGVYFASTEKSNIIRGWIFGTTLDSKTQSLLIVNNATNVVIKVCEFQFCNDPFLGVYHHKNNKSWMESEFRVYSSANNCTFEYVSQPFLMDLEGKQGNFKNLREFVFKNIDGYFKIYSKHTPINLVRDLPQGFSALEPLVDLPIGINITRFQTLLALHRSYLTPGDSSSGWTAGAAAYYVGYLQPRTFLLKYNENGTITDAVDCALDPLSETKCTLKSFTVEKGIYQTSNFRVQPTESIVRFPNITNLCPFGEVFNATRFASVYAWNRKRISNCVADYSVLYNSASFSTFKCYGVSPTKLNDLCFTNVYADSFVIRGDEVRQIAPGQTGKIADYNYKLPDDFTGCVIAWNSNNLDSKVGGNYNYLYRLFRKSNLKPFERDISTEIYQAGSTPCNGVEGFNCYFPLQSYGFQPTNGVGYQPYRVVVLSFELLHAPATVCGPKKSTNLVKNKCVNFNFNGLTGTGVLTESNKKFLPFQQFGRDIADTTDAVRDPQTLEILDITPCSFGGVSVITPGTNTSNQVAVLYQGVNCTEVPVAIHADQLTPTWRVYSTGSNVFQTRAGCLIGAEHVNNSYECDIPIGAGICASYQTQTNSPRRARSVASQSIIAYTMSLGAENSVAYSNNSIAIPTNFTISVTTEILPVSMTKTSVDCTMYICGDSTECSNLLLQYGSFCTQLNRALTGIAVEQDKNTQEVFAQVKQIYKTPPIKDFGGFNFSQILPDPSKPSKRSFIEDLLFNKVTLADAGFIKQYGDCLGDIAARDLICAQKFNGLTVLPPLLTDEMIAQYTSALLAGTITSGWTFGAGAALQIPFAMQMAYRFNGIGVTQNVLYENQKLIANQFNSAIGKIQDSLSSTASALGKLQDVVNQNAQALNTLVKQLSSNCGAISSVLNDILSRLDKVEAEVQIDRLITCRLQSLQTYVTQQLIRAAEIRASANLAATKMSECVLGQSKRVDFCGKGYHLMSFPQSAPHGVVFLHVTYVPAQEKNFTTAPAICHDGKAHFPREGVFVSNGTHWFVTQRNFYEPQIITTDNTFVSGNCDVVIGIVNNTVYDPLQPELDSFKEELDKYFKNHTSPDVDLGDISGINASVVNIQKEIDRLNEVAKNLNESLIDLQELGKYEQYIKGGGSGGGQIYEGKLTAEGLRFGIVASRFNHALVDRLVEGAIDAIVRHGGREEDITLVRVPGSWEIPVAAGELARKEDIDAVIAIGVLIRGATPHFDYIASEVSKGLADLSLELRKPITFGVITADTLEQAIERAGTKHGNKGWEAALSAIEMANLFKSLR

SEQ ID NO: 4411 - protein, 1371 aa, Artificial Sequence
  SARS-CoV-2/Iceland/189/2020__EPI_ISL_417709 spike protein (1-1211)(F970C_G999C) LumSynth construct
MFVFLVLLPLVSSQCVNLTTRTQLPPAYTNSFTRGVYYPDKVFRSSVLHSTQDLFLPFFSNVTWFHAIHVSGTNGTKRFDNPVLPFNDGVYFASTEKSNIIRGWIFGTTLDSKTQSLLIVNNATNVVIKVCEFQFCNDPFLGVYYHKNNKSWMESEFRVYSSANNCTFEYVSQPFLMDLEGKQGNFKNLREFVFKNIDGYFKIYSKHTPINLVRDLPQGFSALEPLVDLPIGINITRFQTLLALHRSYLTPGDSSSGWTAGAAAYYVGYLQPRTFLLKYNENGTITDAVDCALDPLSETKCTLKSFTVEKGIYQTSNFRVQPTESIVRFPNITNLCPFGEVFNATRFASVYAWNRKRISNCVADYSVLYNSASFSTFKCYGVSPTKLNDLCFTNVYADSFVIRGDEVRQIAPGQTGKIADYNYKLPDDFTGCVIAWNSNNLDSKVGGNYNYLYRLFRKSNLKPFERDISTEIYQAGSTPCNGVEGFNCYFPLQSYGFQPTNGVGYQPYRVVVLSFELLHAPATVCGPKKSTNLVKNKCVNFNFNGLTGTGVLTESNKKFLPFQQFGRDIADTTDAVRDPQTLEILDITPCSFGGVSVITPGTNTSNQVAVLYQGVNCTEVPVAIHADQLTPTWRVYSTGSNVFQTRAGCLIGAEHVNNSYECDIPIGAGICASYQTQTNSPRRARSVASQSIIAYTMSLGAENSVAYSNNSIAIPTNFTISVTTEILPVSMTKTSVDCTMYICGDSTECSNLLLQYGSFCTQLNRALTGIAVEQDKNTQEVFAQVKQIYKTPPIKDFGGFNFSQILPDPSKPSKRSFIEDLLFNKVTLADAGFTKQYGDCLGDIAARDLICAQKFNGLTVLPPLLTDEMIAQYTSALLAGTITSGWTFGAGAALQIPFAMQMAYRFNGIGVTQNVLYENQKLIANQFNSAIGKIQDSLSSTASALGKLQDVVNQNAQALNTLVKQLSSNCGAISSVLNDILSRLDKVEAEVQIDRLITCRLQSLQTYVTQQLIRAAEIRASANLAATKMSECVLGQSKRVDFCGKGYHLMSFPQSAPHGVVFLHVTYVPAQEKNFTTAPAICHDGKAHFPREGVFVSNGTHWFVTQRNFYEPQIITTDNTFVSGNCDVVIGIVNNTVYDPLQPELDSFKEELDKYFKNHTSPDVDLGDISGINASVVNIQKEIDRLNEVAKNLNESLIDLQELGKYEQYIKGGGSGGGQIYEGKLTAEGLRFGIVASRFNHALVDRLVEGAIDAIVRHGGREEDITLVRVPGSWEIPVAAGELARKEDIDAVIAIGVLIRGATPHFDYIASEVSKGLADLSLELRKPITFGVITADTLEQAIERAGTKHGNKGWEAALSAIEMANLFKSLR

SEQ ID NO: 4412 - protein, 1371 aa, Artificial Sequence
  SARS-CoV-2/Australia/NSW56/2020__EPI_ISL_417408 spike protein (1-1211)(F970C_G999C) LumSynth construct
MFVFLVLLPLVSSQCVNLTTRTQLPPAYTNSFTRGVYYPDKVFRSSVLHSTQDLFLPFFSNVTWFHAIHVSGTNGTKRFDNPVLPFNDGVYFASTEKSNIIRGWIFGTTLDSKTQSLLIVNNATNVVIKVCEFQFCNDPFLGVYYHKNNKSWMESEFRVYSSANNCTFEYVSQPFLMDLEGKQGNFKNLREFVFKNIDGYFKIYSKHTPINLVRDLPQGFSALEPLVDLPIGINITRFQTLLALHRSYLTPGDSSSGWTAGAAAYYVGYLQPRTFLLKYNENGTITDAVDCALDPLSETKCTLKSFTVEKGIYQTSNFRVQPTESIVRFPNITNLCPFGEVFNATRFASVYAWNRKRISNCVADYSVLYNSASFSTFKCYGVSPTKLNDLCFTNVYADSFVIRGDEVRQIAPGQTGKIADYNYKLPDDFTGCVIAWNSNNLDSKVGGNYNYLYRLFRKSNLKPFERDISTEIYQAGSTPCNGVEGFNCYFPLQSYGFQPTNGVGYQPYRVVVLSFELLHAPATVCGPKKSTNLVKNKCVNFNFNGLTGTGVLTESNKKFLPFQQFGRDIADTTDAVRDPQTLEILDITPCSFGGVSVITPGTNTSNQVAVLYQDVNCTEVPVAIHADQLTPTWRVYSTGSNVFQTRAGCLIGAEHVNNSYECDIPIGAGICASYQTQTNSPRRARSVASQSIIAYTMSLGAENSVAYSNNSIAIPTNFTISVTTEILPVSMTKTSVDCTMYICGDSTECSNLLLQYGSFCTQLNRALTGIAVEQDKNTQEVFAQVKQIYKTPPIKDFGGFNFSQILPDSSKPSKRSFIEDLLFNKVTLADAGFIKQYGDCLGDIAARDLICAQKFNGLTVLPPLLTDEMIAQYTSALLAGTITSGWTFGAGAALQIPFAMQMAYRFNGIGVTQNVLYENQKLIANQFNSAIGKIQDSLSSTASALGKLQDVVNQNAQALNTLVKQLSSNCGAISSVLNDILSRLDKVEAEVQIDRLITCRLQSLQTYVTQQLIRAAEIRASANLAATKMSECVLGQSKRVDFCGKGYHLMSFPQSAPHGVVFLHVTYVPAQEKNFTTAPAICHDGKAHFPREGVFVSNGTHWFVTQRNFYEPQIITTDNTFVSGNCDVVIGIVNNTVYDPLQPELDSFKEELDKYFKNHTSPDVDLGDISGINASVVNIQKEIDRLNEVAKNLNESLIDLQELGKYEQYIKGGGSGGGQIYEGKLTAEGLRFGIVASRFNHALVDRLVEGAIDAIVRHGGREEDITLVRVPGSWEIPVAAGELARKEDIDAVIAIGVLIRGATPHFDYIASEVSKGLADLSLELRKPITFGVITADTLEQAIERAGTKHGNKGWEAALSAIEMANLFKSLR

SEQ ID NO: 4413 - protein, 1371 aa, Artificial Sequence
  SARS-CoV-2/Iceland/280/2020__EPI_ISL_417608 spike protein (1-1211)(F970C_G999C) LumSynth construct
MFVFLVLLPLVSSQCVNLTTRTQLPPAYTNSFTRGVYYPDKVFRSSVLHSTQDLFLPFFSNVTWFHAIHVSGTNGTKRFDNPVLPFNDGVYFASTEKSNIIRGWIFGTTLDSKTQSLLIVNNATNVVIKVCEFQFCNDPFLGVYYHKNNKSWMESEFRVYSSANNCTFEYVSQPFLMDLEGKQGNFKNLREFVFKNIDGYFKIYSKHTPINLVRDLPQGFSALEPLVDLPIGINITRFQTLLALHRSYLTPGDSSSGWTAGAAAYYVGYLQPRTFLLKYNENGTITDAVDCALDPLSETKCTLKSFTVEKGIYQTSNFRVQPTESIVRFPNITNLCPFGEVFNATRFASVYAWNRKRISNCVADYSVLYNSASFSTFKCYGVSPTKLNDLCFTNVYADSFVIRGDEVRQIAPGQTGKIADYNYKLPDDFTGCVIAWNSNNLDSKVGGNYNYLYRLFRKSNLKPFERDISTEIYQAGSTPCNGVEGFNCYFPLQSYGFQPTNGVGYQPYRVVVLSFELLHAPATVCGPKKSTNLVKNKCVNFNFNGLTGTGVLTESNKKFLPFQQFGRDIADTTDAVRDPQTLEILDITPCSFGGVSVITPGTNTSNQVAVLYQGVNCTEVPVAIHADQLTPTWRVYSTGSNVFQTRAGCLIGAEHVNNSYECDIPIGAGICASYHTQTNSPRRARSVASQSIIAYTMSLGAENSVAYSNNSIAIPTNFTISVTTEILPVSMTKTSVDCTMYICGDSTECSNLLLQYGSFCTQLNRALTGIAVEQDKNTQEVFAQVKQIYKTPPIKDFGGFNFSQILPDPSKPSKRSFIEDLLFNKVTLADAGFIKQYGDCLGDIAARDLICAQKFNGLTVLPPLLTDEMIAQYTSALLAGTITSGWTFGAGAALQIPFAMQMAYRFNGIGVTQNVLYENQKLIANQFNSAIGKIQDSLSSTASALGKLQDVVNQNAQALNTLVKQLSSNCGAISSVLNDILSRLDKVEAEVQIDRLITCRLQSLQTYVTQQLIRAAEIRASANLAATKMSECVLGQSKRVDFCGKGYHLMSFPQSAPHGVVFLHVTYVPAQEKNFTTAPAICHDGKAHFPREGVFVSNGTHWFVTQRNFYEPQIITTDNTFVSGNCDVVIGIVNNTVYDPLQPELDSFKEELDKYFKNHTSPDVDLGDISGINASVVNIQKEIDRLNEVAKNLNESLIDLQELGKYEQYIKGGGSGGGQIYEGKLTAEGLRFGIVASRFNHALVDRLVEGAIDAIVRHGGREEDITLVRVPGSWEIPVAAGELARKEDIDAVIAIGVLIRGATPHFDYIASEVSKGLADLSLELRKPITFGVITADTLEQAIERAGTKHGNKGWEAALSAIEMANLFKSLR

SEQ ID NO: 4414 - protein, 1371 aa, Artificial Sequence; identical to SEQ ID NO: 4369
  SARS-CoV-2/Iceland/247/2020__EPI_ISL_417575 spike protein (1-1211)(F970C_G999C) LumSynth construct

SEQ ID NO: 4415 - protein, 1371 aa, Artificial Sequence
  SARS-CoV-2/Iceland/238/2020__EPI_ISL_417566 spike protein (1-1211)(F970C_G999C) LumSynth construct
MFVFLVLLPLVSSQCVNLTTRTQLPPAYTNSFTRGVYYPDKVFRSSVLHSTQDLFLPFFSNVTWFHAIHVSGTNGTKRFDNPVLPFNDGVYFASTEKSNIIRGWIFGTTLDSKTQSLLIVNNATNVVIKVCEFQFCNDPFLGVYYHKNNKSWMESEFRVYSSANNCTFEYVSQPFLMDLEGKQGNFKNLREFVFKNIDGYFKIYSKHTPINLVRDLPQGFSALEPLVDLPIGINITRFQTLLALHRSYLTPGDSSSGWTAGAAAYYVGYLQPRTFLLKYNENGTITDAVDCALDPLSETKCTLKSFTVEKGIYQTSNFRVQPTESIVRFPNITNLCPFGEVFNATRFASVYAWNRKRISNCVADYSVLYNSASFSTFKCYGVSPTKLNDLCFTNVYADSFVIRGDEVRQIAPGQTGKIADYNYKLPDDFTGCVIAWNSNNLDSKVGGNYNYLYRLFRKSNLKPFERDISTEIYQAGSTPCNGVEGFNCYFPLQSYGFQPTNGVGYQPYRVVVLSFELLHAPATVCGPKKSTNLVKNKCVNFNFNGLTGTGVLTESNKKFLPFQQFGRDIADTTDAVRDPQTLEILDITPCSFGGVSVITPGTNTSNQVAVLYQGVNCTEVPVAIHADQLTPTWRVYSTGSNVFQTRAGCLIGAEHVNNSYECDIPIGAGICASYQTQTNSPRRARSVASQSIIAYTMSLGAENSVAYSNNSIAIPTNFTISVTTEILPVSMTKTSVDCTMYICGDSTECSNLLLQYGSFCTQLNRALTGIAVEQDKNTQEVFAQVKQIYKTPPIKDFGGFNFSQILPDPSKPSKRSFIEDLLFNKVTLADVGFIKQYGDCLGDIAARDLICAQKFNGLTVLPPLLTDEMIAQYTSALLAGTITSGWTFGAGAALQIPFAMQMAYRFNGIGVTQNVLYENQKLIANQFNSAIGKIQDSLSSTASALGKLQDVVNQNAQALNTLVKQLSSNCGAISSVLNDILSRLDKVEAEVQIDRLITCRLQSLQTYVTQQLIRAAEIRASANLAATKMSECVLGQSKRVDFCGKGYHLMSFPQSAPHGVVFLHVTYVPAQEKNFTTAPAICHDGKAHFPREGVFVSNGTHWFVTQRNFYEPQIITTDNTFVSGNCDVVIGIVNNTVYDPLQPELDSFKEELDKYFKNHTSPDVDLGDISGINASVVNIQKEIDRLNEVAKNLNESLIDLQELGKYEQYIKGGGSGGGQIYEGKLTAEGLRFGIVASRFNHALVDRLVEGAIDAIVRHGGREEDITLVRVPGSWEIPVAAGELARKEDIDAVIAIGVLIRGATPHFDYIASEVSKGLADLSLELRKPITFGVITADTLEQAIERAGTKHGNKGWEAALSAIEMANLFKSLR

SEQ ID NO: 4416 - protein, 1371 aa, Artificial Sequence
  SARS-CoV-2/Greece/16/2020__EPI_ISL_418265 spike protein (1-1211)(F970C_G999C) LumSynth construct
MFVFLVLLPLVSSQCVNLTTRTQLPPAYTNSFTRGVYYPDKVFRSSVLHSTQDLFLPFFSNVTWFHAIHVSGTNGTKRFDNPVLPFNDGVYFASTEKSNIIRGWIFGTTLDSKTQSLLIVNNATNVVIKVCEFQFCNDPFLGVYYHKNNKSWMESEFRVYSSANNCTFEYVSQPFLMDLEGKQGNFKNLREFVFKNVDGYFKIYSKHTPINLVRDLPQGFSALEPLVDLPIGINITRFQTLLALHRSYLTPGDSSSGWTAGAAAYYVGYLQPRTFLLKYNENGTITDAVDCALDPLSETKCTLKSFTVEKGIYQTSNFRVQPTESIVRFPNITNLCPFGEVFNATRFASVYAWNRKRISNCVADYSVLYNSASFSTFKCYGVSPTKLNDLCFTNVYADSFVIRGDEVRQIAPGQTGKIADYNYKLPDDFTGCVIAWNSNNLDSKVGGNYNYLYRLFRKSNLKPFERDISTEIYQAGSTPCNGVEGFNCYFPLQSYGFQPTNGVGYQPYRVVVLSFELLHAPATVCGPKKSTNLVKNKCVNFNFNGLTGTGVLTESNKKFLPFQQFGRDIADTTDAVRDPQTLEILDITPCSFGGVSVITPGTNTSNQVAVLYQDVNCTEVPVAIHADQLTPTWRVYSTGSNVFQTRAGCLIGAEHVNNSYECDIPIGAGICASYQTQTNSPRRARSVASQSIIAYTMSLGAENSVAYSNNSIAIPTNFTISVTTEILPVSMTKTSVDCTMYICGDSTECSNLLLQYGSFCTQLNRALTGIAVEQDKNTQEVFAQVKQIYKTPPIKDFGGFNFSQILPDPSKPSKRSFIEDLLFNKVTLADAGFIKQYGDCLGDIAARDLICAQKFNGLTVLPPLLTDEMIAQYTSALLAGTITSGWTFGAGAALQIPFAMQMAYRFNGIGVTQNVLYENQKLIANQFNSAIGKIQDSLSSTASALGKLQDVVNQNAQALNTLVKQLSSNCGAISSVLNDILSRLDKVEAEVQIDRLITCRLQSLQTYVTQQLIRAAEIRASANLAATKMSECVLGQSKRVDFCGKGYHLMSFPQSAPHGVVFLHVTYVPAQEKNFTTAPAICHDGKAHFPREGVFVSNGTHWFVTQRNFYEPQIITTDNTFVSGNCDVVIGIVNNTVYDPLQPELDSFKEELDKYFKNHTSPDVDLGDISGINASVVNIQKEIDRLNEVAKNLNESLIDLQELGKYEQYIKGGGSGGGQIYEGKLTAEGLRFGIVASRFNHALVDRLVEGAIDAIVRHGGREEDITLVRVPGSWEIPVAAGELARKEDIDAVIAIGVLIRGATPHFDYIASEVSKGLADLSLELRKPITFGVITADTLEQAIERAGTKHGNKGWEAALSAIEMANLFKSLR

SEQ ID NO: 4417 - protein, 1371 aa, Artificial Sequence
  SARS-CoV-2/Iceland/319/2020__EPI_ISL_417648 spike protein (1-1211)(F970C_G999C) LumSynth construct
MFVFLVLLPLVSSQCVNLTTRTQLPPAYTNSFTRGVYYPDKVFRSSVLHSTQDLFLPFFSNVTWFHAIHVSGTNGTKRFDNPVLPFNDGVYFASTEKSNIIRGWIFGTTLDSKTQSLLIVNNATNVVIKVCEFQFCNDPFLGVYYHKNNKSWMESEFRVYSSANNCTFEYVSQPFLIDLEGKQGNFKNLREFVFKNIDGYFKIYSKHTPINLVRDLPQGFSALEPLVDLPIGINITRFQTLLALHRSYLTPGDSSSGWTAGAAAYYVGYLQPRTFLLKYNENGTITDAVDCALDPLSETKCTLKSFTVEKGIYQTSNFRVQPTESIVRFPNITNLCPFGEVFNATRFASVYAWNRKRISNCVADYSVLYNSASFSTFKCYGVSPTKLNDLCFTNVYADSFVIRGDEVRQIAPGQTGKIADYNYKLPDDFTGCVIAWNSNNLDSKVGGNYNYLYRLFRKSNLKPFERDISTEIYQAGSTPCNGVEGFNCYFPLQSYGFQPTNGVGYQPYRVVVLSFELLHAPATVCGPKKSTNLVKNKCVNFNFNGLTGTGVLTESNKKFLPFQQFGRDIADTTDAVRDPQTLEILDITPCSFGGVSVITPGTNTSNQVAVLYQGVNCTEVPVAIHADQLTPTWRVYSTGSNVFQTRAGCLIGAEHVNNSYECDIPIGAGICASYQTQTNSPRRARSVASQSIIAYTMSLGAENSVAYSNNSIAIPTNFTISVTTEILPVSMTKTSVDCTMYICGDSTECSNLLLQYGSFCTQLNRALTGIAVEQDKNTQEVFAQVKQIYKTPPIKDFGGFNFSQILPDPSKPSKRSFIEDLLFNKVTLADAGFIKQYGDCLGDIAARDLICAQKFNGLTVLPPLLTDEMIAQYTSALLAGTITSGWTFGAGAALQIPFAMQMAYRFNGIGVTQNVLYENQKLIANQFNSAIGKIQDSLSSTASALGKLQDVVNQNAQALNTLVKQLSSNCGAISSVLNDILSRLDKVEAEVQIDRLITCRLQSLQTYVTQQLIRAAEIRASANLAATKMSECVLGQSKRVDFCGKGYHLMSFPQSAPHGVVFLHVTYVPAQEKNFTTAPAICHDGKAHFPREGVFVSNGTHWFVTQRNFYEPQIITTDNTFVSGNCDVVIGIVNNTVYDPLQPELDSFKEELDKYFKNHTSPDVDLGDISGINASVVNIQKEIDRLNEVAKNLNESLIDLQELGKYEQYIKGGGSGGGQIYEGKLTAEGLRFGIVASRFNHALVDRLVEGAIDAIVRHGGREEDITLVRVPGSWEIPVAAGELARKEDIDAVIAIGVLIRGATPHFDYIASEVSKGLADLSLELRKPITFGVITADTLEQAIERAGTKHGNKGWEAALSAIEMANLFKSLR

SEQ ID NO: 4418 - protein, 1371 aa, Artificial Sequence
  SARS-CoV-2/Congo/94/2020__EPI_ISL_417947 spike protein (1-1211)(F970C_G999C) LumSynth construct
MFVFLVLLPLVSSQCVNLTTRTQLPPAYTNSFTRGVYYPDKVFRSSVLHSTQDLFLPFFSNVTWFHAIHVSGTNGTKRFDNPVLPFNDGVYFASTEKSNIIRGWIFGTTLDSKTQSLLIVNNATNVVIKVCEFQFCNDPFLGVYYHKNNKSWMESEFRVYSSANNCTFEYVSQPFLMDLEGKQGNFKNLREFVFKNIDGYFKIYSKHTPINLVRDLPQGFSALEPLVDLPIGINITRFQTLLALHRSYLTPGDSSSGWTAGAAAYYVGYLQPRTFLLKYNENGTITDAVDCALDPLSETKCTLKSFTVEKGIYQTSNFRVQPTESIVRFPNITNLCPFGEVFNATRFASVYAWNRKRISNCVADYSVLYNSASFSTFKCYGVSPTKLNDLCFTNVYADSFVIRGDEVRQIAPGQTGKIADYNYKLPDDFTGCVIAWNSNNLDSKVGGNYNYLYRLFRKSNLKPFERDISTEIYQAGSTPCNGVEGFNCYFPLQSYGFQPTNGVGYQPYRVVVLSFELLHAPATVCGPKKSTNLVKNKCVNFNFNGLTGTGVLTESNKKFLPFQQFGRDIADTTDAVRDPQTLEILDITPCSFGGVSVITPGTNTSNQVAVLYQGVNCTEVPVAIHADQLTPTWRVYSTGSNVFQTRAGCLIGAEHVNNSYECDIPIGAGICASYQTQTNSPRRARSVASQSIIAYTMSLGAENSVAYSNNSIAIPTNFTISVTTEILPVSMTKTSVDCTMYICGDSTECSNLLLQYGSFCTQLNRALTGIAVEQDKNTQEVFAQVKQIYKTPPIKDFGGFNFSQILPDPSKPSKRSFIEDILFNKVTLADAGFIKQYGDCLGDIAARDLICAQKFNGLTVLPPLLTDEMIAQYTSALLAGTITSGWTFGAGAALQIPFAMQMAYRFNGIGVTQNVLYENQKLIANQFNSAIGKIQDSLSSTASALGKLQDVVNQNAQALNTLVKQLSSNCGAISSVLNDILSRLDKVEAEVQIDRLITCRLQSLQTYVTQQLIRAAEIRASANLAATKMSECVLGQSKRVDFCGKGYHLMSFPQSAPHGVVFLHVTYVPAQEKNFTTAPAICHDGKAHFPREGVFVSNGTHWFVTQRNFYEPQIITTDNTFVSGNCDVVIGIVNNTVYDPLQPELDSFKEELDKYFKNHTSPDVDLGDISGINASVVNIQKEIDRLNEVAKNLNESLIDLQELGKYEQYIKGGGSGGGQIYEGKLTAEGLRFGIVASRFNHALVDRLVEGAIDAIVRHGGREEDITLVRVPGSWEIPVAAGELARKEDIDAVIAIGVLIRGATPHFDYIASEVSKGLADLSLELRKPITFGVITADTLEQAIERAGTKHGNKGWEAALSAIEMANLFKSLR

SEQ ID NO: 4419 - protein, 1371 aa, Artificial Sequence
  SARS-CoV-2/Congo/158/2020__EPI_ISL_417950 spike protein (1-1211)(F970C_G999C) LumSynth construct
MFVFLVLLPLVSSQCVNLTTRTQLPPAYTNSFTRGVYYPDKVFRSSVLHSTQDLFLPFFSNVTWFHAIHVSGTNGTKRFDNPVLPFNDGVYFASTEKSNIIRGWIFGTTLDSKTQSLLIVNNATNVVIKVCEFQFCNDPFLGVYYHKNNKSWMESEFRVYSSANNCTFEYVSQPFLMDLEGKQGNFKNLREFVFKNIDGYFKIYSKHTPINLVRDLPQGFSALEPLVDLPIGINITRFQTLLALHRSYLTPGDSSSGWTAGAAAYYVGYLQPRTFLLKYNENGTITDAVDCALDPLSETKCTLKSFTVEKGIYQTSNFRVQPTESIVRFPNITNLCPFGEVFNATRFASVYAWNRKRISNCVADYSVLYNSASFSTFKCYGVSPTKLNDLCFTNVYADSFVIRGDEVRQIAPGQTGKIADYNYKLPDDFTGCVIAWNSNNLDSKVGGNYNYLYRLFRKSNLKPFERDISTEIYQAGSTPCNGVEGFNCYFPLQSYGFQPTNGVGYQPYRVVVLSFELLHAPATVCGPKKSTNLVKNKCVNFNFNGLTGTGVLTESNKKFLPFQQFGRDIADTTDAVRDPQTLEILDITPCSFGGVSVITPGTNTSNQVAVLYQDVNCTEVPVAIHADQLTPTWRVYSTGSNVFQTRAGCLIGAEHVNNSYECDIPIGAGICASYQTQTNSPRRARSVASQSIIAYTMSLGAENSVAYSNNSIAIPTNFTISVTTEILPVSMTKTSVDCTMYICGDSTECSNLLLQYGSFCTQLNRALTGIAVEQDKNTQEVFAQVKQIYKTPPIKDFGGFNFSQILPDPSKPSKRSFIEDLLFNKVTLADAGFIKQYGDCLGDIAARDLICAQKFNGLTVLPPLLTDEMIAQYTSALLAGTITSGWTFGAGAALQIPFAMQMAYRFNGIGVTQNVLYENQKLIANQFNSAIGKIQDSLSSTASALGKLQDVVNQNAQALNTLVKQLSSNCGAISSVLNDILSRLDKVEAEVQIDRLITCRLQSLQTYVTQQLIRAAEIRASANLAATKMSECVLGQSKRVDFCGKGYHLMSFPQSAPHGVVFLHVTYVPAQEKNFTTAPAICHDGKAHFPREGVFVSNGTHWFVTQRNFYEPQIITTDNTFLSGNCDVVIGIVNNTVYDPLQPELDSFKEELDKYFKNHTSPDVDLGDISGINASVVNIQKEIDRLNEVAKNLNESLIDLQELGKYEQYIKGGGSGGGQIYEGKLTAEGLRFGIVASRFNHALVDRLVEGAIDAIVRHGGREEDITLVRVPGSWEIPVAAGELARKEDIDAVIAIGVLIRGATPHFDYIASEVSKGLADLSLELRKPITFGVITADTLEQAIERAGTKHGNKGWEAALSAIEMANLFKSLR

SEQ ID NO: 4420 - protein, 1371 aa, Artificial Sequence
  SARS-CoV-2/USA/UT-00034/2020__EPI_ISL_417977 spike protein (1-1211)(F970C_G999C) LumSynth construct
MFVFLVLLPLVSSQCVNLTTRTQLPPAYTNSFTRGVYYPDKVFRSSVLHSTQDLFLPFFSNVTWFHAIHVSGTNGTKRFDNPVLPFNDGVYFASTEKSNIIRGWIFGTTLDSKTQSLLIVNNATNVVIKVCEFQFCNDPFLGVYYYKNNKSWMESEFRVYSSANNCTFEYVSQPFLMDLEGKQGNFKNLREFVFKNIDGYFKIYSKHTPINLVRDLPQGFSALEPLVDLPIGINITRFQTLLALHRSYLTPGDSSSGWTAGAAAYYVGYLQPRTFLLKYNENGTITDAVDCALDPLSETKCTLKSFTVEKGIYQTSNFRVQPTESIVRFPNITNLCPFGEVFNATRFASVYAWNRKRISNCVADYSVLYNSASFSTFKCYGVSPTKLNDLCFTNVYADSFVIRGDEVRQIAPGQTGKIADYNYKLPDDFTGCVIAWNSNNLDSKVGGNYNYLYRLFRKSNLKPFERDISTEIYQAGSTPCNGVEGFNCYFPLQSYGFQPTNGVGYQPYRVVVLSFELLHAPATVCGPKKSTNLVKNKCVNFNFNGLTGTGVLTESNKKFLPFQQFGRDIADTTDAVRDPQTLEILDITPCSFGGVSVITPGTNTSNQVAVLYQGVNCTEVPVAIHADQLTPTWRVYSTGSNVFQTRAGCLIGAEHVNNSYECDIPIGAGICASYQTQTNSPRRARSVASQSIIAYTMSLGAENSVAYSNNSIAIPTNFTISVTTEILPVSMTKTSVDCTMYICGDSTECSNLLLQYGSFCTQLNRALTGIAVEQDKNTQEVFAQVKQIYKTPPIKDFGGFNFSQILPDPSKPSKRSFIEDLLFNKVTLADAGFIKQYGDCLGDIAARDLICAQKFNGLTVLPPLLTDEMIAQYTSALLAGTITSGWTFGAGAALQIPFAMQMAYRFNGIGVTQNVLYENQKLIANQFNSAIGKIQDSLSSTASALGKLQDVVNQNAQALNTLVKQLSSNCGAISSVLNDILSRLDKVEAEVQIDRLITCRLQSLQTYVTQQLIRAAEIRASANLAATKMSECVLGQSKRVDFCGKGYHLMSFPQSAPHGVVFLHVTYVPAQEKNFTTAPAICHDGKAHFPREGVFVSNGTHWFVTQRNFYEPQIITTDNTFVSGNCDVVIGIVNNTVYDPLQPELDSFKEELDKYFKNHTSPDVDLGDISGINASVVNIQKEIDRLNEVAKNLNESLIDLQELGKYEQYIKGGGSGGGQIYEGKLTAEGLRFGIVASRFNHALVDRLVEGAIDAIVRHGGREEDITLVRVPGSWEIPVAAGELARKEDIDAVIAIGVLIRGATPHFDYIASEVSKGLADLSLELRKPITFGVITADTLEQAIERAGTKHGNKGWEAALSAIEMANLFKSLR

SEQ ID NO: 4421 - protein, 1371 aa, Artificial Sequence
  SARS-CoV-2/USA/UT-00033/2020__EPI_ISL_417976 spike protein (1-1211)(F970C_G999C) LumSynth construct
MFVFLVLLPLVSSQCVNLTTRTQLPPAYTNSFTRGVYYPDKVFRSSVLHSTQDLFLPFFSNVTWFHAIHVSGTNGTKRFDNPVLPFNDGVYFASTEKSNIIRGWIFGTTLDSKTQSLLIVNNATNVVIKVCEFQFCNDPFLGVYYHKNNKSWMESEFRVYSSANNCTFEYVSQPFLMDLEGKQGNFKNLREFVFKNIDGYFKIYSKHTPINLVRDLPQGFSALEPLVDLPIGINITRFQTLLALHRSYLTPGDSSSGLTAGAAAYYVGYLQPRTFLLKYNENGTITDAVDCALDPLSETKCTLKSFTVEKGIYQTSNFRVQPTESIVRFPNITNLCPFGEVFNATRFASVYAWNRKRISNCVADYSVLYNSASFSTFKCYGVSPTKLNDLCFTNVYADSFVIRGDEVRQIAPGQTGKIADYNYKLPDDFTGCVIAWNSNNLDSKVGGNYNYLYRLFRKSNLKPFERDISTEIYQAGSTPCNGVEGFNCYFPLQSYGFQPTNGVGYQPYRVVVLSFELLHAPATVCGPKKSTNLVKNKCVNFNFNGLTGTGVLTESNKKFLPFQQFGRDIADTTDAVRDPQTLEILDITPCSFGGVSVITPGTNTSNQVAVLYQGVNCTEVPVAIHADQLTPTWRVYSTGSNVFQTRAGCLIGAEHVNNSYECDIPIGAGICASYQTQTNSPRRARSVASQSIIAYTMSLGAENSVAYSNNSIAIPTNFTISVTTEILPVSMTKTSVDCTMYICGDSTECSNLLLQYGSFCTQLNRALTGIAVEQDKNTQEVFAQVKQIYKTPPIKDFGGFNFSQILPDPSKPSKRSFIEDLLFNKVTLADAGFIKQYGDCLGDIAARDLICAQKFNGLTVLPPLLTDEMIAQYTSALLAGTITSGWTFGAGAALQIPFAMQMAYRFNGIGVTQNVLYENQKLIANQFNSAIGKIQDSLSSTASALGKLQDVVNQNAQALNTLVKQLSSNCGAISSVLNDILSRLDKVEAEVQIDRLITCRLQSLQTYVTQQLIRAAEIRASANLAATKMSECVLGQSKRVDFCGKGYHLMSFPQSAPHGVVFLHVTYVPAQEKNFTTAPAICHDGKAHFPREGVFVSNGTHWFVTQRNFYEPQIITTDNTFVSGNCDVVIGIVNNTVYDPLQPELDSFKEELDKYFKNHTSPDVDLGDISGINASVVNIQKEIDRLNEVAKNLNESLIDLQELGKYEQYIKGGGSGGGQIYEGKLTAEGLRFGIVASRFNHALVDRLVEGAIDAIVRHGGREEDITLVRVPGSWEIPVAAGELARKEDIDAVIAIGVLIRGATPHFDYIASEVSKGLADLSLELRKPITFGVITADTLEQAIERAGTKHGNKGWEAALSAIEMANLFKSLR

SEQ ID NO: 4422 - protein, 1371 aa, Artificial Sequence
  SARS-CoV-2/USA/WI-13/2020__EPI_ISL_417516 spike protein (1-1211)(F970C_G999C) LumSynth construct
MFVFLVLLPLVSSQCVNLTTRTQLPPAYTNSFTRGVYYPDKVFRSSVLHSTQDLFLPFFSNVTWFHAIHVSGTNGTKRFDNPVLPFNDGVYFASTEKSNIIRGWIFGTTLDSKTQSLLIVNNATNVVIKVCEFQFCNDPFLGVYYHKNNKSWMESEFRVYSSANNCTFEYVSQPFLMDLEGKQGNFKNLREFVFKNIDGYFKIYSKHTPINLVRDLPQGFSALEPLVDLPIGINITRFQTLLALHRSYLTPGDSSSGWTAGAAAYYVGYLQPRTFLLKYNENGTITDAVDCALDPLSETKCTLKSFTVEKGIYQTSNFRVLPTESIVRFPNITNLCPFGEVFNATRFASVYAWNRKRISNCVADYSVLYNSASFSTFKCYGVSPTKLNDLCFTNVYADSFVIRGDEVRQIAPGQTGKIADYNYKLPDDFTGCVIAWNSNNLDSKVGGNYNYLYRLFRKSNLKPFERDISTEIYQAGSTPCNGVEGFNCYFPLQSYGFQPTNGVGYQPYRVVVLSFELLHAPATVCGPKKSTNLVKNKCVNFNFNGLTGTGVLTESNKKFLPFQQFGRDIADTTDAVRDPQTLEILDITPCSFGGVSVITPGTNTSNQVAVLYQGVNCTEVPVAIHADQLTPTWRVYSTGSNVFQTRAGCLIGAEHVNNSYECDIPIGAGICASYQTQTNSPRRARSVASQSIIAYTMSLGAENSVAYSNNSIAIPTNFTISVTTEILPVSMTKTSVDCTMYICGDSTECSNLLLQYGSFCTQLNRALTGIAVEQDKNTQEVFAQVKQIYKTPPIKDFGGFNFSQILPDPSKPSKRSFIEDLLFNKVTLADAGFIKQYGDCLGDIAARDLICAQKFNGLTVLPPLLTDEMIAQYTSALLAGTITSGWTFGAGAALQIPFAMQMAYRFNGIGVTQNVLYENQKLIANQFNSAIGKIQDSLSSTASALGKLQDVVNQNAQALNTLVKQLSSNCGAISSVLNDILSRLDKVEAEVQIDRLITCRLQSLQTYVTQQLIRAAEIRASANLAATKMSECVLGQSKRVDFCGKGYHLMSFPQSAPHGVVFLHVTYVPAQEKNFTTAPAICHDGKAHFPREGVFVSNGTHWFVTQRNFYEPQIITTDNTFVSGNCDVVIGIVNNTVYDPLQPELDSFKEELDKYFKNHTSPDVDLGDISGINASVVNIQKEIDRLNEVAKNLNESLIDLQELGKYEQYIKGGGSGGGQIYEGKLTAEGLRFGIVASRFNHALVDRLVEGAIDAIVRHGGREEDITLVRVPGSWEIPVAAGELARKEDIDAVIAIGVLIRGATPHFDYIASEVSKGLADLSLELRKPITFGVITADTLEQAIERAGTKHGNKGWEAALSAIEMANLFKSLR

SEQ ID NO: 4423 - protein, 1370 aa, Artificial Sequence
  SARS-CoV-2/India/1-27/2020__EPI_ISL_413522 spike protein (1-1210)(F969C_G998C) LumSynth construct
MFVFLVLLPLVSSQCVNLTTRTQLPPAYTNSFTRGVYYPDKVFRSSVLHSTQDLFLPFFSNVTWFHAIHVSGTNGTKRFDNPVLPFNDGVYFASTEKSNIIRGWIFGTTLDSKTQSLLIVNNATNVVIKVCEFQFCNDPFLGVYHKNNKSWMESEFRVYSSANNCTFEYVSQPFLMDLEGKQGNFKNLREFVFKNIDGYFKIYSKHTPINLVRDLPQGFSALEPLVDLPIGINITRFQTLLALHRSYLTPGDSSSGWTAGAAAYYVGYLQPRTFLLKYNENGTITDAVDCALDPLSETKCTLKSFTVEKGIYQTSNFRVQPTESIVRFPNITNLCPFGEVFNATRFASVYAWNRKRISNCVADYSVLYNSASFSTFKCYGVSPTKLNDLCFTNVYADSFVIRGDEVIQIAPGQTGKIADYNYKLPDDFTGCVIAWNSNNLDSKVGGNYNYLYRLFRKSNLKPFERDISTEIYQAGSTPCNGVEGFNCYFPLQSYGFQPTNGVGYQPYRVVVLSFELLHAPATVCGPKKSTNLVKNKCVNFNFNGLTGTGVLTESNKKFLPFQQFGRDIADTTDAVRDPQTLEILDITPCSFGGVSVITPGTNTSNQVAVLYQDVNCTEVPVAIHADQLTPTWRVYSTGSNVFQTRAGCLIGAEHVNNSYECDIPIGAGICASYQTQTNSPRRARSVASQSIIAYTMSLGAENSVAYSNNSIAIPTNFTISVTTEILPVSMTKTSVDCTMYICGDSTECSNLLLQYGSFCTQLNRALTGIAVEQDKNTQEVFAQVKQIYKTPPIKDFGGFNFSQILPDPSKPSKRSFIEDLLFNKVTLADAGFIKQYGDCLGDIAARDLICAQKFNGLTVLPPLLTDEMIAQYTSALLAGTITSGWTFGAGAALQIPFAMQMAYRFNGIGVTQNVLYENQKLIANQFNSAIGKIQDSLSSTASALGKLQDVVNQNAQALNTLVKQLSSNCGAISSVLNDILSRLDKVEAEVQIDRLITCRLQSLQTYVTQQLIRAAEIRASANLAATKMSECVLGQSKRVDFCGKGYHLMSFPQSAPHGVVFLHVTYVPAQEKNFTTAPAICHDGKAHFPREGVFVSNGTHWFVTQRNFYEPQIITTDNTFVSGNCDVVIGIVNNTVYDPLQPELDSFKEELDKYFKNHTSPDVDLGDISGINASVVNIQKEIDRLNEVAKNLNESLIDLQELGKYEQYIKGGGSGGGQIYEGKLTAEGLRFGIVASRFNHALVDRLVEGAIDAIVRHGGREEDITLVRVPGSWEIPVAAGELARKEDIDAVIAIGVLIRGATPHFDYIASEVSKGLADLSLELRKPITFGVITADTLEQAIERAGTKHGNKGWEAALSAIEMANLFKSLR

SEQ ID NO: 4424 - protein, 1365 aa, Artificial Sequence
  SARS-CoV-2/pangolin/Guangxi/P4L/2017__EPI_ISL_410538 spike protein (1-1205)(F964C_G993C) LumSynth construct
MFVFLFVLPLVSSQCVNLTTRTGIPPGYTNSSTRGVYYPDKVFRSSILHLTQDLFLPFFSNVTWFNTINYQGGFKKFDNPVLPFNDGVYFASTEKSNIIRGWIFGTTLDARTQSLLIVNNATNVVIKVCEFQFCTDPFLGVYYHNNNKTWVENEFRVYSSANNCTFEYISQPFLMDLEGKQGNFKNLREFVFKNVDGYFKIYSKHTPIDLVRDLPRGFAALEPLVDLPIGINITRFQTLLALHRSYLTPGNLESGWTTGAAAYYVGYLQQRTFLLSYNQNGTITDAVDCSLDPLSETKCTLKSLTVEKGIYQTSNFRVQPTISIVRFPNITNLCPFGEVFNASKFASVYAWNRKRISNCVADYSVLYNSTSFSTFKCYGVSPTKLNDLCFTNVYADSFVVKGDEVRQIAPGQTGVIADYNYKLPDDFTGCVIAWNSVKQDALTGGNYGYLYRLFRKSKLKPFERDISTEIYQAGSTPCNGQVGLNCYYPLERYGFHPTTGVNYQPFRVVVLSFELLNGPATVCGPKLSTTLVKDKCVNFNFNGLTGTGVLTTSKKQFLPFQQFGRDISDTTDAVRDPQTLEILDITPCSFGGVSVITPGTNTSNQVAVLYQDVNCTEVPMAIHAEQLTPAWRVYSAGANVFQTRAGCLVGAEHVNNSYECDIPVGAGICASYHSMSSLRSVNQRSIIAYTMSLGAENSVAYSNNSIAIPTNFTISVTTEILPVSMTKTSVDCTMYICGDSIECSNLLLQYGSFCTQLNRALTGIAVEQDKNTQEVFAQVKQIYKTPPIKDFGGFNFSQILPDPSKPSKRSFIEDLLFNKVTLADAGFIKQYGDCLGDIAARDLICAQKFNGLTVLPPLLTDEMIAQYTSALLAGTITSGWTFGAGAALQIPFAMQMAYRFNGIGVTQNVLYENQKLIANQFNSAIGKIQDSLSSTASALGKLQDVVNQNAQALNTLVKQLSSNCGAISSVLNDILSRLDKVEAEVQIDRLITCRLQSLQTYVTQQLIRAAEIRASANLAATKMSECVLGQSKRVDFCGKGYHLMSFPQSAPHGVVFLHVTYVPAQEKNFTTAPAICHEGKAHFPREGVFVSNGTHWFITQRNFYEPQIITTDNTFVSGSCDVVIGIVNNTVYDPLQPELDSFKEELDKYFKNHTSPDVDLGDISGINASVVNIQKEIDRLNEVAKNLNESPIDLQELGKYEQYIKGGGSGGGQIYEGKLTAEGLRFGIVASRFNHALVDRLVEGAIDAIVRHGGREEDITLVRVPGSWEIPVAAGELARKEDIDAVIAIGVLIRGATPHFDYIASEVSKGLADLSLELRKPITFGVITADTLEQAIERAGTKHGNKGWEAALSAIEMANLFKSLR

SEQ ID NO: 4425 - protein, 1365 aa, Artificial Sequence
  SARS-CoV-2/pangolin/Guangxi/P5L/2017__EPI_ISL_410540 spike protein (1-1205)(F964C_G993C) LumSynth construct
MFVFLFVLPLVSSQCVNLTTRTGIPPGYTNSSTRGVYYPDKVFRSSILHLTQDLFLPFFSNVTWFNTINYQGGFKKFDNPVLPFNDGVYFASTEKSNIIRGWIFGTTLDARTQSLLIVNNATNVVIKVCEFQFCTDPFLGVYYHNNNKTWVENEFRVYSSANNCTFEYISQPFLMDLEGKQGNFKNLREFVFKNVDGYFKIYSKHTPIDLVRDLPRGFAALEPLVDLPIGINITRFQTLLALHRSYLTPGKLESGWTTGAAAYYVGYLQQRTFLLSYNQNGTITDAVDCSLDPLSETKCTLKSLTVEKGIYQTSNFRVQPTISIVRFPNITNLCPFGEVFNASKFASVYAWNRKRISNCVADYSVLYNSTSFSTFKCYGVSPTKLNDLCFTNVYADSFVVKGDEVRQIAPGQTGVIADYNYKLPDDFTGCVIAWNSVKQDALTGGNYGYLYRLFRKSKLKPFERDISTEIYQAGSTPCNGQVGLNCYYPLERYGFHPTTGVNYQPFRVVVLSFELLNGPATVCGPKLSTTLVKDKCVNFNFNGLTGTGVLTTSKKQFLPFQQFGRDISDTTDAVRDPQTLEILDITPCSFGGVSVITPGTNTSNQVAVLYQDVNCTEVPMAIHAEQLTPAWRVYSAGANVFQTRAGCLVGAEHVNNSYECDIPVGAGICASYHSMSSFRSVNQRSIIAYTMSLGAENSVAYSNNSIAIPTNFTISVTTEILPVSMTKTSVDCTMYICGDSIECSNLLLQYGSFCTQLNRALTGIAVEQDKNTQEVFAQVKQIYKTPPIKDFGGFNFSQILPDPSKPSKRSFIEDLLFNKVTLADAGFIKQYGDCLGDIAARDLICAQKFNGLTVLPPLLTDEMIAQYTSALLAGTITSGWTFGAGAALQIPFAMQMAYRFNGIGVTQNVLYENQKLIANQFNSAIGKIQDSLSSTASALGKLQDVVNQNAQALNTLVKQLSSNCGAISSVLNDILSRLDKVEAEVQIDRLITCRLQSLQTYVTQQLIRAAEIRASANLAATKMSECVLGQSKRVDFCGKGYHLMSFPQSAPHGVVFLHVTYVPAQEKNFTTAPAICHEGKAHFPREGVFVSNGTHWFITQRNFYEPQIITTDNTFVSGSCDVVIGIVNNTVYDPLQPELDSFKEELDKYFKNHTSPDVDLGDISGINASVVNIQKEIDRLNEVAKNLNESLIDLQELGKYEQYIKGGGSGGGQIYEGKLTAEGLRFGIVASRFNHALVDRLVEGAIDAIVRHGGREEDITLVRVPGSWEIPVAAGELARKEDIDAVIAIGVLIRGATPHFDYIASEVSKGLADLSLELRKPITFGVITADTLEQAIERAGTKHGNKGWEAALSAIEMANLFKSLR

SEQ ID NO: 4426 - protein, 1365 aa, Artificial Sequence
  SARS-CoV-2/pangolin/Guangxi/P5E/2017__EPI_ISL_410541 spike protein (1-1205)(F964C_G993C) LumSynth construct
MFVFLFVLPLVSSQCVNLTTRTGIPPGYTNSSTRGVYYPDKVFRSSILHLTQDLFLPFFSNVTWFNTITYQGGSKKFDNPVLPFNDGVYFASTEKSNIIRGWIFGTTLDARTQSLLIVNNATNVVIKVCEFQFCTDPFLGVYYHNNNKTWVENEFRVYSSANNCTFEYISQPFLMDLEGKQGNFKNLREFVFKNVDGYFKIYSKHTPIDLVRDLPRGFAALEPLVDLPIGINITRFQTLLALHRSYLTPGKLESGWTTGAAAYYVGYLQQRTFLLSYNQNGTITDAVDCSLDPLSETKCTLKSLTVEKGIYQTSNFRVQPTISIVRFPNITNLCPFGEVFNASKFASVYAWNRKRISNCVADYSVLYNSTSFSTFKCYGVSPTKLNDLCFTNVYADSFVVKGDEVRQIAPGQTGVIADYNYKLPDDFTGCVIAWNSVKQDALTGDNYGYLYRLFRKSKLKPFERDISTEIYQAGSTPCNGQVGLNCYYPLERYGFHPTTGVNYQPFRVVVLSFELLNGPATVCGPKLSTTLVKDKCVNFNFNGLTGTGVLTTSKKQFLPFQQFGRDISDTTDAVRDPQTLEILDITPCSFGGVSVITPGTNTSNQVAVLYQDVNCTEVPMAIHAEQLTPAWRVYSAGANVFQTRAGCLVGAEHVNNSYECDIPVGAGICASYHSMSSFRSVNQRSIIAYTMSLGAENSVAYSNNSIAIPTNFTISVTTEILPVSMTKTSVDCTMYICGDSIECSNLLLQYGSFCTQLNRALTGIAVEQDKNTQEVFAQVKQIYKTPPIKDFGGFNFSQILPDPSKPSKRSFIEDLLFNKVTLADAGFIKQYGDCLGDIAARDLICAQKFNGLTVLPPLLTDEMIAQYTSALLAGTITSGWTFGAGAALQIPFAMQMAYRFNGIGVTQNVLYENQKLIANQFNSAIGKIQDSLSSTASALGKLQDVVNQNAQALNTLVKQLSSNCGAISSVLNDILSRLDKVEAEVQIDRLITCRLQSLQTYVTQQLIRAAEIRASANLAATKMSECVLGQSKRVDFCGKGYHLMSFPQSAPHGVVFLHVTYVPAQEKNFTTAPAICHEGKAHFPREGVFVSNGTHWFITQRNFYEPQIITTDNTFVSGSCDVVIGIVNNTVYDPLQPELDSFKEELDKYFKNHTSPDVDLGDISGINASVVNIQKEIDRLNEVAKNLNESLIDLQELGKYEQYIKGGGSGGGQIYEGKLTAEGLRFGIVASRFNHALVDRLVEGAIDAIVRHGGREEDITLVRVPGSWEIPVAAGELARKEDIDAVIAIGVLIRGATPHFDYIASEVSKGLADLSLELRKPITFGVITADTLEQAIERAGTKHGNKGWEAALSAIEMANLFKSLR

SEQ ID NO: 4427 - protein, 1363 aa, Artificial Sequence
  SARS-CoV-2/pangolin/Guangxi/P1E/2017__EPI_ISL_410539 spike protein (1-1203)(F962C_G991C) LumSynth construct
MFVFLFVLPLVSSQCVNLTTRTGIQPGYTNSSTRGVYYPDKVFRSSILHLTQDLFLPFFSNVTWFNTINYQGGFKKFDNPVLPFNDGVYFASTEKSNIIRGWIFGTTLDARTQSLLIVNNATNVVIKVCEFQFCTDPFLGVYYHNNNKTWVENEFRVYSSANNCTFEYISQPFLMDLEGKQGNFKNLREFVFKNVDGYFKIYSKHTPIDLVRDLPRGFAALEPLVDLPIGINITRFQTLLALHRSYLTPGKLESGWTTGAAAYYVGYLQQRTFLLSYNQNGTITDAVDCSLDPLSETKCTLKSLTVEKGIYQTSNFRVQPTISIVRFPNITNLCPFGEVFNASKFASVYAWNRKRISNCVADYSVLYNSTSFSTFKCYGVSPTKLNDLCFTNVYADSFVVKGDEVRQIAPGQTGVIADYNYKLPDDFTGCVIAWNSVKQDALTGGNYLYRLFRKSKLKPFERDISTEIYQAGSTPCNGQVGLNCYYPLERYGFHPTTGVNYQPFRVVVLSFELLNGPATVCGPKLSTTLVKDKCVNFNFNGLTGTGVLTTSKKQFLPFQQFGRDISDTTDAVRDPQTLEILDITPCSFGGVSVITPGTNTSNQVAVLYQDVNCTEVPMAIHAEQLTPAWRVYSAGANVFQTRAGCLVGAEHVNNSYECDIPVGAGICASYHSMSSLRSVNQRSIIAYTMSLGAENSVAYSNNSIAIPTNFTISVTTEILPVSMTKTSVDCTMYICGDSIECSNLLLQYGSFCTQLNRALTGIAVEQDKNTQEVFAQVKQIYKTPPIKDFGGFNFSQILPDPSKPSKRSFIEDLLFNKVTLADAGFIKQYGDCLGDIAARDLICAQKFNGLTVLPPLLTDEMIAQYTSALLAGTITSGWTFGAGAALQIPFAMQMAYRFNGIGVTQNVLYENQKLIANQFNSAIGKIQDSLSSTASALGKLQDVVNQNAQALNTLVKQLSSNCGAISSVLNDILSRLDKVEAEVQIDRLITCRLQSLQTYVTQQLIRAAEIRASANLAATKMSECVLGQSKRVDFCGKGYHLMSFPQSAPHGVVFLHVTYVPAQEKNFTTAPAICHEGKAHFPREGVFVSNGTHWFITQRNFYEPQIITTDNTFVSGSCDVVIGIVNNTVYDPLQPELDSFKEELDKYFKNHTSPDVDLGDISGINASVVNIQKEIDRLNEVAKNLNESLIDLQELGKYEQYIKGGGSGGGQIYEGKLTAEGLRFGIVASRFNHALVDRLVEGAIDAIVRHGGREEDITLVRVPGSWEIPVAAGELARKEDIDAVIAIGVLIRGATPHFDYIASEVSKGLADLSLELRKPITFGVITADTLEQAIERAGTKHGNKGWEAALSAIEMANLFKSLR

SEQ ID NO: 4428 - protein, 1371 aa, Artificial Sequence
  SARS-CoV-2/Wuhan/WIV05/2019__EPI_ISL_402128 spike protein (1-1211)(A972C_R995C) LumSynth construct
MFVFLVLLPLVSSQCVNLTTRTQLPPAYTNSFTRGVYYPDKVFRSSVLHSTQDLFLPFFSNVTWFHAIHVSGTNGTKRFDNPVLPFNDGVYFASTEKSNIIRGWIFGTTLDSKTQSLLIVNNATNVVIKVCEFQFCNDPFLGVYYHKNNKSWMESEFRVYSSANNCTFEYVSQPFLMDLEGKQGNFKNLREFVFKNIDGYFKIYSKHTPINLVRDLPQGFSALEPLVDLPIGINITRFQTLLALHRSYLTPGDSSSGWTAGAAAYYVGYLQPRTFLLKYNENGTITDAVDCALDPLSETKCTLKSFTVEKGIYQTSNFRVQPTESIVRFPNITNLCPFGEVFNATRFASVYAWNRKRISNCVADYSVLYNSASFSTFKCYGVSPTKLNDLCFTNVYADSFVIRGDEVRQIAPGQTGKIADYNYKLPDDFTGCVIAWNSNNLDSKVGGNYNYLYRLFRKSNLKPFERDISTEIYQAGSTPCNGVEGFNCYFPLQSYGFQPTNGVGYQPYRVVVLSFELLHAPATVCGPKKSTNLVKNKCVNFNFNGLTGTGVLTESNKKFLPFQQFGRDIADTTDAVRDPQTLEILDITPCSFGGVSVITPGTNTSNQVAVLYQDVNCTEVPVAIHADQLTPTWRVYSTGSNVFQTRAGCLIGAEHVNNSYECDIPIGAGICASYQTQTNSPRRARSVASQSIIAYTMSLGAENSVAYSNNSIAIPTNFTISVTTEILPVSMTKTSVDCTMYICGDSTECSNLLLQYGSFCTQLNRALTGIAVEQDKNTQEVFAQVKQIYKTPPIKDFGGFNFSQILPDPSKPSKRSFIEDLLFNKVTLADAGFIKQYGDCLGDIAARDLICAQKFNGLTVLPPLLTDEMIAQYTSALLAGTITSGWTFGAGAALQIPFAMQMAYRFNGIGVTQNVLYENQKLIANQFNSAIGKIQDSLSSTASALGKLQDVVNQNAQALNTLVKQLSSNFGCISSVLNDILSRLDKVEAEVQIDCLITGRLQSLQTYVTQQLIRAAEIRASANLAATKMSECVLGQSKRVDFCGKGYHLMSFPQSAPHGVVFLHVTYVPAQEKNFTTAPAICHDGKAHFPREGVFVSNGTHWFVTQRNFYEPQIITTDNTFVSGNCDVVIGIVNNTVYDPLQPELDSFKEELDKYFKNHTSPDVDLGDISGINASVVNIQKEIDRLNEVAKNLNESLIDLQELGKYEQYIKGGGSGGGQIYEGKLTAEGLRFGIVASRFNHALVDRLVEGAIDAIVRHGGREEDITLVRVPGSWEIPVAAGELARKEDIDAVIAIGVLIRGATPHFDYIASEVSKGLADLSLELRKPITFGVITADTLEQAIERAGTKHGNKGWEAALSAIEMANLFKSLR

SEQ ID NO: 4429 - protein, 1367 aa, Artificial Sequence
  SARS-CoV-2/bat/Yunnan/RaTG13/2013__EPI_ISL_402131 spike protein (1-1207)(A968C_R991C) LumSynth construct
MFVFLVLLPLVSSQCVNLTTRTQLPPAYTNSSTRGVYYPDKVFRSSVLHLTQDLFLPFFSNVTWFHAIHVSGTNGIKRFDNPVLPFNDGVYFASTEKSNIIRGWIFGTTLDSKTQSLLIVNNATNVVIKVCEFQFCNDPFLGVYYHKNNKSWMESEFRVYSSANNCTFEYVSQPFLMDLEGKQGNFKNLREFVFKNIDGYFKIYSKHTPINLVRDLPPGFSALEPLVDLPIGINITRFQTLLALHRSYLTPGDSSSGWTAGAAAYYVGYLQPRTFLLKYNENGTITDAVDCALDPLSETKCTLKSFTVEKGIYQTSNFRVQPTDSIVRFPNITNLCPFGEVFNATTFASVYAWNRKRISNCVADYSVLYNSTSFSTFKCYGVSPTKLNDLCFTNVYADSFVITGDEVRQIAPGQTGKIADYNYKLPDDFTGCVIAWNSKHIDAKEGGNFNYLYRLFRKANLKPFERDISTEIYQAGSKPCNGQTGLNCYYPLYRYGFYPTDGVGHQPYRVVVLSFELLNAPATVCGPKKSTNLVKNKCVNFNFNGLTGTGVLTESNKKFLPFQQFGRDIADTTDAVRDPQTLEILDITPCSFGGVSVITPGTNASNQVAVLYQDVNCTEVPVAIHADQLTPTWRVYSTGSNVFQTRAGCLIGAEHVNNSYECDIPIGAGICASYQTQTNSRSVASQSIIAYTMSLGAENSVAYSNNSIAIPTNFTISVTTEILPVSMTKTSVDCTMYICGDSTECSNLLLQYGSFCTQLNRALTGIAVEQDKNTQEVFAQVKQIYKTPPIKDFGGFNFSQILPDPSKPSKRSFIEDLLFNKVTLADAGFIKQYGDCLGDIAARDLICAQKFNGLTVLPPLLTDEMIAQYTSALLAGTITSGWTFGAGAALQIPFAMQMAYRFNGIGVTQNVLYENQKLIANQFNSAIGKIQDSLSSTASALGKLQDVVNQNAQALNTLVKQLSSNFGCISSVLNDILSRLDKVEAEVQIDCLITGRLQSLQTYVTQQLIRAAEIRASANLAATKMSECVLGQSKRVDFCGKGYHLMSFPQSAPHGVVFLHVTYVPAQEKNFTTAPAICHDGKAHFPREGVFVSNGTHWFVTQRNFYEPQIITTDNTFVSGSCDVVIGIVNNTVYDPLQPELDSFKEELDKYFKNHTSPDVDLGDISGINASVVNIQKEIDRLNEVAKNLNESLIDLQELGKYEQYIKGGGSGGGQIYEGKLTAEGLRFGIVASRFNHALVDRLVEGAIDAIVRHGGREEDITLVRVPGSWEIPVAAGELARKEDIDAVIAIGVLIRGATPHFDYIASEVSKGLADLSLELRKPITFGVITADTLEQAIERAGTKHGNKGWEAALSAIEMANLFKSLR

SEQ ID NO: 4430 - protein, 1371 aa, Artificial Sequence
  SARS-CoV-2/Wuhan/HBCDC-HB-01/2019__EPI_ISL_402132 spike protein (1-1211)(A972C_R995C) LumSynth construct
MFVFLVLLPLVSSQCVNLTTRTQLPPAYTNSITRGVYYPDKVFRSSVLHSTQDLFLPFFSNVTWFHAIHVSGTNGTKRFDNPVLPFNDGVYFASTEKSNIIRGWIFGTTLDSKTQSLLIVNNATNVVIKVCEFQFCNDPFLGVYYHKNNKSWMESEFRVYSSANNCTFEYVSQPFLMDLEGKQGNFKNLREFVFKNIDGYFKIYSKHTPINLVRDLPQGFSALEPLVDLPIGINITRFQTLLALHRSYLTPGDSSSGWTAGAAAYYVGYLQPRTFLLKYNENGTITDAVDCALDPLSETKCTLKSFTVEKGIYQTSNFRVQPTESIVRFPNITNLCPFGEVFNATRFASVYAWNRKRISNCVADYSVLYNSASFSTFKCYGVSPTKLNDLCFTNVYADSFVIRGDEVRQIAPGQTGKIADYNYKLPDDFTGCVIAWNSNNLDSKVGGNYNYLYRLFRKSNLKPFERDISTEIYQAGSTPCNGVEGFNCYFPLQSYGFQPTNGVGYQPYRVVVLSFELLHAPATVCGPKKSTNLVKNKCVNFNFNGLTGTGVLTESNKKFLPFQQFGRDIADTTDAVRDPQTLEILDITPCSFGGVSVITPGTNTSNQVAVLYQDVNCTEVPVAIHADQLTPTWRVYSTGSNVFQTRAGCLIGAEHVNNSYECDIPIGAGICASYQTQTNSPRRARSVASQSIIAYTMSLGAENSVAYSNNSIAIPTNFTISVTTEILPVSMTKTSVDCTMYICGDSTECSNLLLQYGSFCTQLNRALTGIAVEQDKNTQEVFAQVKQIYKTPPIKDFGGFNFSQILPDPSKPSKRSFIEDLLFNKVTLADAGFIKQYGDCLGDIAARDLICAQKFNGLTVLPPLLTDEMIAQYTSALLAGTITSGWTFGAGAALQIPFAMQMAYRFNGIGVTQNVLYENQKLIANQFNSAIGKIQDSLSSTASALGKLQDVVNQNAQALNTLVKQLSSNFGCISSVLNDILSRLDKVEAEVQIDCLITGRLQSLQTYVTQQLIRAAEIRASANLAATKMSECVLGQSKRVDFCGKGYHLMSFPQSAPHGVVFLHVTYVPAQEKNFTTAPAICHDGKAHFPREGVFVSNGTHWFVTQRNFYEPQIITTDNTFVSGNCDVVIGIVNNTVYDPLQPELDSFKEELDKYFKNHTSPDVDLGDISGINASVVNIQKEIDRLNEVAKNLNESLIDLQELGKYEQYIKGGGSGGGQIYEGKLTAEGLRFGIVASRFNHALVDRLVEGAIDAIVRHGGREEDITLVRVPGSWEIPVAAGELARKEDIDAVIAIGVLIRGATPHFDYIASEVSKGLADLSLELRKPITFGVITADTLEQAIERAGTKHGNKGWEAALSAIEMANLFKSLR

SEQ ID NO: 4431 - protein, 1371 aa, Artificial Sequence
  SARS-CoV-2/Guangdong/20SF028/2020__EPI_ISL_403936 spike protein (1-1211)(A972C_R995C) LumSynth construct
MFVFLVLLPLVSSQCVNLTTRTQLPPAYTNSFTRGVYYPDKVFRSSVLYSTQDLFLPFFSNVTWFHAIHVSGTNGTKRFDNPVLPFNDGVYFASTEKSNIIRGWIFGTTLDSKTQSLLIVNNATNVVIKVCEFQFCNDPFLGVYYHKNNKSWMESEFRVYSSANNCTFEYVSQPFLMDLEGKQGNFKNLREFVFKNIDGYFKIYSKHTPINLVRDLPQGFSALEPLVDLPIGINITRFQTLLALHRSYLTPGDSSSGWTAGAAAYYVGYLQPRTFLLKYNENGTITDAVDCALDPLSETKCTLKSFTVEKGIYQTSNFRVQPTESIVRFPNITNLCPFGEVFNATRFASVYAWNRKRISNCVADYSVLYNSASFSTFKCYGVSPTKLNDLCFTNVYADSFVIRGDEVRQIAPGQTGKIADYNYKLPDDFTGCVIAWNSNNLDSKVGGNYNYLYRLFRKSNLKPFERDISTEIYQAGSTPCNGVEGFNCYFPLQSYGFQPTNGVGYQPYRVVVLSFELLHAPATVCGPKKSTNLVKNKCVNFNFNGLTGTGVLTESNKKFLPFQQFGRDIADTTDAVRDPQTLEILDITPCSFGGVSVITPGTNTSNQVAVLYQDVNCTEVPVAIHADQLTPTWRVYSTGSNVFQTRAGCLIGAEHVNNSYECDIPIGAGICASYQTQTNSPRRARSVASQSIIAYTMSLGAENSVAYSNNSIAIPTNFTISVTTEILPVSMTKTSVDCTMYICGDSTECSNLLLQYGSFCTQLNRALTGIAVEQDKNTQEVFAQVKQIYKTPPIKDFGGFNFSQILPDPSKPSKRSFIEDLLFNKVTLADAGFIKQYGDCLGDIAARDLICAQKFNGLTVLPPLLTDEMIAQYTSALLAGTITSGWTFGAGAALQIPFAMQMAYRFNGIGVTQNVLYENQKLIANQFNSAIGKIQDSLSSTASALGKLQDVVNQNAQALNTLVKQLSSNFGCISSVLNDILSRLDKVEAEVQIDCLITGRLQSLQTYVTQQLIRAAEIRASANLAATKMSECVLGQSKRVDFCGKGYHLMSFPQSAPHGVVFLHVTYVPAQEKNFTTAPAICHDGKAHFPREGVFVSNGTHWFVTQRNFYEPQIITTDNTFVSGNCDVVIGIVNNTVYDPLQPELDSFKEELDKYFKNHTSPDVDLGDISGINASVVNIQKEIDRLNEVAKNLNESLIDLQELGKYEQYIKGGGSGGGQIYEGKLTAEGLRFGIVASRFNHALVDRLVEGAIDAIVRHGGREEDITLVRVPGSWEIPVAAGELARKEDIDAVIAIGVLIRGATPHFDYIASEVSKGLADLSLELRKPITFGVITADTLEQAIERAGTKHGNKGWEAALSAIEMANLFKSLR

SEQ ID NO: 4432 - protein, 1371 aa, Artificial Sequence
  SARS-CoV-2/Shenzhen/SZTH-001/2020__EPI_ISL_406592 spike protein (1-1211)(A972C_R995C) LumSynth construct
MFVFLVLLPLVSSQCVNLTTRTQLPPAYTNSFTRGVYYPDKVFRSSVLHSTQDLFLPFFSNVTWFHAIHVSGTNGTKRFDNPVLPFNDGVYFASTEKSNIIRGWIFGTTLDSKTQSLLIVNNATNVVIKVCEFQFCNDPFLGVYYHKNNKSWMESEFRVYSSANNCTFEYVSQPFLMDLEGKQGNFKNLREFVFKNIDGYFKIYSKHTPINLVRDLPQGFSALEPLVDLPIGINITRFQTLLALHRSYLTPGDSSSGWTAGAAAYYVGYLQPRTFLLKYNENGTITDAVDCALDPLSETKCTLKSFTVEKGIYQTSNFRVQPTESIVRFPNITNLCPFGEVFNATRFASVYAWNRKRISNCVADYSVLYNSASFSTFKCYGVSPTKLNDLCFTNVYADSFVIRGDEVRQIAPGQTGKIADYNYKLPDDFTGCVIAWNSNNLDSKVGGNYNYLYRLFRKSNLKPFERDISTEIYQAGSTPCNGVEGFNCYFPLQSYGFQPTNGVGYQPYRVVVLSFELLHAPATVCGPKKSTNLVKNKCVNFNFNGLTGTGVLTESNKKFLPFQQFGRDIADTTDAVRDPQTLEILDITPCSFGGVSVITPGTNTSNQVAVLYQDVNCTEVPVAIHADQLTPTWRVYSTGSNVFQTRAGCLIGAEHVNNSYECDIPIGAGICASYQTQTNSPRRARSVASQSIIAYTMSLGAENSVAYSNNSIAIPTNFTISVTTEILPVSMTKTSVDCTMYICGDSTECSNLLLQYGSFCTQLNRALTGIAVEQDKNTQEVFAQVKQIYKTPPIKDFGGFNFSQILPDPSKPSKRSFIEDLLFNKVTLADAGFIKQYGDCLGDIAARDLICAQKFNGLTVLPPLLTDEMIAQYTSALLAGTITSGWTFGAGAALQIPFAMQMAYRFNGIGVTQNVLYENQKLIANQFNSAIGKIQDSLSSTASALGKLQDVVNQNAQALNTLVKQLSSNFGCISSVLNDILSRLDKVEAEVQIDCLITGRLQSLQTYVTQQLIRAAEIRASANLAATKMSECVLGQSKRVDFCGKGYHLMSFPQSAPHGVVFLHVTYVPAQEKNFTTAPAICHDGKAHFPREGVFVSNGTHWFVTQRNFYEPQIITTDNTFVSGNCDVLIGIVNNTVYDPLQPELDSFKEELDKYFKNHTSPDVDLGDISGINASVVNIQKEIDRLNEVAKNLNESLIDLQELGKYEQYIKGGGSGGGQIYEGKLTAEGLRFGIVASRFNHALVDRLVEGAIDAIVRHGGREEDITLVRVPGSWEIPVAAGELARKEDIDAVIAIGVLIRGATPHFDYIASEVSKGLADLSLELRKPITFGVITADTLEQAIERAGTKHGNKGWEAALSAIEMANLFKSLR

SEQ ID NO: 4433 - protein, 1371 aa, Artificial Sequence
  SARS-CoV-2/Shenzhen/SZTH-004/2020__EPI_ISL_406595 spike protein (1-1211)(A972C_R995C) LumSynth construct
MFVFLVLLPLVSSQCVNLTTRTQLPPAYTNSFTRGVYYPDKVFRSSVLHSTQDLFLPFFSNVTWFHAIHVSGTNGTKRFDNPVLPFNDGVYFASTEKSNIIRGWIFGTTLDSKTQSLLIVNNATNVVIKVCEFQFCNDPFLGVYYHKNNKSWMESEFRVYSSANNCTFEYVSQPFLMDLEGKQGNFKNLREFVFKNIDGYFKIYSKHTPINLVRDLPQGFSALEPLVDLPIGINITRFQTLLALHRSYLTPGDSSSGWTAGAAAYYVGYLQPRTFLLKYNENGTITDAVDCALDPLSETKCTLKSFTVEKGIYQTSNFRVQPTESIVRFPNITNLCPFGEVFNATRFASVYAWDRKRISNCVAYYSVLYNSASFSTFKCYGVSPTKLNDLCFTNVYADSFVIRGDEVRQIAPGQTGKIADYNYKLPDDFTGCVIAWNSNNLDSKVGGNYNYLYRLFRKSNLKPFERDISTEIYQAGSTPCNGVEGFNCYFPLQSYGFQPTNGVGYQPYRVVVLSFELLHAPATVCGPKKSTNLVKNKCVNFNFNGLTGTGVLTESNKKFLPFQQFGRDIADTTDAVRDPQTLEILDITPCSFGGVSVITPGTNTSNQVAVLYQDVNCTEVPVAIHADQLTPTWRVYSTGSNVFQTRAGCLIGAEHVNNSYECDIPIGAGICASYQTQTNSPRRARSVASQSIIAYTMSLGAENSVAYSNNSIAIPTNFTISVTTEILPVSMTKTSVDCTMYICGDSTECSNLLLQYGSFCTQLNRALTGIAVEQDKNTQEVFAQVKQIYKTPPIKDFGGFNFSQILPDPSKPSKRSFIEDLLFNKVTLADAGFIKQYGDCLGDIAARDLICAQKFNGLTVLPPLLTDEMIAQYTSALLAGTITSGWTFGAGAALQIPFAMQMAYRFNGIGVTQNVLYENQKLIANQFNSAIGKIQDSLSSTASALGKLQDVVNQNAQALNTLVKQLSSNFGCISSVLNDILSRLDKVEAEVQIDCLITGRLQSLQTYVTQQLIRAAEIRASANLAATKMSECVLGQSKRVDFCGKGYHLMSFPQSAPHGVVFLHVTYVPAQEKNFTTAPAICHDGKAHFPREGVFVSNGTHWFVTQRNFYEPQIITTDNTFVSGNCDVVIGIVNNTVYDPLQPELDSFKEELDKYFKNHTSPDVDLGDISGINASVVNIQKEIDRLNEVAKNLNESLIDLQELGKYEQYIKGGGSGGGQIYEGKLTAEGLRFGIVASRFNHALVDRLVEGAIDAIVRHGGREEDITLVRVPGSWEIPVAAGELARKEDIDAVIAIGVLIRGATPHFDYIASEVSKGLADLSLELRKPITFGVITADTLEQAIERAGTKHGNKGWEAALSAIEMANLFKSLR

SEQ ID NO: 4434 - protein, 1371 aa, Artificial Sequence
  SARS-CoV-2/France/IDF0372/2020__EPI_ISL_406596 spike protein (1-1211)(A972C_R995C) LumSynth construct
MFVFLVLLPLVSSQCVNLTTRTQLPPAYTNSFTRGVYYPDKVFRSSVLHSTQDLFLPFFSNVTWFHAIHVSGTNGTKRFDNPVLPFNDGVYFASTEKSNIIRGWIFGTTLDSKTQSLLIVNNATNVVIKVCEFQFCNDPFLGVYYHKNNKSWMESEFRVYSSANNCTFEYVSQPFLMDLEGKQGNFKNLREFVFKNIDGYFKIYSKHTPINLVRDLPQGFSALEPLVDLPIGINITRFQTLLALHRSYLTPGDSSSGWTAGAAAYYVGYLQPRTFLLKYNENGTITDAVDCALDPLSETKCTLKSFTVEKGIYQTSNFRVQPTESIVRFPNITNLCPFGEVFNATRFASVYAWNRKRISNCVADYSFLYNSASFSTFKCYGVSPTKLNDLCFTNVYADSFVIRGDEVRQIAPGQTGKIADYNYKLPDDFTGCVIAWNSNNLDSKVGGNYNYLYRLFRKSNLKPFERDISTEIYQAGSTPCNGVEGFNCYFPLQSYGFQPTNGVGYQPYRVVVLSFELLHAPATVCGPKKSTNLVKNKCVNFNFNGLTGTGVLTESNKKFLPFQQFGRDIADTTDAVRDPQTLEILDITPCSFGGVSVITPGTNTSNQVAVLYQDVNCTEVPVAIHADQLTPTWRVYSTGSNVFQTRAGCLIGAEHVNNSYECDIPIGAGICASYQTQTNSPRRARSVASQSIIAYTMSLGAENSVAYSNNSIAIPTNFTISVTTEILPVSMTKTSVDCTMYICGDSTECSNLLLQYGSFCTQLNRALTGIAVEQDKNTQEVFAQVKQIYKTPPIKDFGGFNFSQILPDPSKPSKRSFIEDLLFNKVTLADAGFIKQYGDCLGDIAARDLICAQKFNGLTVLPPLLTDEMIAQYTSALLAGTITSGWTFGAGAALQIPFAMQMAYRFNGIGVTQNVLYENQKLIANQFNSAIGKIQDSLSSTASALGKLQDVVNQNAQALNTLVKQLSSNFGCISSVLNDILSRLDKVEAEVQIDCLITGRLQSLQTYVTQQLIRAAEIRASANLAATKMSECVLGQSKRVDFCGKGYHLMSFPQSAPHGVVFLHVTYVPAQEKNFTTAPAICHDGKAHFPREGVFVSNGTHWFVTQRNFYEPQIITTDNTFVSGNCDVVIGIVNNTVYDPLQPELDSFKEELDKYFKNHTSPDVDLGDISGINASVVNIQKEIDRLNEVAKNLNESLIDLQELGKYEQYIKGGGSGGGQIYEGKLTAEGLRFGIVASRFNHALVDRLVEGAIDAIVRHGGREEDITLVRVPGSWEIPVAAGELARKEDIDAVIAIGVLIRGATPHFDYIASEVSKGLADLSLELRKPITFGVITADTLEQAIERAGTKHGNKGWEAALSAIEMANLFKSLR

SEQ ID NO: 4435 - protein, 1371 aa, Artificial Sequence
  SARS-CoV-2/Australia/VIC01/2020__EPI_ISL_406844 spike protein (1-1211)(A972C_R995C) LumSynth construct
MFVFLVLLPLVSSQCVNLTTRTQLPPAYTNSFTRGVYYPDKVFRSSVLHSTQDLFLPFFSNVTWFHAIHVSGTNGTKRFDNPVLPFNDGVYFASTEKSNIIRGWIFGTTLDSKTQSLLIVNNATNVVIKVCEFQFCNDPFLGVYYHKNNKSWMESEFRVYSSANNCTFEYVSQPFLMDLEGKQGNFKNLREFVFKNIDGYFKIYSKHTPINLVRDLPQGFSALEPLVDLPIGINITRFQTLLALHRRYLTPGDSSSGWTAGAAAYYVGYLQPRTFLLKYNENGTITDAVDCALDPLSETKCTLKSFTVEKGIYQTSNFRVQPTESIVRFPNITNLCPFGEVFNATRFASVYAWNRKRISNCVADYSVLYNSASFSTFKCYGVSPTKLNDLCFTNVYADSFVIRGDEVRQIAPGQTGKIADYNYKLPDDFTGCVIAWNSNNLDSKVGGNYNYLYRLFRKSNLKPFERDISTEIYQAGSTPCNGVEGFNCYFPLQSYGFQPTNGVGYQPYRVVVLSFELLHAPATVCGPKKSTNLVKNKCVNFNFNGLTGTGVLTESNKKFLPFQQFGRDIADTTDAVRDPQTLEILDITPCSFGGVSVITPGTNTSNQVAVLYQDVNCTEVPVAIHADQLTPTWRVYSTGSNVFQTRAGCLIGAEHVNNSYECDIPIGAGICASYQTQTNSPRRARSVASQSIIAYTMSLGAENSVAYSNNSIAIPTNFTISVTTEILPVSMTKTSVDCTMYICGDSTECSNLLLQYGSFCTQLNRALTGIAVEQDKNTQEVFAQVKQIYKTPPIKDFGGFNFSQILPDPSKPSKRSFIEDLLFNKVTLADAGFIKQYGDCLGDIAARDLICAQKFNGLTVLPPLLTDEMIAQYTSALLAGTITSGWTFGAGAALQIPFAMQMAYRFNGIGVTQNVLYENQKLIANQFNSAIGKIQDSLSSTASALGKLQDVVNQNAQALNTLVKQLSSNFGCISSVLNDILSRLDKVEAEVQIDCLITGRLQSLQTYVTQQLIRAAEIRASANLAATKMSECVLGQSKRVDFCGKGYHLMSFPQSAPHGVVFLHVTYVPAQEKNFTTAPAICHDGKAHFPREGVFVSNGTHWFVTQRNFYEPQIITTDNTFVSGNCDVVIGIVNNTVYDPLQPELDSFKEELDKYFKNHTSPDVDLGDISGINASVVNIQKEIDRLNEVAKNLNESLIDLQELGKYEQYIKGGGSGGGQIYEGKLTAEGLRFGIVASRFNHALVDRLVEGAIDAIVRHGGREEDITLVRVPGSWEIPVAAGELARKEDIDAVIAIGVLIRGATPHFDYIASEVSKGLADLSLELRKPITFGVITADTLEQAIERAGTKHGNKGWEAALSAIEMANLFKSLR

SEQ ID NO: 4436 - protein, 1371 aa, Artificial Sequence
  SARS-CoV-2/Germany/BavPat1/2020__EPI_ISL_406862 spike protein (1-1211)(A972C_R995C) LumSynth construct
MFVFLVLLPLVSSQCVNLTTRTQLPPAYTNSFTRGVYYPDKVFRSSVLHSTQDLFLPFFSNVTWFHAIHVSGTNGTKRFDNPVLPFNDGVYFASTEKSNIIRGWIFGTTLDSKTQSLLIVNNATNVVIKVCEFQFCNDPFLGVYYHKNNKSWMESEFRVYSSANNCTFEYVSQPFLMDLEGKQGNFKNLREFVFKNIDGYFKIYSKHTPINLVRDLPQGFSALEPLVDLPIGINITRFQTLLALHRSYLTPGDSSSGWTAGAAAYYVGYLQPRTFLLKYNENGTITDAVDCALDPLSETKCTLKSFTVEKGIYQTSNFRVQPTESIVRFPNITNLCPFGEVFNATRFASVYAWNRKRISNCVADYSVLYNSASFSTFKCYGVSPTKLNDLCFTNVYADSFVIRGDEVRQIAPGQTGKIADYNYKLPDDFTGCVIAWNSNNLDSKVGGNYNYLYRLFRKSNLKPFERDISTEIYQAGSTPCNGVEGFNCYFPLQSYGFQPTNGVGYQPYRVVVLSFELLHAPATVCGPKKSTNLVKNKCVNFNFNGLTGTGVLTESNKKFLPFQQFGRDIADTTDAVRDPQTLEILDITPCSFGGVSVITPGTNTSNQVAVLYQGVNCTEVPVAIHADQLTPTWRVYSTGSNVFQTRAGCLIGAEHVNNSYECDIPIGAGICASYQTQTNSPRRARSVASQSIIAYTMSLGAENSVAYSNNSIAIPTNFTISVTTEILPVSMTKTSVDCTMYICGDSTECSNLLLQYGSFCTQLNRALTGIAVEQDKNTQEVFAQVKQIYKTPPIKDFGGFNFSQILPDPSKPSKRSFIEDLLFNKVTLADAGFIKQYGDCLGDIAARDLICAQKFNGLTVLPPLLTDEMIAQYTSALLAGTITSGWTFGAGAALQIPFAMQMAYRFNGIGVTQNVLYENQKLIANQFNSAIGKIQDSLSSTASALGKLQDVVNQNAQALNTLVKQLSSNFGCISSVLNDILSRLDKVEAEVQIDCLITGRLQSLQTYVTQQLIRAAEIRASANLAATKMSECVLGQSKRVDFCGKGYHLMSFPQSAPHGVVFLHVTYVPAQEKNFTTAPAICHDGKAHFPREGVFVSNGTHWFVTQRNFYEPQIITTDNTFVSGNCDVVIGIVNNTVYDPLQPELDSFKEELDKYFKNHTSPDVDLGDISGINASVVNIQKEIDRLNEVAKNLNESLIDLQELGKYEQYIKGGGSGGGQIYEGKLTAEGLRFGIVASRFNHALVDRLVEGAIDAIVRHGGREEDITLVRVPGSWEIPVAAGELARKEDIDAVIAIGVLIRGATPHFDYIASEVSKGLADLSLELRKPITFGVITADTLEQAIERAGTKHGNKGWEAALSAIEMANLFKSLR

SEQ ID NO: 4437 - protein, 1371 aa, Artificial Sequence
  SARS-CoV-2/Wuhan/HBCDC-HB-02/2020__EPI_ISL_412978 spike protein (1-1211)(A972C_R995C) LumSynth construct
MFVFLVLLPLVSSQCVNLTTRTQLPPAYTNSFTRGVYYPDKVFRSSVLHSTQDLFLPFFSNVTWFHAIHVSGTNGTKRFDNPVLPFNDGVYFASTEKSNIIRGWIFGTTLDSKTQSLLIVNNATNVVIKVCEFQFCNDPFLGVYYHKNNKSWMESEFRVYSSANNCTFEYVSQPFLMDLEGKQGNFKNLREFVFKNIDGYFKIYSKHTPINLVRDLPQGFSALEPLVDLPIGINITRFQTLLALHRSYLTPGDSSSGWTAGAAAYYVGYLQPRTFLLKYNENGTITDAVDCALDPLSETKCTLKSFTVEKGIYQTSNFRVQPTESIVRFPNITNLCPFGEVFNATRFASVYAWNRKRISNCVADYSVLYNSASFSTFKCYGVSPTKLNDLCFTNVYADSFVIRGDEVRQIAPGQTGKIADYNYKLPDDFTGCVIAWNSNNLDSKVGGNYNYLYRLFRKSNLKPFERDISTEIYQAGSTPCNGVEGFNCYFPLQSYGFQPTNGVGYQPYRVVVLSFELLHAPATVCGPKKSTNLVKNKCVNFNFNGLTGTGVLTESNKKFLPFQQFGRDIADTTDAVRDPQTLEILDITPCSFGGVSVITPGTNTSNQVAVLYQDVNCTEVPVAIHADQLTPTWRVYSTGSNVFQTRAGCLIGAEHVNNSYECDIPIGAGICASYQTQTNSPRRARSVASQSIIAYTMSLGAENSVAYSNNSIAIPTNFTISVTTEILPVSMTKTSVDCTMYICGDSTECSNFLLQYGSFCTQLNRALTGIAVEQDKNTQEVFAQVKQIYKTPPIKDFGGFNFSQILPDPSKPSKRSFIEDLLFNKVTLADAGFIKQYGDCLGDIAARDLICAQKFNGLTVLPPLLTDEMIAQYTSALLAGTITSGWTFGAGAALQIPFAMQMAYRFNGIGVTQNVLYENQKLIANQFNSAIGKIQDSLSSTASALGKLQDVVNQNAQALNTLVKQLSSNFGCISSVLNDILSRLDKVEAEVQIDCLITGRLQSLQTYVTQQLIRAAEIRASANLAATKMSECVLGQSKRVDFCGKGYHLMSFPQSAPHGVVFLHVTYVPAQEKNFTTAPAICHDGKAHFPREGVFVSNGTHWFVTQRNFYEPQIITTDNTFVSGNCDVVIGIVNNTVYDPLQPELDSFKEELDKYFKNHTSPDVDLGDISGINASVVNIQKEIDRLNEVAKNLNESLIDLQELGKYEQYIKGGGSGGGQIYEGKLTAEGLRFGIVASRFNHALVDRLVEGAIDAIVRHGGREEDITLVRVPGSWEIPVAAGELARKEDIDAVIAIGVLIRGATPHFDYIASEVSKGLADLSLELRKPITFGVITADTLEQAIERAGTKHGNKGWEAALSAIEMANLFKSLR

SEQ ID NO: 4438 - protein, 1371 aa, Artificial Sequence
  SARS-CoV-2/Australia/QLD02/2020__EPI_ISL_407896 spike protein (1-1211)(A972C_R995C) LumSynth construct
MFVFLVLLPLVSSQCVNLTTRTQLPPAYTNSFTRGVYYPDKVFRSSVLHSTQDLFLPFFSNVTWFHAIHVSGTNGTKRFDNPVLPFNDGVYFASTEKSNIIRGWIFGTTLDSKTQSLLIVNNATNVVIKVCEFQFCNDPFLGVYYHKNNKSWMESEFRVYSSANNCTFEYVSQPFLMDLEGKQGNFKNLREFVFKNIDGYFKIYSKHTPINLVRDLPQGFSALEPLVDLPIGINITRFQTLLALHRSYLTPGDSSSGWTAGAAAYYVGYLQPRTFLLKYNENGTITDAVDCALDPLSETKCTLKSFTVEKGIYQTSNFRVQPTESIVRFPNITNLCPFGEVFNATRFASVYAWNRKRISNCVADYSVLYNSASFSTFKCYGVSPTKLNDLCFTNVYADSFVIRGDEVRQIAPGQTGKIADYNYKLPDDFTGCVIAWNSNNLDSKVGGNYNYLYRLFRKSNLKPFERDISTEIYQAGSTPCNGVEGFNCYFPLQSYGFQPTNGVGYQPYRVVVLSFELLHAPATVCGPKKSTNLVKNKCVNFNFNGLTGTGVLTESNKKFLPFQQFGRDIADTTDAVRDPQTLEILDITPCSFGGVSVITPGTNTSNQVAVLYQDVNCTEVPVAIHADQLTPTWRVYSTGSNVFQTRAGCLIGAEHVNNSYECDIPIGAGICASYQTQTNSPRRARSVASQSIIAYTMSLGAENSVAYSNNSIAIPTNFTISVTTEILPVSMTKTSVDCTMYICGDSTECSNLLLQYGSFCTQLNRALTGIAVEQDKNTQEVFAQVKQIYKTPPIKDFGGFNFSQILPDPSKPSKRSFIEDLLFNKVTLADAGFIKQYGDCLGDIAARDLICAQKFNGLTVLPPLLTDEMIAQYTSALLAGTITSGWTFGAGAALQIPFAMQMAYRFNGIGVTQNVLYENQKLIANQFNSAIGKIQDSLSSTASALGKLQDVVNQNAQALNTLVKQLSSNFGCISSVLNDILSRLDKVEAEVQIDCLITGRLQSLQTYVTQQLIRAAEIRASANLAATKMSECVLGQSKRVDFCGKGYHLMSFPQSAPHGVVFLHVTYVPAQEKNFTTAPAICHDGKAHFPREGVFVSNGTHWFVTQRNFYEPQIITTDNTFVSGNCDVVIGIVNNTVYDPLQLELDSFKEELDKYFKNHTSPDVDLGDISGINASVVNIQKEIDRLNEVAKNLNESLIDLQELGKYEQYIKGGGSGGGQIYEGKLTAEGLRFGIVASRFNHALVDRLVEGAIDAIVRHGGREEDITLVRVPGSWEIPVAAGELARKEDIDAVIAIGVLIRGATPHFDYIASEVSKGLADLSLELRKPITFGVITADTLEQAIERAGTKHGNKGWEAALSAIEMANLFKSLR

SEQ ID NO: 4439 - protein, 1371 aa, Artificial Sequence
  SARS-CoV-2/India/1-31/2020__EPI_ISL_413523 spike protein (1-1211)(A972C_R995C) LumSynth construct
MFVFLVLLPLVSSQCVNLTTRTQLPPAYTNSFTRGVYYPDKVFRSSVLHSTQDLFLPFFSNVTWFHAIHVSGTNGTKRFDNPVLPFNDGVYFASTEKSNIIRGWIFGTTLDSKTQSLLIVNNATNVVIKVCEFQFCNDPFLGVYYHKNNKSWMESEFRVYSSANNCTFEYVSQPFLMDLEGKQGNFKNLREFVFKNIDGYFKIYSKHTPINLVRDLPQGFSALEPLVDLPIGINITRFQTLLALHRSYLTPGDSSSGWTAGAAAYYVGYLQPRTFLLKYNENGTITDAVDCALDPLSETKCTLKSFTVEKGIYQTSNFRVQPTESIVRFPNITNLCPFGEVFNATRFASVYAWNRKRISNCVADYSVLYNSASFSTFKCYGVSPTKLNDLCFTNVYADSFVIRGDEVRQIAPGQTGKIADYNYKLPDDFTGCVIAWNSNNLDSKVGGNYNYLYRLFRKSNLKPFERDISTEIYQAGSTPCNGVEGFNCYFPLQSYGFQPTNGVGYQPYRVVVLSFELLHAPATVCGPKKSTNLVKNKCVNFNFNGLTGTGVLTESNKKFLPFQQFGRDIADTTDAVRDPQTLEILDITPCSFGGVSVITPGTNTSNQVAVLYQDVNCTEVPVAIHADQLTPTWRVYSTGSNVFQTRAGCLIGAEHVNNSYECDIPIGAGICASYQTQTNSPRRARSVASQSIIAYTMSLGAENSVAYSNNSIAIPTNFTISVTTEILPVSMTKTSVDCTMYICGDSTECSNLLLQYGSFCTQLNRALTGIAVEQDKNTQEVFAQVKQIYKTPPIKDFGGFNFSQILPDPSKPSKRSFIEDLLFNKVTLADAGFIKQYGDCLGDIAARDLICAQKFNGLTVLPPLLTDEMIAQYTSALLAGTITSGWTFGAGAALQIPFAMQMAYRFNGIGVTQNVLYENQKLIANQFNSVIGKIQDSLSSTASALGKLQDVVNQNAQALNTLVKQLSSNFGCISSVLNDILSRLDKVEAEVQIDCLITGRLQSLQTYVTQQLIRAAEIRASANLAATKMSECVLGQSKRVDFCGKGYHLMSFPQSAPHGVVFLHVTYVPAQEKNFTTAPAICHDGKAHFPREGVFVSNGTHWFVTQRNFYEPQIITTDNTFVSGNCDVVIGIVNNTVYDPLQPELDSFKEELDKYFKNHTSPDVDLGDISGINASVVNIQKEIDRLNEVAKNLNESLIDLQELGKYEQYIKGGGSGGGQIYEGKLTAEGLRFGIVASRFNHALVDRLVEGAIDAIVRHGGREEDITLVRVPGSWEIPVAAGELARKEDIDAVIAIGVLIRGATPHFDYIASEVSKGLADLSLELRKPITFGVITADTLEQAIERAGTKHGNKGWEAALSAIEMANLFKSLR

SEQ ID NO: 4440 - protein, 1371 aa, Artificial Sequence
  SARS-CoV-2/Guangdong/GD2020087-P0008/2020__EPI_ISL_413863 spike protein (1-1211)(A972C_R995C) LumSynth construct
MFVFLVLLPLVSSQCVNLTTRTQLPPAYTNSFTRGVYYPDKVFRSSVLHSTQDLFLPFFSNVTWFHAIHVSGTNGTKRFDNPVLPFNDGVYFASTEKSNIIRGWIFGTTLDSKTQSLLIVNNATNVVIKVCEFQFCNDPFLGVYYHKNNKSWMESEFRVYSSANNCTFEYVSQPFLMDLEGKQGNFKNLREFVFKNIDGYFKIYSKHTPINLVRDLPQGFSALEPLVDLPIGINITRFQTLLALHRSYLTPGDSSSGWTAGAAAYYVGYLQPRTFLLKYNENGTITDAVDCALDPLSETKCTLKSFTVEKGIYQTSNFRVQPTESIVRFPNITNLCPFGEVFNATRFASVYAWNRKRISNCVADYSVLYNSASFSTFKCYGVSPTKLNDLCFTNVYADSFVIRGDEVREIAPGQTGKIADYNYKLPDDFTGCVIAWNSNNLDSKVGGNYNYLYRLFRKSNLKPFERDISTEIYQAGSTPCNGVEGFNCYFPLQSYGFQPTNGVGYQPYRVVVLSFELLHAPATVCGPKKSTNLVKNKCVNFNFNGLTGTGVLTESNKKFLPFQQFGRDIADTTDAVRDPQTLEILDITPCSFGGVSVITPGTNTSNQVAVLYQDVNCTEVPVAIHADQLTPTWRVYSTGSNVFQTRAGCLIGAEHVNNSYECDIPIGAGICASYQTQTNSPRRARSVASQSIIAYTMSLGAENSVAYSNNSIAIPTNFTISVTTEILPVSMTKTSVDCTMYICGDSTECSNLLLQYGSFCTQLNRALTGIAVEQDKNTQEVFAQVKQIYKTPPIKDFGGFNFSQILPDPSKPSKRSFIEDLLFNKVTLADAGFIKQYGDCLGDIAARDLICAQKFNGLTVLPPLLTDEMIAQYTSALLAGTITSGWTFGAGAALQIPFAMQMAYRFNGIGVTQNVLYENQKLIANQFNSAIGKIQDSLSSTASALGKLQDVVNQNAQALNTLVKQLSSNFGCISSVLNDILSRLDKVEAEVQIDCLITGRLQSLQTYVTQQLIRAAEIRASANLAATKMSECVLGQSKRVDFCGKGYHLMSFPQSAPHGVVFLHVTYVPAQEKNFTTAPAICHDGKAHFPREGVFVSNGTHWFVTQRNFYEPQIITTDNTFVSGNCDVVIGIVNNTVYDPLQPELDSFKEELDKYFKNHTSPDVDLGDISGINASVVNIQKEIDRLNEVAKNLNESLIDLQELGKYEQYIKGGGSGGGQIYEGKLTAEGLRFGIVASRFNHALVDRLVEGAIDAIVRHGGREEDITLVRVPGSWEIPVAAGELARKEDIDAVIAIGVLIRGATPHFDYIASEVSKGLADLSLELRKPITFGVITADTLEQAIERAGTKHGNKGWEAALSAIEMANLFKSLR

SEQ ID NO: 4441 - protein, 1371 aa, Artificial Sequence
  SARS-CoV-2/Sweden/01/2020__EPI_ISL_411951 spike protein (1-1211)(A972C_R995C) LumSynth construct
MFVFLVLLPLVSSQCVNLTTRTQLPPAYTNSFTRGVYYPDKVFRSSVLHSTQDLFLPFFSNVTWFHAIHVSGTNGTKRFDNPVLPFNDGVYFASTEKSNIIRGWIFGTTLDSKTQSLLIVNNATNVVIKVCEFQFCNDPFLGVYYHKNNKSWMESEFRVYSSANNCTFEYVSQPFLMDLEGKQGNFKNLREFVFKNIDGYFKIYSKHTPINLVRDLPQGFSALEPLVDLPIGINITRFQTLLALHRSYLTPGDSSSGWTAGAAAYYVGYLQPRTFLLKYNENGTITDAVDCALDPLSETKCTLKSFTVEKGIYQTSNFRVQPTESIVRFPNITNLCPFGEVFNATRFASVYAWNRKRISNCVADYSVLYNSASFSTFKCYGVSPTKLNDLCFTNVYADSFVIRGDEVRQIAPGQTGKIADYNYKLPDDFTGCVIAWNSNNLDSKVGGNYNYLYRLFRKSNLKPFERDISTEIYQAGSTPCNGVEGFNCYFPLQSYGFQPTNGVGYQPYRVVVLSFELLHAPATVCGPKKSTNLVKNKCVNFNFNGLTGTGVLTESNKKFLPFQQFGRDIADTTDAVRDPQTLEILDITPCSFGGVSVITPGTNTSNQVAVLYQDVNCTEVPVAIHADQLTPTWRVYSTGSNVFQTRAGCLIGAEHVNNSYECDIPIGAGICASYQTQTNSPRRARSVASQSIIAYTMSLGAENSVAYSNNSIAIPTNFTISVTTEILPVSMTKTSVDCTMYICGDSTECSNLLLQYGSFCTQLNRALTGIAVEQDKNTQEVFAQVKQIYKTPPIKDCGGFNFSQILPDPSKPSKRSFIEDLLFNKVTLADAGFIKQYGDCLGDIAARDLICAQKFNGLTVLPPLLTDEMIAQYTSALLAGTITSGWTFGAGAALQIPFAMQMAYRFNGIGVTQNVLYENQKLIANQFNSAIGKIQDSLSSTASALGKLQDVVNQNAQALNTLVKQLSSNFGCISSVLNDILSRLDKVEAEVQIDCLITGRLQSLQTYVTQQLIRAAEIRASANLAATKMSECVLGQSKRVDFCGKGYHLMSFPQSAPHGVVFLHVTYVPAQEKNFTTAPAICHDGKAHFPREGVFVSNGTHWFVTQRNFYEPQIITTDNTFVSGNCDVVIGIVNNTVYDPLQPELDSFKEELDKYFKNHTSPDVDLGDISGINASVVNIQKEIDRLNEVAKNLNESLIDLQELGKYEQYIKGGGSGGGQIYEGKLTAEGLRFGIVASRFNHALVDRLVEGAIDAIVRHGGREEDITLVRVPGSWEIPVAAGELARKEDIDAVIAIGVLIRGATPHFDYIASEVSKGLADLSLELRKPITFGVITADTLEQAIERAGTKHGNKGWEAALSAIEMANLFKSLR

SEQ ID NO: 4442 - protein, 1371 aa, Artificial Sequence
  SARS-CoV-2/Tianmen/HBCDC-HB-07/2020__EPI_ISL_412983 spike protein (1-1211)(A972C_R995C) LumSynth construct
MFVFLVLLPLVSSQCVNLTTRTQLPPAYTNSFTRGVYYPDKVFRSSVLHSTQDLFLPFFSNVTWFHAIHVSGTNGTKRFDNPVLPFNDGVYFASTEKSNIIRGWIFGTTLDSKTQSLLIVNNATNVVIKVCEFQFCNDPFLGVYYHKNNKSWMESEFRVYSSANNCTFEYVSQPFLMDLEGKQGNFKNLREFVFKNIDGYFKIYSKHTPINLVRDLPQGFSALEPLVDLPIGINITRFQTLLALHRSYLTPGDSSSGWTAGAAAYYVGYLQPRTFLLKYNENGTITDAVDCALDPLSETKCTLKSFTVEKGIYQTSNFRVQPTESIVRFPNITNLCPFGEVFNATRFASVYAWNRKRISNCVADYSVLYNSASFSTFKCYGVSPTKLNDLCFTNVYADSFVIRGDEVRQIAPGQTGKIADYNYKLPDDFTGCVIAWNSNNLDSKVGGNYNYLYRLFRKSNLKPFERDISTEIYQAGSTPCNGVEGFNCYFPLQSYGFQPTNGVGYQPYRVVVLSFELLHAPATVCGPKKSTNLVKNKCVNFNFNGLTGTGVLTESNKKFLPFQQFGRDIADTTDAVRDPQTLEILDITPCSFGGVSVITPGTNTSNQVAVLYQDLNCTEVPVAIHADQLTPTWRVYSTGSNVFQTRAGCLIGAEHVNNSYECDIPIGAGICASYQTQTNSPRRARSVASQSIIAYTMSLGAENSVAYSNNSIAIPTNFTISVTTEILPVSMTKTSVDCTMYICGDSTECSNLLLQYGSFCTQLNRALTGIAVEQDKNTQEVFAQVKQIYKTPPIKDFGGFNFSQILPDPSKPSKRSFIEDLLFNKVTLADAGFIKQYGDCLGDIAARDLICAQKFNGLTVLPPLLTDEMIAQYTSALLAGTITSGWTFGAGAALQIPFAMQMAYRFNGIGVTQNVLYENQKLIANQFNSAIGKIQDSLSSTASALGKLQDVVNQNAQALNTLVKQLSSNFGCISSVLNDILSRLDKVEAEVQIDCLITGRLQSLQTYVTQQLIRAAEIRASANLAATKMSECVLGQSKRVDFCGKGYHLMSFPQSAPHGVVFLHVTYVPAQEKNFTTAPAICHDGKAHFPREGVFVSNGTHWFVTQRNFYEPQIITTDNTFVSGNCDVVIGIVNNTVYDPLQPELDSFKEELDKYFKNHTSPDVDLGDISGINASVVNIQKEIDRLNEVAKNLNESLIDLQELGKYEQYIKGGGSGGGQIYEGKLTAEGLRFGIVASRFNHALVDRLVEGAIDAIVRHGGREEDITLVRVPGSWEIPVAAGELARKEDIDAVIAIGVLIRGATPHFDYIASEVSKGLADLSLELRKPITFGVITADTLEQAIERAGTKHGNKGWEAALSAIEMANLFKSLR

SEQ ID NO: 4443 - protein, 1371 aa, Artificial Sequence
  SARS-CoV-2/Hong Kong/case42_VM20002493/2020__EPI_ISL_414527 spike protein (1-1211)(A972C_R995C) LumSynth construct
MFVFLVLLPLVSSQCVNLTTRTQLPPAYTNSFTRGVYYPDKVFRSSVLHSTQDLFLPFFSNVTWFHAIHVSGTNGTKRFDNPVLPFNDGVYFASTEKSNIIRGWIFGTTLDSKTQSLLIVNNATNVVIKVCEFQFCNDPFLGVYYHKNNKSWMESEFRVYSSANNCTFEYVSQPFLMDLEGKQGNFKNLREFVFKNIDGYFKIYSKHTPINLVRDLPQGFSALEPLVDLPIGINITRFQTLLALHRSYLTPGDSSSGWTAGAAAYYVGYLQPRTFLLKYNENGTITDAVDCALDPLSETKCTLKSFTVEKGIYQTSNFRVQPTESIVRFPNITNLCPFGEVFNATRFASVYAWNRKRISNCVADYSVLYNSASFSTFKCYGVSPTKLNDLCFTNVYADSFVIRGDEVRQIAPGQTGKIADYNYKLPDDFTGCVIAWNSNNLDSKVGGNYNYLYRLFRKSNLKPFERDISTEIYQAGSTPCNGVEGFNCYFPLQSYGFQPTNGVGYQPYRVVVLSFELLHAPATVCGPKKSTNLVKNKCVNFNFNGLTGTGVLTESNKKFLPFQQFGRDIADTTDAVRDPQTLEILDITPCSFGGVSVITPGTNTSNQVAVLYQDVNCTEVPVAIHADQLTPTWRVYSTGSNVFQTRAGCLIGAEHVNNSYECDIPIGAGICASYQTQTNSPRRARSVASQSIIAYTMSLGAENSVAYSNNSIAIPTNFAISVTTEILPVSMTKTSVDCTMYICGDSTECSNLLLQYGSFCTQLNRALTGIAVEQDKNTQEVFAQVKQIYKTPPIKDFGGFNFSQILPDPSKPSKRSFIEDLLFNKVTLADAGFIKQYGDCLGDIAARDLICAQKFNGLTVLPPLLTDEMIAQYTSALLAGTITSGWTFGAGAALQIPFAMQMAYRFNGIGVTQNVLYENQKLIANQFNSAIGKIQDSLSSTASALGKLQDVVNQNAQALNTLVKQLSSNFGCISSVLNDILSRLDKVEAEVQIDCLITGRLQSLQTYVTQQLIRAAEIRASANLAATKMSECVLGQSKRVDFCGKGYHLMSFPQSAPHGVVFLHVTYVPAQEKNFTTAPAICHDGKAHFPREGVFVSNGTHWFVTQRNFYEPQIITTDNTFVSGNCDVVIGIVNNTVYDPLQPELDSFKEELDKYFKNHTSPDVDLGDISGINASVVNIQKEIDRLNEVAKNLNESLIDLQELGKYEQYIKGGGSGGGQIYEGKLTAEGLRFGIVASRFNHALVDRLVEGAIDAIVRHGGREEDITLVRVPGSWEIPVAAGELARKEDIDAVIAIGVLIRGATPHFDYIASEVSKGLADLSLELRKPITFGVITADTLEQAIERAGTKHGNKGWEAALSAIEMANLFKSLR

SEQ ID NO: 4444 - protein, 1371 aa, Artificial Sequence
  SARS-CoV-2/USA/CruiseA-23/2020__EPI_ISL_414482 spike protein (1-1211)(A972C_R995C) LumSynth construct
MFVFLVLLPLVSSQCVNLTTRTQLPPAYTNSFTRGVYYPDKVFRSSVLHSTQDLFLPFFSNVTWFHAIHVSGTNGTKRFDNPVLPFNDGVYFASTEKSNIIRGWIFGTTLDSKTQSLLIVNNATNVVIKVCEFQFCNDPFLGVYYHKNNKSWMESEFRVYSSANNCTFEYVSQPFLMDLEVKQGNFKNLREFVFKNIDGYFKIYSKHTPINLVRDLPQGFSALEPLVDLPIGINITRFQTLLALHRSYLTPGDSSSGWTAGAAAYYVGYLQPRTFLLKYNENGTITDAVDCALDPLSETKCTLKSFTVEKGIYQTSNFRVQPTESIVRFPNITNLCPFGEVFNATRFASVYAWNRKRISNCVADYSVLYNSASFSTFKCYGVSPTKLNDLCFTNVYADSFVIRGDEVRQIAPGQTGKIADYNYKLPDDFTGCVIAWNSNNLDSKVGGNYNYLYRLFRKSNLKPFERDISTEIYQAGSTPCNGVEGFNCYFPLQSYGFQPTNGVGYQPYRVVVLSFELLHAPATVCGPKKSTNLVKNKCVNFNFNGLTGTGVLTESNKKFLPFQQFGRDIADTTDAVRDPQTLEILDITPCSFGGVSVITPGTNTSNQVAVLYQDVNCTEVPVAIHADQLTPTWRVYSTGSNVFQTRAGCLIGAEHVNNSYECDIPIGAGICASYQTQTNSPRRARSVASQSIIAYTMSLGAENSVAYSNNSIAIPTNFTISVTTEILPVSMTKTSVDCTMYICGDSTECSNLLLQYGSFCTQLNRALTGIAVEQDKNTQEVFAQVKQIYKTPPIKDFGGFNFSQILPDPSKPSKRSFIEDLLFNKVTLADAGFIKQYGDCLGDIAARDLICAQKFNGLTVLPPLLTDEMIAQYTSALLAGTITSGWTFGAGAALQIPFAMQMAYRFNGIGVTQNVLYENQKLIANQFNSAIGKIQDSLSSTASALGKLQDVVNQNAQALNTLVKQLSSNFGCISSVLNDILSRLDKVEAEVQIDCLITGRLQSLQTYVTQQLIRAAEIRASANLAATKMSECVLGQSKRVDFCGKGYHLMSFPQSAPHGVVFLHVTYVPAQEKNFTTAPAICHDGKAHFPREGVFVSNGTHWFVTQRNFYEPQIITTDNTFVSGNCDVVIGIVNNTVYDPLQPELDSFKEELDKYFKNHTSPDVDLGDISGINASVVNIQKEIDRLNEVAKNLNESLIDLQELGKYEQYIKGGGSGGGQIYEGKLTAEGLRFGIVASRFNHALVDRLVEGAIDAIVRHGGREEDITLVRVPGSWEIPVAAGELARKEDIDAVIAIGVLIRGATPHFDYIASEVSKGLADLSLELRKPITFGVITADTLEQAIERAGTKHGNKGWEAALSAIEMANLFKSLR

SEQ ID NO: 4445 - protein, 1371 aa, Artificial Sequence
  SARS-CoV-2/Hong Kong/case85_VM20002868/2020__EPI_ISL_414519 spike protein (1-1211)(A972C_R995C) LumSynth construct
MFVFLVLVPLVSSQCVNLTTRTQLPPAYTNSFTRGVYYPDKVFRSSVLHSTQDLFLPFFSNVTWFHAIHVSGTNGTKRFDNPVLPFNDGVYFASTEKSNIIRGWIFGTTLDSKTQSLLIVNNATNVVIKVCEFQFCNDPFLGVYYHKNNKSWMESEFRVYSSANNCTFEYVSQPFLMDLEGKQGNFKNLREFVFKNIDGYFKIYSKHTPINLVRDLPQGFSALEPLVDLPIGINITRFQTLLALHRSYLTPGDSSSGWTAGAAAYYVGYLQPRTFLLKYNENGTITDAVDCALDPLSETKCTLKSFTVEKGIYQTSNFRVQPTESIVRFPNITNLCPFGEVFNATRFASVYAWNRKRISNCVADYSVLYNSASFSTFKCYGVSPTKLNDLCFTNVYADSFVIRGDEVRQIAPGQTGKIADYNYKLPDDFTGCVIAWNSNNLDSKVGGNYNYLYRLFRKSNLKPFERDISTEIYQAGSTPCNGVEGFNCYFPLQSYGFQPTNGVGYQPYRVVVLSFELLHAPATVCGPKKSTNLVKNKCVNFNFNGLTGTGVLTESNKKFLPFQQFGRDIADTTDAVRDPQTLEILDITPCSFGGVSVITPGTNTSNQVAVLYQDVNCTEVPVAIHADQLTPTWRVYSTGSNVFQTRAGCLIGAEHVNNSYECDIPIGAGICASYQTQTNSPRRARSVASQSIIAYTMSLGAENSVAYSNNSIAIPTNFTISVTTEILPVSMTKTSVDCTMYICGDSTECSNLLLQYGSFCTQLNRALTGIAVEQDKNTQEVFAQVKQIYKTPPIKDFGGFNFSQILPDPSKPSKRSFIEDLLFNKVTLADAGFIKQYGDCLGDIAARDLICAQKFNGLTVLPPLLTDEMIAQYTSALLAGTITSGWTFGAGAALQIPFAMQMAYRFNGIGVTQNVLYENQKLIANQFNSAIGKIQDSLSSTASALGKLQDVVNQNAQALNTLVKQLSSNFGCISSVLNDILSRLDKVEAEVQIDCLITGRLQSLQTYVTQQLIRAAEIRASANLAATKMSECVLGQSKRVDFCGKGYHLMSFPQSAPHGVVFLHVTYVPAQEKNFTTAPAICHDGKAHFPREGVFVSNGTHWFVTQRNFYEPQIITTDNTFVSGNCDVVIGIVNNTVYDPLQPELDSFKEELDKYFKNHTSPDVDLGDISGINASVVNIQKEIDRLNEVAKNLNESLIDLQELGKYEQYIKGGGSGGGQIYEGKLTAEGLRFGIVASRFNHALVDRLVEGAIDAIVRHGGREEDITLVRVPGSWEIPVAAGELARKEDIDAVIAIGVLIRGATPHFDYIASEVSKGLADLSLELRKPITFGVITADTLEQAIERAGTKHGNKGWEAALSAIEMANLFKSLR

SEQ ID NO: 4446 - protein, 1371 aa, Artificial Sequence; identical to SEQ ID NO: 4436
  SARS-CoV-2/England/200990660/2020__EPI_ISL_414523 spike protein (1-1211)(A972C_R995C) LumSynth construct

SEQ ID NO: 4447 - protein, 1371 aa, Artificial Sequence
  SARS-CoV-2/Australia/NSW09/2020__EPI_ISL_413595 spike protein (1-1211)(A972C_R995C) LumSynth construct
MFVFLVLLPLVSSQCVNLTTRTQLPPAYTNSFTRGVYYPDKVFRSSVLHSTQDLFLPFFSNVTWFHAIHVSGTNGTKRFDNPVLPFNDGVYFASTEKSNIIRGWIFGTTLDSKTQSLLIVNNATNVVIKVCEFQFCNDPFLGVYYHKNNKSWMESEFRVYSSANNCTFEYVSQPFLMDLEGKQGNFKNLREFVFKNIDGYFKIYSKHTPINLVRDLPQGFSALEPLVDLPIGINITRFQTLLALHRSYLTPGDSSSGWTAGAAAYYVGYLQPRTFLLKYNENGTITDAVDCALDPLSETKCTLKSFTVEKGIYQTSNFRVQPTESIVRFPNITNLCPFGEVFNATRFASVYAWNRKRISNCVADYSVLYNSASFSTFKCYGVSPTKLNDLCFTNVYADSFVIRGDEVRQIAPGQTGKIADYNYKLPDDFTGCVIAWNSNNLDSKVGGNYNYLYRLFRKSNLKPFERDISTEIYQAGSTPCNGVEGFNCYFPLQSYGFQPTNGVGYQPYRVVVLSFELLHAPATVCGPKKSTNLVKNKCVNFNFNGLTGTGVLTESNKKFLPFQQFGRDIADTTDAVRDPQTLEILDITPCSFGGVSVITPGTNTSNQVAVLYQDVNCTEVPVAIHADQLTPTWRVYSTGSNVFQTRAGCLIGAEHVNNSYECDIPIGAGICASYQTQTNSPRRARSVASQSIIAYTMSLGAENSVAYSNNSIAIPTNFTISVTTEILPVSMTKTSVDCTMYICGDSTECSNLLLQYGSFCTQLNRALTGIAVEQDKNTQEVFAQVKQIYKTPPIKDFGGFNFSQILPDPSKPSKRSFIEDLLFNKVTLADAGFIKQYGDCLGDIAARDLICAQKFNGLTVLPPLLTDEMIAQYTSALLAGTITSGWTFGAGAALQIPFAMQMAYRFNGIGVTQNVLYENQKLIANQFNSAIGKIQDSLSFTASALGKLQDVVNQNAQALNTLVKQLSSNFGCISSVLNDILSRLDKVEAEVQIDCLITGRLQSLQTYVTQQLIRAAEIRASANLAATKMSECVLGQSKRVDFCGKGYHLMSFPQSAPHGVVFLHVTYVPAQEKNFTTAPAICHDGKAHFPREGVFVSNGTHWFVTQRNFYEPQIITTDNTFVSGNCDVVIGIVNNTVYDPLQPELDSFKEELDKYFKNHTSPDVDLGDISGINASVVNIQKEIDRLNEVAKNLNESLIDLQELGKYEQYIKGGGSGGGQIYEGKLTAEGLRFGIVASRFNHALVDRLVEGAIDAIVRHGGREEDITLVRVPGSWEIPVAAGELARKEDIDAVIAIGVLIRGATPHFDYIASEVSKGLADLSLELRKPITFGVITADTLEQAIERAGTKHGNKGWEAALSAIEMANLFKSLR

SEQ ID NO: 4448 - protein, 1371 aa, Artificial Sequence; identical to SEQ ID NO: 4428
  SARS-CoV-2/Australia/NSW10/2020__EPI_ISL_413596 spike protein (1-1211)(A972C_R995C) LumSynth construct

SEQ ID NO: 4449 - protein, 1371 aa, Artificial Sequence
  SARS-CoV-2/Switzerland/1000477797/2020__EPI_ISL_413023 spike protein (1-1211)(A972C_R995C) LumSynth construct
MFVFLVLLPLVSSQCVNLTTRTQLPPAYTNSFTRGVYYPDKVFRSSVLHSTQDLFLPFFSNVTWFHAIHVSGTNGTKRFDNPVLPFNDGVYFASTEKSNIIRGWIFGTTLDSKTQSLLIVNNATNVVIKVCEFQFCNDPFLGVYYHKNNKSWMESEFRVYSSANNCTFEYVSQPFLMDLEGKQGNFKNLREFVFKNIDGYFNIYSKHTPINLVRDLPQGFSALEPLVDLPIGINITRFQTLLALHRSYLTPGDSSSGWTAGAAAYYVGYLQPRTFLLKYNENGTITDAVDCALDPLSETKCTLKSFTVEKGIYQTSNFRVQPTESIVRFPNITNLCPFGEVFNATRFASVYAWNRKRISNCVADYSVLYNSASFSTFKCYGVSPTKLNDLCFTNVYADSFVIRGDEVRQIAPGQTGKIADYNYKLPDDFTGCVIAWNSNNLDSKVGGNYNYLYRLFRKSNLKPFERDISTEIYQAGSTPCNGVEGFNCYFPLQSYGFQPTNGVGYQPYRVVVLSFELLHAPATVCGPKKSTNLVKNKCVNFNFNGLTGTGVLTESNKKFLPFQQFGRDIADTTDAVRDPQTLEILDITPCSFGGVSVITPGTNTSNQVAVLYQGVNCTEVPVAIHADQLTPTWRVYSTGSNVFQTRAGCLIGAEHVNNSYECDIPIGAGICASYQTQTNSPRRARSVASQSIIAYTMSLGAENSVAYSNNSIAIPTNFTISVTTEILPVSMTKTSVDCTMYICGDSTECSNLLLQYGSFCTQLNRALTGIAVEQDKNTQEVFAQVKQIYKTPPIKDFGGFNFSQILPDPSKPSKRSFIEDLLFNKVTLADAGFIKQYGDCLGDIAARDLICAQKFNGLTVLPPLLTDEMIAQYTSALLAGTITSGWTFGAGAALQIPFAMQMAYRFNGIGVTQNVLYENQKLIANQFNSAIGKIQDSLSSTASALGKLQDVVNQNAQALNTLVKQLSSNFGCISSVLNDILSRLDKVEAEVQIDCLITGRLQSLQTYVTQQLIRAAEIRASANLAATKMSECVLGQSKRVDFCGKGYHLMSFPQSAPHGVVFLHVTYVPAQEKNFTTAPAICHDGKAHFPREGVFVSNGTHWFVTQRNFYEPQIITTDNTFVSGNCDVVIGIVNNTVYDPLQPELDSFKEELDKYFKNHTSPDVDLGDISGINASVVNIQKEIDRLNEVAKNLNESLIDLQELGKYEQYIKGGGSGGGQIYEGKLTAEGLRFGIVASRFNHALVDRLVEGAIDAIVRHGGREEDITLVRVPGSWEIPVAAGELARKEDIDAVIAIGVLIRGATPHFDYIASEVSKGLADLSLELRKPITFGVITADTLEQAIERAGTKHGNKGWEAALSAIEMANLFKSLR

SEQ ID NO: 4450 - protein, 1371 aa, Artificial Sequence
  SARS-CoV-2/Belgium/BA-02291/2020__EPI_ISL_415159 spike protein (1-1211)(A972C_R995C) LumSynth construct
MFVFLVLLPLVSSQCVNLTTRTQLPPAYTNSFTRGVYYPDKVFRSSVLHSTQDLFLPFFSNVTWFHAIHVSGTNGTKRFDNPVLPFNDGVYFASTEKSNIIRGWIFGTTLDSKTQSLLIVNNATNVVIKVCEFQFCNDPFLGVYYHKNNKSWMESEFRVYSSANNCTFEYVSQPFLMDLEGKQGNFKNLREFVFKNIDGYFKIYSKHTPINLVRDLPQGFSALEPLVDLPIGINITRFQTLLALHRSYLTPGDSSSGWTAGAAAYYVGYLQPRTFLLKYNENGTITDAVDCALDPLSETKCTLKSFTVEKGIYQTSNFRVQPTESIVRFPNITNLCPFGEVFNATRFASVYAWNRKRISNCVADYSVLYNSASFSTFKCYGVSPTKLNDLCFTNVYADSFVIRGDEVRQIAPGQTGKIADYNYKLPDDFTGCVIAWNSNNLDSKVGGNYNYLYRLFRRSNLKPFERDISTEIYQAGSTPCNGVEGFNCYFPLQSYGFQPTNGVGYQPYRVVVLSFELLPAPATVCGPKKSTNLVKNKCVNFNFNGLTGTGVLTESNKKFLPFQQFGRDIADTTDAVRDPQTLEILDITPCSFGGVSVITPGTNTSNQVAVLYQGVNCTEVPVAIHADQLTPTWRVYSTGSNVFQTRAGCLIGAEHVNNSYECDIPIGAGICASYQTQTNSPRRARSVASQSIIAYTMSLGAENSVAYSNNSIAIPTNFTISVTTEILPVSMTKTSVDCTMYICGDSTECSNLLLQYGSFCTQLNRALTGIAVEQDKNTQEVFAQVKQIYKTPPIKDFGGFNFSQILPDPSKPSKRSFIEDLLFNKVTLADAGFIKQYGDCLGDIAARDLICAQKFNGLTVLPPLLTDEMIAQYTSALLAGTITSGWTFGAGAALQIPFAMQMAYRFNGIGVTQNVLYENQKLIANQFNSAIGKIQDSLSSAAPALGKLQDVVNQNAQALNTLVKQLSSNFGCISSVLNDILSRLDKVEAEVQIDCLITGRLQSLQTYVTQQLIRAAEIRASANLAATKMSECVLGQSKRVDFCGKGYHLMSFPQSAPHGVVFLHVTYVPAQEKNFTTAPAICHDGKAHFPREGVFVSNGTHWFVTQRNFYEPQIITTDNTFVSGNCDVVIGIVNNTVYDPLQPELDSFKEELDKYFKNHTSPDVDLGDISGINASVVNIQKEIDRLNEVAKNLNESLIDLQELGKYEQYIKGGGSGGGQIYEGKLTAEGLRFGIVASRFNHALVDRLVEGAIDAIVRHGGREEDITLVRVPGSWEIPVAAGELARKEDIDAVIAIGVLIRGATPHFDYIASEVSKGLADLSLELRKPITFGVITADTLEQAIERAGTKHGNKGWEAALSAIEMANLFKSLR

SEQ ID NO: 4451 - protein, 1371 aa, Artificial Sequence
  SARS-CoV-2/USA/WA8-UW5/2020__EPI_ISL_413486 spike protein (1-1211)(A972C_R995C) LumSynth construct
MFVFLVLLPLVSSQCVNLTTRTQLPPAYTNSFTRGVYYPDKVFRSSVLHSTQDLFLPFFSNVTWFHAIHVSGTNGTKRFDNPVLPFNDGVYFASTEKSNIIRGWIFGTTLDSKTQSLLIVNNATNVVIKVCEFQFCNDPFLGVYYHKNNKSWMESEFRVYSSANNCTFEYVSQPFLMDLEGKQGNFKNLREFVFKNIDGYFKIYSKHTPINLVRDLPQGFSALEPLVDLPIGINITRFQTLLALHRSYLTPGDSSSGWTAGAAAYYVGYLQPRTFLLKYNENGTITDAVDCALDPLSETKCTLKSFTVEKGIYQTSNFRVQPTESIVRFPNITNLCPFGEVFNATRFASVYAWNRKRISNCVADYSVLYNSASFSTFKCYGVSPTKLNDLCFTNVYADSFVIRGDEVRQIAPGQTGKIADYNYKLPDDFTGCVIAWNSNNLDSKVGGNYNYLYRLFRKSNLKPFERDISTEIYQAGSTPCNGVEGFNCYFPLQSYGFQPTNGVGYQPYRVVVLSFELLHAPATVCGPKKSTNLVKNKCVNFNFNGLTGTGVLTESNKKFLPFQQFGRDIADTTDAVRDPQTLEILDITPCSFGGVSVITPGTNTSNQVAVLYQDVNCTEVPVAIHADQLTPTWRVYSTGSNVFQTRAGCLIGAEYVNNSYECDIPIGAGICASYQTQTNSPRRARSVASQSIIAYTMSLGAENSVAYSNNSIAIPTNFTISVTTEILPVSMTKTSVDCTMYICGDSTECSNLLLQYGSFCTQLNRALTGIAVEQDKNTQEVFAQVKQIYKTPPIKDFGGFNFSQILPDPSKPSKRSFIEDLLFNKVTLADAGFIKQYGDCLGDIAARDLICAQKFNGLTVLPPLLTDEMIAQYTSALLAGTITSGWTFGAGAALQIPFAMQMAYRFNGIGVTQNVLYENQKLIANQFNSAIGKIQDSLSSTASALGKLQDVVNQNAQALNTLVKQLSSNFGCISSVLNDILSRLDKVEAEVQIDCLITGRLQSLQTYVTQQLIRAAEIRASANLAATKMSECVLGQSKRVDFCGKGYHLMSFPQSAPHGVVFLHVTYVPAQEKNFTTAPAICHDGKAHFPREGVFVSNGTHWFVTQRNFYEPQIITTDNTFVSGNCDVVIGIVNNTVYDPLQPELDSFKEELDKYFKNHTSPDVDLGDISGINASVVNIQKEIDRLNEVAKNLNESLIDLQELGKYEQYIKGGGSGGGQIYEGKLTAEGLRFGIVASRFNHALVDRLVEGAIDAIVRHGGREEDITLVRVPGSWEIPVAAGELARKEDIDAVIAIGVLIRGATPHFDYIASEVSKGLADLSLELRKPITFGVITADTLEQAIERAGTKHGNKGWEAALSAIEMANLFKSLR

SEQ ID NO: 4452 - protein, 1371 aa, Artificial Sequence
  SARS-CoV-2/England/20102000506/2020__EPI_ISL_415147 spike protein (1-1211)(A972C_R995C) LumSynth construct
MFVFLVLLPLVSSQCVNLTTRTQLPPAYTNSFTRGVYYPDKVFRSSVLHSTQDLFLPFFSNVTWFHAIHVSGTNGTKRFDNPVLPFNDGVYFASTEKSNIIRGWIFGTTLDSKTQSLLIVNNATNVVIKVCEFQFCNDPFLGVYYHKNNKSWMESEFRVYSSANNCTFEYVSQPFLMDLEGKQGNFKNLREFVFKNIDGYFKIYSKHTPINLVRDLPQGFSALEPLVDLPIGINITRFQTLLALHRSYLTPGDSSSGWTAGAAAYYVGYLQPRTFLLKYNENGTITDAVDCALDPLSETKCTLKSFTVEKGIYQTSNFRVQPTESIVRFPNITNLCPFGEVFNATRFASVYAWNRKRISNCVADYSVLYNSASFSTFKCYGVSPTKLNDLCFTNVYADSFVIRGDEVRQIAPGQTGKIADYNYKLPDDFTGCVIAWNSNNLDSKVGGNYNYLYRLFRKSNLKPFERDISTEIYQAGSTPCNGVEGFNCYFPLQSYGFQPTNGVGYQPYRVVVLSFELLHAPATVCGPKKSTNLVKNKCVNFNFNGLTGTGVLTESNKKFLPFQQFGRDIADTTDAVRDPQTLEILDITPCSFGGVSVITPGTNTSNQVAVLYQGVNCTEVPVAIHADQLTPTWRVYSTGSNVFQTRAGCLIGAEHVNNSYECDIPIGAGICASYQTQTNSPRRARSVASQSIIAYTMSLGAENSVAYSNNSIAIPTNFTISVTTEILPVSMTKTSVDCTMYICGDSTECSNLLLQYGSFCTQLNRALTGIAVEQDKNTQEVFAQVKQIYKTPPIKDFGGFNFSQILPDPSKPSKRSFIEDLLFNKVTLADAGFIKQYGYCLGDIAARDLICAQKFNGLTVLPPLLTDEMIAQYTSALLAGTITSGWTFGAGAALQIPFAMQMAYRFNGIGVTQNVLYENQKLIANQFNSAIGKIQDSLSSTASALGKLQDVVNQNAQALNTLVKQLSSNFGCISSVLNDILSRLDKVEAEVQIDCLITGRLQSLQTYVTQQLIRAAEIRASANLAATKMSECVLGQSKRVDFCGKGYHLMSFPQSAPHGVVFLHVTYVPAQEKNFTTAPAICHDGKAHFPREGVFVSNGTHWFVTQRNFYEPQIITTDNTFVSGNCDVVIGIVNNTVYDPLQPELDSFKEELDKYFKNHTSPDVDLGDISGINASVVNIQKEIDRLNEVAKNLNESLIDLQELGKYEQYIKGGGSGGGQIYEGKLTAEGLRFGIVASRFNHALVDRLVEGAIDAIVRHGGREEDITLVRVPGSWEIPVAAGELARKEDIDAVIAIGVLIRGATPHFDYIASEVSKGLADLSLELRKPITFGVITADTLEQAIERAGTKHGNKGWEAALSAIEMANLFKSLR

SEQ ID NO: 4453 - protein, 1371 aa, Artificial Sequence
  SARS-CoV-2/Belgium/VAG-03013/2020__EPI_ISL_415155 spike protein (1-1211)(A972C_R995C) LumSynth construct
MFVFLVLLPLVSSQCVNLTTRTQLPPAYTNSFTRGVYYPDKVFRSSVLHSTQDLFLPFFSNVTWFHAIHVSGTNGTKRFDNPVLPFNDGVYFASTEKSNIIRGWIFGTTLDSKTQSLLIVNNATNVVIKVCEFQFCNDPFLGVYYHKNNKSWMESEFRVYSSANNCTFEYVSQPFLMDLEGKQGNFKNLREFVFKNIDGYFKIYSKHTPINLVRDLPQGFSALEPLVDLPIGINITRFQTLLALHRSYLTPGDSSSGWTAGAAAYYVGYLQPRTFLLKYNENGTITDAVDCALDPLSETKCTLKSFTVEKGIYQTSNFRVQPTESIVRFPNITNLCPFGEVFNATRFASVYAWNRKRISNCVADYSVLYNSASFSTFKCYGVSPTKLNDLCFTNVYADSFVIRGDEVRQIAPGQTGKIADYNYKLPDDFTGCVIAWNSNNLDSKVGGNYNYLYRLFRKSNLKPFERDISTEIYQAGSTPCNGVEGFNCYFPLQSYGFQPTNGVGYQPYRVVVLSFELLHAPATVCGPKKSTNLVKNKCVNFNFNGLTGTGVLTESNKKFLPFQQFGRDIADTTDAVRDPQTLEILDITPCSFGGVSVITPGTNTSNQVAVLYQGVNCTEVPVAIHADQLTPTWRVYSTGSNVFQTRAGCLIGAEHVNNSYECDIPIGAGICASYQTQTNSPRRARSVASQSIIAYTMSLGAENSVAYSNNSIAIPTNFTISVTTEILPVSMTKTSVDCTMYICGDSTECSNLLLQYGSFCTQLNRALTGIAVEQDKNTQEVFAQVKQIYKTPPIKDFGGFNFSQILPDPSKPSKRSFIEDLLFNKVTLADAGFIKQYGDCLGDIAARDLICAQKFNGLTVLPPLLTDEMIAQYTSALLAGTITSGWTFGAGAALQIPFAMQMAYRFNGIGVTQNVLYENQKLIANQFNSAIGKIQDSLSSTATALGKLQDVVNQNAQALNTLVKQLSSNFGCISSVLNDILSRLDKVEAEVQIDCLITGRLQSLQTYVTQQLIRAAEIRASANLAATKMSECVLGQSKRVDFCGKGYHLMSFPQSAPHGVVFLHVTYVPAQEKNFTTAPAICHDGKAHFPREGVFVSNGTHWFVTQRNFYEPQIITTDNTFVSGNCDVVIGIVNNTVYDPLQPELDSFKEELDKYFKNHTSPDVDLGDISGINASVVNIQKEIDRLNEVAKNLNESLIDLQELGKYEQYIKGGGSGGGQIYEGKLTAEGLRFGIVASRFNHALVDRLVEGAIDAIVRHGGREEDITLVRVPGSWEIPVAAGELARKEDIDAVIAIGVLIRGATPHFDYIASEVSKGLADLSLELRKPITFGVITADTLEQAIERAGTKHGNKGWEAALSAIEMANLFKSLR

SEQ ID NO: 4454 - protein, 1371 aa, Artificial Sequence
  SARS-CoV-2/Belgium/BC-03016/2020__EPI_ISL_415157 spike protein (1-1211)(A972C_R995C) LumSynth construct
MFVFLVLLPLVSSQCVNLTTRTQLPPAYTNSFTRGVYYPDKVFRSSVLHSTQDLFLPFFSNVTWFHAIHVSGTNGTKRFDNPVLPFNDGVYFASTEKSNIIRGWIFGTTLDSKTQSLLIVNNATNVVIKVCEFQFCNDPFLGVYYHKNNKSWMESEFRVYSSANNCTFEYVSQPFLMDLEGKQGNFKNLREFVFKNIDGYFKIYSKHTPINLVRDLPQGFSALEPLVDLPIGINITRFQTLLALHRSYLTPGDSSSGWTAGAAAYYVGYLQPRTFLLKYNENGTITDAVDCALDPLSETKCTLKSFTVEKGIYQTSNFRVQPTESIVRFPNITNLCPFGEVFNATRFASVYAWNRKRISNCVADYSVLYNSASFSTFKCYGVSPTKLNDLCFTNVYADSFVIRGDEVRQIAPGQTGKIADYNYKLPDDFTGCVIAWNSNNLDSKVGGNYNYLYRLFRKSNLKPFERDISTEIYQAGSTPCNGVEGFNCYFPLQSYGFQPTNGVGYQPYRVVVLSFELLHAPATVCGPKKSTNLVKNKCVNFNFNGLTGTGVLTESNKKFLPFQQFGRDIADTTDAVRDPQTLEILDITPCSFGGVSVITPGTNTSNQVAVLYQGVNCTEVPVAIHADQLTPTWRVYSTGSNVFQTRAGCLIGAEHVNNSYECDIPIGAGICASYQTQTNSPRRARSVASQSIIAYTMSLGAENSVAYSNNSIAIPTNFTISVTTEILPVSMTKTSVDCTMYICGDSTECSNLLLQYGSFCTQLNRALTGIAVEQDKNTQEVFAQVKQIYKTPPIKDFGGFNFSQILPDPSKPSKRSFIEDLLFNKVTLADAGFIKQYGDCLGDIAARDLICAQKFNGLTVLPPLLTDEMIAQYTSALLAGTITSGWTFGAGAALQIPFAMQMAYRFNGIGVTQNVLYENQKLIANQFNSAIGKIQDSLSSTAPALGKLQDVVNQNAQALNTLVKQLSSNFGCISSVLNDILSRLDKVEAEVQIDCLITGRLQSLQTYVTQQLIRAAEIRASANLAATKMSECVLGQSKRVDFCGKGYHLMSFPQSAPHGVVFLHVTYVPAQEKNFTTAPAICHDGKAHFPREGVFVSNGTHWFVTQRNFYEPQIITTDNTFVSGNCDVVIGIVNNTVYDPLQPELDSFKEELDKYFKNHTSPDVDLGDISGINASVVNIQKEIDRLNEVAKNLNESLIDLQELGKYEQYIKGGGSGGGQIYEGKLTAEGLRFGIVASRFNHALVDRLVEGAIDAIVRHGGREEDITLVRVPGSWEIPVAAGELARKEDIDAVIAIGVLIRGATPHFDYIASEVSKGLADLSLELRKPITFGVITADTLEQAIERAGTKHGNKGWEAALSAIEMANLFKSLR

SEQ ID NO: 4455 - protein, 1371 aa, Artificial Sequence
  SARS-CoV-2/Germany/BavPat3/2020__EPI_ISL_414521 spike protein (1-1211)(A972C_R995C) LumSynth construct
MFVFLVLLPLVSSQCVNLTTRTQLPPAYTNSFTRGVYYPDKVFRSSVLHSTQDLFLPFFSNVTWFHAIHVSGTNGTKRFDNPVLPFNDGVYFASTEKSNIIRGWIFGTTLDSKTQSLLIVNNATNVVIKVCEFQFCNDPFLGVYYHKNNKSWMESEFRVYSSANNCTFEYVSQPFLMDLEGKQGNFKNLREFVFKNIDGYFKIYSKHTPINLVRDLPQGFSALEPLVDLPIGINITRFQTLLALHRSYLTPGDSSSGWTAGAAAYYVGYLQPRTFLLKYNENGTITDAVDCALDPLSETKCTLKSFTVEKGIYQTSNFRVQPTESIVRFPNITNLCPFGEVFNATRFASVYAWNRKRISNCVADYSVLYNSASFSTFKCYGVSPTKLNDLCFTNVYADSFVIRGDEVRQIAPGQTGKIADYNYKLPDDFTGCVIAWNSNNLDSKVGGNYNYLYRLFRKSNLKPFERDISTEIYQAGSTPCNGVEGFNCYFPLQSYGFQPTNGVGYQPYRVVVLSFELLHAPATVCGPKKSTNLVKNKCVNFNFNGLTGTGVLTESNKKFLPFQQFGRDIADTTDAVRDPQTLEILDITPCSFGGVSVITPGTNTSNQVAVLYQDVNCTEVPVAIHADQLTPTWRVYSTGSNVFQTRAGCLIGAEHVNNSYECDIPIGAGICASYQTQTNSPRRARSVASQSIIAYTMSLGAENSVAYSNNSIAIPTNFTISVTTEILPVSMTKTSVDCTMYICGDSTECSNLLLQYGSFCTQLNRALTGIAVEQDKNTQQVFAQVKQIYKTPPIKDFGGFNFSQILPDPSKPSKRSFIEDLLFNKVTLADAGFIKQYGDCLGDIAARDLICAQKFNGLTVLPPLLTDEMIAQYTSALLAGTITSGWTFGAGAALQIPFAMQMAYRFNGIGVTQNVLYENQKLIANQFNSAIGKIQDSLSSTASALGKLQDVVNQNAQALNTLVKQLSSNFGCISSVLNDILSRLDKVEAEVQIDCLITGRLQSLQTYVTQQLIRAAEIRASANLAATKMSECVLGQSKRVDFCGKGYHLMSFPQSAPHGVVFLHVTYVPAQEKNFTTAPAICHDGKAHFPREGVFVSNGTHWFVTQRNFYEPQIITTDNTFVSGNCDVVIGIVNNTVYDPLQPELDSFKEELDKYFKNHTSPDVDLGDISGINASVVNIQKEIDRLNEVAKNLNESLIDLQELGKYEQYIKGGGSGGGQIYEGKLTAEGLRFGIVASRFNHALVDRLVEGAIDAIVRHGGREEDITLVRVPGSWEIPVAAGELARKEDIDAVIAIGVLIRGATPHFDYIASEVSKGLADLSLELRKPITFGVITADTLEQAIERAGTKHGNKGWEAALSAIEMANLFKSLR

SEQ ID NO: 4456 - protein, 1371 aa, Artificial Sequence
  SARS-CoV-2/France/HF1805/2020__EPI_ISL_414628 spike protein (1-1211)(A972C_R995C) LumSynth construct
MFVFLVLLPLVSSQCVNLTTRTQLPPAYTNSFTRGVYYPDKVFRSSVLHSTQDLFLPFFSNVTWFHAIHVSGTNGTKRFDNPVLPFNDGVYFASTEKSNIIRGWIFGTTLDSKTQSLLIVNNATNVVIKVCEFQFCNDPFLGVYYHKNNKSWMESEFRVYSSANNCTFEYVSQPFLMDLEGKQGNFKNLREFVFKNIDGYFKIYSKHTPINLVRDLPQGFSALEPLVDLPIGINITRFQTLLALHRSYLTPGDSSSGWTAGAAAYYVGYLQPRTFLLKYNENGTITDAVDCALDPLSETKCTLKSFTVEKGIYQTSNFRVQPTESIVRFPNITNLCPFGEVFNATRFASVYAWNRKRISNCVADYSVLYNSASFSTFKCYGVSPTKLNDLCFTNVYADSFVIRGDEVRQIAPGQTGKIADYNYKLPDDFTGCVIAWNSNNLDSKVGGNYNYLYRLFRKSNLKPFERDISTEIYQAGSTPCNGVEGFNCYFPLQSYGFQPTNGVGYQPYRVVVLSFELLHAPATVCGPKKSTNLVKNKCVNFNFNGLTGTGVLTESNKKFLPFQQFGRDIADTTDAVRDPQTLEILDITPCSFGGVSVITPGTNTSNQVAVLYQGVNCTEVPVAIHADQLTPTWRVYSTGSNVFQTRAGCLIGAEHVNNSYECDIPIGAGICASYQTQTNSPRRARSVASQSIIAYTMSLGAENSVAYSNNSIAIPTNFTISVTTEILPVSMTKTSVDCTMYICGDSTECSNLLLQYGSFCTQLNRALTGIAVEQDKNTQEVFAQVKQIYKTPPIKDFGGFNFSQILPDPSKPSKRSFIEDLLFNKVTLADAGFIKQYGDCLGDIAARDLICAQKFNGLTVLPPLLTDEMIAQYTSALLAGTITSGWTFGAGAALQIPFAMQMAYRFNGIGVTQNVLYENQKLIANQFNSAIGKIQDSLSSTASALGKLQDVVNQNAQALNTLVKQLSSNFGCISSVLNDILSRLDKVEAEVQIDCLITGRLQSLQTYVTQQLIRAAEIRASANLAATKMSECVLGQSKRVDFCGKGYHLMSFPQSAPHGVVFLHVTYVPAQEKNFTTAPAICHDGKAHFPREGVFVSNGTHWFVTQRNFYEPQIITTDNTFVSGNCDVVIGVVNNTVYDPLQPELDSFKEELDKYFKNHTSPDVDLGDISGINASVVNIQKEIDRLNEVAKNLNESLIDLQELGKYEQYIKGGGSGGGQIYEGKLTAEGLRFGIVASRFNHALVDRLVEGAIDAIVRHGGREEDITLVRVPGSWEIPVAAGELARKEDIDAVIAIGVLIRGATPHFDYIASEVSKGLADLSLELRKPITFGVITADTLEQAIERAGTKHGNKGWEAALSAIEMANLFKSLR

SEQ ID NO: 4457 - protein, 1371 aa, Artificial Sequence
  SARS-CoV-2/Netherlands/ZuidHolland_9/2020__EPI_ISL_414445 spike protein (1-1211)(A972C_R995C) LumSynth construct
MFVFLVLLPLVSSQCVNLTTRTQLPPAYTNSFTRGVYYPDKVFRSSVLHSTQDLFLPFFSNVTWFHAIHVSGTNGTKRFDNPVLPFNDGVYFASTEKSNIIRGWIFGTTLDSKTQSLLIVNNATNVVIKVCEFQFCNDPFLGVYYHKNNKSWMESEFRVYSSANNCTFEYVSQPFLMDLEGKQGNFKNLREFVFKNIDGYFKIYSKHTPINLVRDLPQGFSALEPLVDLPIGINITRFQTLLALHRSYLTPGDSSSGWTAGAAAYYVGYLQPRTFLLKYNENGTITDAVDCALDPLSETKCTLKSFTVEKGIYQTSNFRVQPTESIVRFPNITNLCPFGEVFNATRFASVYAWNRKRISNCVADYSVLYNSASFSTFKCYGVSPTKLNDLCFTNVYADSFVIRGDEVRQIAPGQTGKIADYNYKLPDDFTGCVIAWNSNNLDSKVGGNYNYLYRLFRKSNLKPFERDISTEIYQAGSTPCNGVEGFNCYFPLQSYGFQPTNGVGYQPYRVVVLSFELLHAPATVCGPKKSTNLVKNKCVNFNFNGLTGTGVLTESNKKFLPFQQFGRDIADTTDAVRDPQTLEILDITPCSFGGVSVITPGTNTSNQVAVLYQGVNCTEVPVAIHADQLTPTWRVYSTGSNVFQTRAGCLIGAEHVNNSYECDIPIGAGICASYQTQTNSPRRARSVASQSIIAYTMSLGAENSVAYSNNSIAIPTNFTISVTTEILPVSMTKTSVDCTMYICGDSTECSNLLLQYGSFCTQLNRALTGIAVEQDKNTQEVFAQVKQIYKTPPIKDFGGFNFSQILPDPSKPSKRSFIEDLLFNKVTLADAGFIKQYGDCLGDIAARDLICVQKFNGLTVLPPLLTDEMIAQYTSALLAGTITSGWTFGAGAALQIPFAMQMAYRFNGIGVTQNVLYENQKLIANQFNSAIGKIQDSLSSTASALGKLQDVVNQNAQALNTLVKQLSSNFGCISSVLNDILSRLDKVEAEVQIDCLITGRLQSLQTYVTQQLIRAAEIRASANLAATKMSECVLGQSKRVDFCGKGYHLMSFPQSAPHGVVFLHVTYVPAQEKNFTTAPAICHDGKAHFPREGVFVSNGTHWFVTQRNFYEPQIITTDNTFVSGNCDVVIGIVNNTVYDPLQPELDSFKEELDKYFKNHTSPDVDLGDISGINASVVNIQKEIDRLNEVAKNLNESLIDLQELGKYEQYIKGGGSGGGQIYEGKLTAEGLRFGIVASRFNHALVDRLVEGAIDAIVRHGGREEDITLVRVPGSWEIPVAAGELARKEDIDAVIAIGVLIRGATPHFDYIASEVSKGLADLSLELRKPITFGVITADTLEQAIERAGTKHGNKGWEAALSAIEMANLFKSLR

SEQ ID NO: 4458 - protein, 1371 aa, Artificial Sequence
  SARS-CoV-2/Finland/FIN03032020A/2020__EPI_ISL_413602 spike protein (1-1211)(A972C_R995C) LumSynth construct
MFVFLVLLPLVSSQCVNLTTRTQLPPAYTNSFTRGVYYPDKVFRSSVLHSTQDLFLPFFSNVTWFHAIHVSGTNGTKRFDNPVLPFNDGVYFASTEKSNIIRGWIFGTTLDSKTQSLLIVNNATNVVIKVCEFQFCNDPFLGVYYHKNNKSWMESEFRVYSSANNCTFEYVSQPFLMDLEGKQGNFKNLREFVFKNIDGYFKIYSKHTPINLVRDLPQGFSALEPLVDLPIGINITRFQTLLALHRSYLTPGDSSSGWTAGAAAYYVGYLQPRTFLLKYNENGTITDAVDCALDPLSETKCTLKSFTVEKGIYQTSNFRVQPTESIVRFPNITNLCPFGEVFNATRFASVYAWNRKRISNCVADYSVLYNSASFSTFKCYGVSPTKLNDLCFTNVYADSFVIRGDEVRQIAPGQTGKIADYNYKLPDDFTGCVISWNSNNLDSKVGGNYNYLYRLFRKSNLKPFERDISTEIYQAGSTPCNGVEGFNCYFPLQSYGFQPTNGVGYQPYRVVVLSFELLHAPATVCGPKKSTNLVKNKCVNFNFNGLTGTGVLTESNKKFLPFQQFGRDIADTTDAVRDPQTLEILDITPCSFGGVSVITPGTNTSNQVAVLYQGVNCTEVPVAIHADQLTPTWRVYSTGSNVFQTRAGCLIGAEHVNNSYECDIPIGAGICASYQTQTNSPRRARSVASQSIIAYTMSLGAENSVAYSNNSIAIPTNFTISVTTEILPVSMTKTSVDCTMYICGDSTECSNLLLQYGSFCTQLNRALTGIAVEQDKNTQEVFAQVKQIYKTPPIKDFGGFNFSQILPDPSKPSKRSFIEDLLFNKVTLADAGFIKQYGDCLGDIAARDLICAQKFNGLTVLPPLLTDEMIAQYTSALLAGTITSGWTFGAGAALQIPFAMQMAYRFNGIGVTQNVLYENQKLIANQFNSAIGKIQDSLSSTASALGKLQDVVNQNAQALNTLVKQLSSNFGCISSVLNDILSRLDKVEAEVQIDCLITGRLQSLQTYVTQQLIRAAEIRASANLAATKMSECVLGQSKRVDFCGKGYHLMSFPQSAPHGVVFLHVTYVPAQEKNFTTAPAICHDGKAHFPREGVFVSNGTHWFVTQRNFYEPQIITTDNTFVSGNCDVVIGIVNNTVYDPLQPELDSFKEELDKYFKNHTSPDVDLGDISGINASVVNIQKEIDRLNEVAKNLNESLIDLQELGKYEQYIKGGGSGGGQIYEGKLTAEGLRFGIVASRFNHALVDRLVEGAIDAIVRHGGREEDITLVRVPGSWEIPVAAGELARKEDIDAVIAIGVLIRGATPHFDYIASEVSKGLADLSLELRKPITFGVITADTLEQAIERAGTKHGNKGWEAALSAIEMANLFKSLR

SEQ ID NO: 4459 - protein, 1371 aa, Artificial Sequence
  SARS-CoV-2/France/GE1977/2020__EPI_ISL_414632 spike protein (1-1211)(A972C_R995C) LumSynth construct
MFVFLVLLPLVSSQCVNLTTRTQLPPAYTNSFTRGVYYPDKVFRSSVLHSTQDLFLPFFSNVTWFHAIHVSGTNGTKRFDNPVLPFNDGVYFASTEKSNIIRGWIFGTTLDSKTQSLLIVNNATNVVIKVCEFQFCNDPFLGVYYHKNNKSWMESEFRVYSSANNCTFEYVSQPFLMDLEGKQGNFKNLREFVFKNIDGYFKIYSKHTPINLVRDLPQGFSALEPLVDLPIGINITRFQTLLALHRSYLTPGDSSSGWTAGAAAYYVGYLQPRTFLLKYNENGTITDAVDCALDPLSETKCTLKSFTVEKGIYQTSNFRVQPTESIVRFPNITNLCPFGEVFNATRFASVYAWNRKRISNCVADYSVLYNSASFSTFKCYGVSPTKLNDLCFTNVYADSFVIRGDEVRQIAPGQTGKIADYNYKLPDDFTGCVIAWNSNNLDSKVGGNYNYLYRLFRKSNLKPFERDISTEIYQAGSTPCNGVEGFNCYFPLQSYGFQPTNGVGYQPYRVVVLSFELLHAPATVCGPKKSTNLVKNKCVNFNFNGLTGTGVLTESNKKFLPFQQFGRDIADTTDAVRDPQTLEILDITPCSFGGVSVITPGTNTSNQVAVLYQGVNCTEVPVAIHADQLTPTWRVYSTGSNVFQTRAGCLIGAEHVNNSYECDIPIGAGICASYQTQTNSPRRARSVASQSIIAYTMSLGAENSVAYSNNSIAIPTNFTISVTTEILPVSMTKTSVDCTMYICGDSTECSNLLLQYGSFCTQLNRALTGIAVEQDKNTQEVFAQVKQIYKTPPIKDFGGFNFSQILPDPSKPSKRSFIEDLLFNKVTLADAGFIKQYGDCLGDIAARDLICAQKFNGLTVLPPLLTDEMIAQYTSALLAGTITSGWTFGAGAALQIPFAMQMAYRFNGIGVTQNVLYENQKLIANQFNSAIGKIQDSLFSTASALGKLQDVVNQNAQALNTLVKQLSSNFGCISSVLNDILSRLDKVEAEVQIDCLITGRLQSLQTYVTQQLIRAAEIRASANLAATKMSECVLGQSKRVDFCGKGYHLMSFPQSAPHGVVFLHVTYVPAQEKNFTTAPAICHDGKAHFPREGVFVSNGTHWFVTQRNFYEPQIITTDNTFVSGNCDVVIGIVNNTVYDPLQPELDSFKEELDKYFKNHTSPDVDLGDISGINASVVNIQKEIDRLNEVAKNLNESLIDLQELGKYEQYIKGGGSGGGQIYEGKLTAEGLRFGIVASRFNHALVDRLVEGAIDAIVRHGGREEDITLVRVPGSWEIPVAAGELARKEDIDAVIAIGVLIRGATPHFDYIASEVSKGLADLSLELRKPITFGVITADTLEQAIERAGTKHGNKGWEAALSAIEMANLFKSLR

SEQ ID NO: 4460 - protein, 1371 aa, Artificial Sequence
  SARS-CoV-2/Finland/FIN-313/2020__EPI_ISL_414641 spike protein (1-1211)(A972C_R995C) LumSynth construct
MFVFLVLLPLVSSQCVNLTTRTQLPPAYTNSFTRGVYYPDKVFRSSVLHSTQDLFLPFFSNVTWFHAIHVSGTNGTKRFDNPVLPFNDGVYFASTEKSNIIRGWIFGTTLDSKTQSLLIVNNATNVVIKVCEFQFCNDPFLGVYYHKNNKSWMESEFRVYSSANNCTFEYVSQPFLMDLEGKQGNFKNLREFVFKNIDGYFKIYSKHTPINLVRDLPQGFSALEPLVDLPIGINITRFKTLLALHRSYLTPGDSSSGWTAGAAAYYVGYLQPRTFLLKYNENGTITDAVDCALDPLSETKCTLKSFTVEKGIYQTSNFRVQPTESIVRFPNITNLCPFGEVFNATRFASVYAWNRKRISNCVADYSVLYNSASFSTFKCYGVSPTKLNDLCFTNVYADSFVIRGDEVRQIAPGQTGKIADYNYKLPDDFTGCVIAWNSNNLDSKVGGNYNYLYRLFRKSNLKPFERDISTEIYQAGSTPCNGVEGFNCYFPLQSYGFQPTNGVGYQPYRVVVLSFELLHAPATVCGPKKSTNLVKNKCVNFNFNGLTGTGVLTESNKKFLPFQQFGRDIADTTDAVRDPQTLEILDITPCSFGGVSVITPGTNTSNQVAVLYQGVNCTEVPVAIHADQLTPTWRVYSTGSNVFQTRAGCLIGAEHVNNSYECDIPIGAGICASYQTQTNSPRRARSVASQSIIAYTMSLGAENSVAYSNNSIAIPTNFTISVTTEILPVSMTKTSVDCTMYICGDSTECSNLLLQYGSFCTQLNRALTGIAVEQDKNTQEVFAQVKQIYKTPPIKDFGGFNFSQILPDPSKPSKRSFIEDLLFNKVTLADAGFIKQYGDCLGDIAARDLICAQKFNGLTVLPPLLTDEMIAQYTSALLAGTITSGWTFGAGAALQIPFAMQMAYRFNGIGVTQNVLYENQKLIANQFNSAIGKIQDSLSSTASALGKLQDVVNQNAQALNTLVKQLSSNFGCISSVLNDILSRLDKVEAEVQIDCLITGRLQSLQTYVTQQLIRAAEIRASANLAATKMSECVLGQSKRVDFCGKGYHLMSFPQSAPHGVVFLHVTYVPAQEKNFTTAPAICHDGKAHFPREGVFVSNGTHWFVTQRNFYEPQIITTDNTFVSGNCDVVIGIVNNTVYDPLQPELDSFKEELDKYFKNHTSPDVDLGDISGINASVVNIQKEIDRLNEVAKNLNESLIDLQELGKYEQYIKGGGSGGGQIYEGKLTAEGLRFGIVASRFNHALVDRLVEGAIDAIVRHGGREEDITLVRVPGSWEIPVAAGELARKEDIDAVIAIGVLIRGATPHFDYIASEVSKGLADLSLELRKPITFGVITADTLEQAIERAGTKHGNKGWEAALSAIEMANLFKSLR

SEQ ID NO: 4461 - protein, 1371 aa, Artificial Sequence
  SARS-CoV-2/Netherlands/ZuidHolland_2/2020__EPI_ISL_414556 spike protein (1-1211)(A972C_R995C) LumSynth construct
MFVFLVLLPLVSSQCVNLTTRTQLPPAYTNSFTRGVYYPDKVFRSSVLHSTQDLFLPFFSNVTWFHAIHVSGTNGTKRFDNPVLPFNDGVYFASTEKSNIIRGWIFGTTLDSKTQSLLIVNNATNVVIKVCEFQFCNDPFLGVYYHKNNKSWMESEFRVYSSANNCTFEYVSQPFLMDLEGKQGNFKNLREFVFKNIDGYFKIYSKHTPINLVRDLPQGFSALEPLVDLPIGINITRFQTLLALHRSYLTPGDSSSGWTAGAAAYYVGYLQPRTFLLKYNENGTITDAVDCALDPLSETKCTLKSFTVEKGIYQTSNFRVQPTESIVRFPNITNLCPFGEVFNATRFASVYAWNRKRISNCVADYSVLYNSASFSTFKCYGVSPTKLNDLCFTNVYADSFVIRGDEVRQIAPGQTGKIADYNYKLPDDFTGCVIAWNSNNLDSKVGGNYNYLYRLFRKSNLKPFERDISTEIYQAGSTPCNGVEGFNCYFPLQSYGFQPTNGVGYQPYRVVVLSFELLHAPATVCGPKKSTNLVKNKCVNFNFNGLTGTGVLTESNKKFLPFQQFGRDIADTTDAVRDPQTLEILDITPCSFGGVSVITPGTNTSNQVAVLYQGVNCTEVPVAIHADQLTPTWRVYSTGSNVFQTRAGCLIGAEHVNNSYECDIPIGAGICASYQTQTNSPRRARSVASQSIIAYTMSLGAENSVAYSNNSIAIPTNFTISVTTEILPVSMTKTSVDCTMYICGDSTECSNLLLQYGSFCTQLNRALTGIALEQDKNTQEVFAQVKQIYKTPPIKDFGGFNFSQILPDPSKPSKRSFIEDLLFNKVTLADAGFIKQYGDCLGDIAARDLICAQKFNGLTVLPPLLTDEMIAQYTSALLAGTITSGWTFGAGAALQIPFAMQMAYRFNGIGVTQNVLYENQKLIANQFNSAIGKIQDSLSSTASALGKLQDVVNQNAQALNTLVKQLSSNFGCISSVLNDILSRLDKVEAEVQIDCLITGRLQSLQTYVTQQLIRAAEIRASANLAATKMSECVLGQSKRVDFCGKGYHLMSFPQSAPHGVVFLHVTYVPAQEKNFTTAPAICHDGKAHFPREGVFVSNGTHWFVTQRNFYEPQIITTDNTFVSGNCDVVIGIVNNTVYDPLQPELDSFKEELDKYFKNHTSPDVDLGDISGINASVVNIQKEIDRLNEVAKNLNESLIDLQELGKYEQYIKGGGSGGGQIYEGKLTAEGLRFGIVASRFNHALVDRLVEGAIDAIVRHGGREEDITLVRVPGSWEIPVAAGELARKEDIDAVIAIGVLIRGATPHFDYIASEVSKGLADLSLELRKPITFGVITADTLEQAIERAGTKHGNKGWEAALSAIEMANLFKSLR

SEQ ID NO: 4462 - protein, 1371 aa, Artificial Sequence
  SARS-CoV-2/USA/WA-UW31/2020__EPI_ISL_414618 spike protein (1-1211)(A972C_R995C) LumSynth construct
MFVFLVLLPLVSSQCVNLTTRTQLPPAYTNSFTRGVYYPDKVFRSSVLHSTQDLFLPFFSNVTWFHAIHVSGTNGTKRFDNPVLPFNDGVYFASTEKSNIIRGWIFGTTLDSKTQSLLIVNNATNVVIKVCEFQFCNDPFLGVYYHKNNKSWMESEFRVYSSANNCTFEYVSQPFLMDLEGKQGNFKNLREFVFKNIDGYFKIYSKHTPINLVRDLPQGFSALEPLVDLPIGINITRFQTLLALHRSYLTPGDSSSGWTAGAAAYYVGYLQPRTFLLKYNENGTITDAVDCALDPLSETKCTLKSFTVEKGIYQTSNFRVQPTESIVRFPNITNLCPFGEVFNATRFASVYAWNRKRISNCVADYSVLYNSASFSTFKCYGVSPTKLNDLCFTNVYADSFVIRGDEVRQIAPGQTGKIADYNYKLPDDFTGCVIAWNSNNLDSKVGGNYNYLYRLFRKSNLKPFERDISTEIYQAGSTPCNGAEGFNCYFPLQSYGFQPTNGVGYQPYRVVVLSFELLHAPATVCGPKKSTNLVKNKCVNFNFNGLTGTGVLTESNKKFLPFQQFGRDIADTTDAVRDPQTLEILDITPCSFGGVSVITPGTNTSNQVAVLYQDVNCTEVPVAIHADQLTPTWRVYSTGSNVFQTRAGCLIGAEHVNNSYECDIPIGAGICASYQTQTNSPRRARSVASQSIIAYTMSLGAENSVAYSNNSIAIPTNFTISVTTEILPVSMTKTSVDCTMYICGDSTECSNLLLQYGSFCTQLNRALTGIAVEQDKNTQEVFAQVKQIYKTPPIKDFGGFNFSQILPDPSKPSKRSFIEDLLFNKVTLADAGFIKQYGDCLGDIAARDLICAQKFNGLTVLPPLLTDEMIAQYTSALLAGTITSGWTFGAGAALQIPFAMQMAYRFNGIGVTQNVLYENQKLIANQFNSAIGKIQDSLSSTASALGKLQDVVNQNAQALNTLVKQLSSNFGCISSVLNDILSRLDKVEAEVQIDCLITGRLQSLQTYVTQQLIRAAEIRASANLAATKMSECVLGQSKRVDFCGKGYHLMSFPQSAPHGVVFLHVTYVPAQEKNFTTAPAICHDGKAHFPREGVFVSNGTHWFVTQRNFYEPQIITTDNTFVSGNCDVVIGIVNNTVYDPLQPELDSFKEELDKYFKNHTSPDVDLGDISGINASVVNIQKEIDRLNEVAKNLNESLIDLQELGKYEQYIKGGGSGGGQIYEGKLTAEGLRFGIVASRFNHALVDRLVEGAIDAIVRHGGREEDITLVRVPGSWEIPVAAGELARKEDIDAVIAIGVLIRGATPHFDYIASEVSKGLADLSLELRKPITFGVITADTLEQAIERAGTKHGNKGWEAALSAIEMANLFKSLR

SEQ ID NO: 4463 - protein, 1371 aa, Artificial Sequence
  SARS-CoV-2/South Korea/SNU01/2020__EPI_ISL_411929 spike protein (1-1211)(A972C_R995C) LumSynth construct
MFVFLVLLPLVSSQCVNLTTRTQLPPAYTNSFTRGVYYPDKVFRSSVLHSTQDLFLPFFSNVTWFHAIHVSGTNGTKRFDNPVLPFNDGVYFASTEKSNIIRGWIFGTTLDSKTQSLLIVNNATNVVIKVCEFQFCNDPFLGVYYHKNNKSWMESEFRVYSSANNCTFEYVSQPFLMDLEGKQGNFKNLREFVFKNIDGYFKIYSKHTPINLVRDLPQGFWALEPLVDLPIGINITRFQTLLALHRSYLTPGDSSSGWTAGAAAYYVGYLQPRTFLLKYNENGTITDAVDCALDPLSETKCTLKSFTVEKGIYQTSNFRVQPTESIVRFPNITNLCPFGEVFNATRFASVYAWNRKRISNCVADYSVLYNSASFSTFKCYGVSPTKLNDLCFTNVYADSFVIRGDEVRQIAPGQTGKIADYNYKLPDDFTGCVIAWNSNNLDSKVGGNYNYLYRLFRKSNLKPFERDISTEIYQAGSTPCNGVEGFNCYFPLQSYGFQPTNGVGYQPYRVVVLSFELLHAPATVCGPKKSTNLVKNKCVNFNFNGLTGTGVLTESNKKFLPFQQFGRDIADTTDAVRDPQTLEILDITPCSFGGVSVITPGTNTSNQVAVLYQDVNCTEVPVAIHADQLTPTWRVYSTGSNVFQTRAGCLIGAEHVNNSYECDIPIGAGICASYQTQTNSPRRARSVASQSIIAYTMSLGAENSVAYSNNSIAIPTNFTISVTTEILPVSMTKTSVDCTMYICGDSTECSNLLLQYGSFCTQLNRALTGIAVEQDKNTQEVFAQVKQIYKTPPIKDFGGFNFSQILPDPSKPSKRSFIEDLLFNKVTLADAGFIKQYGDCLGDIAARDLICAQKFNGLTVLPPLLTDEMIAQYTSALLAGTITSGWTFGAGAALQIPFAMQMAYRFNGIGVTQNVLYENQKLIANQFNSAIGKIQDSLSSTASALGKLQDVVNQNAQALNTLVKQLSSNFGCISSVLNDILSRLDKVEAEVQIDCLITGRLQSLQTYVTQQLIRAAEIRASANLAATKMSECVLGQSKRVDFCGKGYHLMSFPQSAPHGVVFLHVTYVPAQEKNFTTAPAICHDGKAHFPREGVFVSNGTHWFVTQRNFYEPQIITTDNTFVSGNCDVVIGIVNNTVYDPLQPELDSFKEELDKYFKNHTSPDVDLGDISGINASVVNIQKEIDRLNEVAKNLNESLIDLQELGKYEQYIKGGGSGGGQIYEGKLTAEGLRFGIVASRFNHALVDRLVEGAIDAIVRHGGREEDITLVRVPGSWEIPVAAGELARKEDIDAVIAIGVLIRGATPHFDYIASEVSKGLADLSLELRKPITFGVITADTLEQAIERAGTKHGNKGWEAALSAIEMANLFKSLR

SEQ ID NO: 4464 - protein, 1371 aa, Artificial Sequence
  SARS-CoV-2/China/WF0004/2020__EPI_ISL_413694 spike protein (1-1211)(A972C_R995C) LumSynth construct
MFVFLVLLPLVSSQCVNLTTRTQLPPAYTNSFTRGVYYPDKVFRSSVLHSTQDLFLPFFSNVTWFHAIHVSGTNGTKRFDNPVLPFNDGVYFASTEKSNIIRGWIFGTTLDSKTQSLLIVNNATNVVIKVCEFQFCNDPFLGVYYHKNNKSWTESEFRVYSSANNCTFEYVSQPFLMDLEGKQGNFKNLREFVFKNIDGYFKIYSKHTPINLVRDLPQGFSALEPLVDLPIGINITRFQTLLALHRSYLTPGDSSSGWTAGAAAYYVGYLQPRTFLLKYNENGTITDAVDCALDPLSETKCTLKSFTVEKGIYQTSNFRVQPTESIVRFPNITNLCPFGEVFNATRFASVYAWNRKRISNCVADYSVLYNSASFSTFKCYGVSPTKLNDLCFTNVYADSFVIRGDEVRQIAPGQTGKIADYNYKLPDDFTGCVIAWNSNNLDSKVGGNYNYLYRLFRKSNLKPFERDISTEIYQAGSTPCNGVEGFNCYFPLQSYGFQPTNGVGYQPYRVVVLSFELLHAPATVCGPKKSTNLVKNKCVNFNFNGLTGTGVLTESNKKFLPFQQFGRDIADTTDAVRDPQTLEILDITPCSFGGVSVITPGTNTSNQVAVLYQDVNCTEVPVAIHADQLTPTWRVYSTGSNVFQTRAGCLIGAEHVNNSYECDIPIGAGICASYQTQTNSPRRARSVASQSIIAYTMSLGAENSVAYSNNSIAIPTNFTISVTTEILPVSMTKTSVDCTMYICGDSTECSNLLLQYGSFCTQLNRALTGIAVEQDKNTQEVFAQVKQIYKTPPIKDFGGFNFSQILPDPSKPSKRSFIEDLLFNKVTLADAGFIKQYGDCLGDIAARDLICAQKFNGLTVLPPLLTDEMIAQYTSALLAGTITSGWTFGAGAALQIPFAMQMAYRFNGIGVTQNVLYENQKLIANQFNSAIGKIQDSLSSTASALGKLQDVVNQNAQALNTLVKQLSSNFGCISSVLNDILSRLDKVEAEVQIDCLITGRLQSLQTYVTQQLIRAAEIRASANLAATKMSECVLGQSKRFDFCGKGYHLMSFPQSAPHGVVFLHVTYVPAQEKNFTTAPAICHDGKAHFPREGVFVSNGTHWFVTQRNFYEPQIITTDNTFVSGNCDVVIGIVNNTVYDPLQPELDSFKEELDKYFKNHTSPDVDLGDISGINASVVNIQKEIDRLNEVAKNLNESLIDLQELGKYEQYIKGGGSGGGQIYEGKLTAEGLRFGIVASRFNHALVDRLVEGAIDAIVRHGGREEDITLVRVPGSWEIPVAAGELARKEDIDAVIAIGVLIRGATPHFDYIASEVSKGLADLSLELRKPITFGVITADTLEQAIERAGTKHGNKGWEAALSAIEMANLFKSLR

SEQ ID NO: 4465 - protein, 1371 aa, Artificial Sequence
  SARS-CoV-2/China/WF0028/2020__EPI_ISL_413791 spike protein (1-1211)(A972C_R995C) LumSynth construct
MFVFLVLLPLVSSQCVNLTTRTQLPPAYTNSFTRGVYYPDKVFRSSVLHSTQDLFLPFFSNVTWFHAIHVSGTNGTKRFDNPVLPFNDGVYFASTEKSNIIRGWIFGTTLDSKTQSLLIVNNATNVVIKVCEFQFCNDPFLGVYYHKNNKSWMESEFRVYSSANNCTFEYVSQPFLMDLEGKQGNFKNLREFVFKNIDGYFKIYSKHTPINLVRDLPQGFSALEPLVDLPIGINITRFQTLLALHRSYLTPGDSSSGWTAGAAAYYVGYLQPRTFLLKYNENGTITDAVDCALDPLSETKCTLKSFTVEKGIYQTSNFRVQPTESIVRFPNITNLCPFGEVFNATRFASVYAWNRKRISNCVADYSVLYNSASFSTFKCYGVSPTKLNDLCFTNVYADSFVIRGDEVRQIAPGQTGKIADYNYKLPDDFTGCVIAWNSNNLDSKVGGNYNYLYRLFRKSNLKPFERDISTEIYQAGSTPCNGVEGFNCYFPLQSYGFQPTNGVGYQPYRVVVLSFELLHAPATVCGPKKSTNLVKNKCVNFNFNGLTGTGVLTESNKKFLPFQQFGRDIADTTDAVRDPQTLEILDITPCSFGGVSVITPGTNTSNQVAVLYQDVNCTEVPVAIHADQLTPTWRVYSTGSNVFQTRAGCLIGAEHVNNSYECDIPIGAGICASYQTQTNSPRRARSVASQSIIAYTMSLGAENSVAYSNNSIAIPTNFTISVTTEILPVSMTKTSVDCTMYICGDSTECSNLLLQYGSFCTQLNRALTGIAVEQDKNTQEVFAQVKQIYKTPPIKDFGGFNFSQILPDPSKPSKRSFIEDLLFNKVTLADAGFIKQYGDCLGDIAARDLICAQKFNGLTVLPPLLTDEMIAQYTSALLAGTITSGWTFGAGAALQIPFAMQMAYRFNGIGVTQNVLYENQKLIANQFNSAIGKIQDSLSSTASALGKLQDVVNQNAQALNTLVKQLSSNFGCISSVLNDILSRLDKVEAEVQIDCLITGRLQSLQTYVTQQLIRAAEIRASANLAATKMSECVLGQSKRVDFCGKGYHLMSFPQSAPHGVVFLHVTYVPAQEKNFTTAPAICHDGKAHFPREGVFVSNGTHWFVTQRNFYEPQIITTDNTFVSGNCDVVIGIVNNTVYDPLQPELESFKEELDKYFKNHTSPDVDLGDISGINASVVNIQKEIDRLNEVAKNLNESLIDLQELGKYEQYIKGGGSGGGQIYEGKLTAEGLRFGIVASRFNHALVDRLVEGAIDAIVRHGGREEDITLVRVPGSWEIPVAAGELARKEDIDAVIAIGVLIRGATPHFDYIASEVSKGLADLSLELRKPITFGVITADTLEQAIERAGTKHGNKGWEAALSAIEMANLFKSLR

SEQ ID NO: 4466 - protein, 1371 aa, Artificial Sequence
  SARS-CoV-2/2019-nCoV/USA-CruiseA-18/2020__MT159716.1 spike protein (1-1211)(A972C_R995C) LumSynth construct
MFVFLVLLPLVSSQCVNLTTRTQLPPAYTNSFTRGVYYPDKVFRSSVLHSTQDLFLPFFSNVTWFHAIHVSGTNGTKRFDNPVLPFNDGVYFASTEKSNIIRGWIFGTTLDSKTQSLLIVNNATNVVIKVCEFQFCNDPFLGVYYHKNNKSWMESELRVYSSANNCTFEYVSQPFLMDLEGKQGNFKNLREFVFKNIDGYFKIYSKHTPINLVRDLPQGFSALEPLVDLPIGINITRFQTLLALHRSYLTPGDSSSGWTAGAAAYYVGYLQPRTFLLKYNENGTITDAVDCALDPLSETKCTLKSFTVEKGIYQTSNFRVQPTESIVRFPNITNLCPFGEVFNATRFASVYAWNRKRISNCVADYSVLYNSASFSTFKCYGVSPTKLNDLCFTNVYADSFVIRGDEVRQIAPGQTGKIADYNYKLPDDFTGCVIAWNSNNLDSKVGGNYNYLYRLFRKSNLKPFERDISTEIYQAGSTPCNGVEGFNCYFPLQSYGFQPTNGVGYQPYRVVVLSFELLHAPATVCGPKKSTNLVKNKCVNFNFNGLTGTGVLTESNKKFLPFQQFGRDIADTTDAVRDPQTLEILDITPCSFGGVSVITPGTNTSNQVAVLYQDVNCTEVPVAIHADQLTPTWRVYSTGSNVFQTRAGCLIGAEHVNNSYECDIPIGAGICASYQTQTNSPRRARSVASQSIIAYTMSLGAENSVAYSNNSIAIPTNFTISVTTEILPVSMTKTSVDCTMYICGDSTECSNLLLQYGSFCTQLNRALTGIAVEQDKNTQEVFAQVKQIYKTPPIKDFGGFNFSQILPDPSKPSKRSFIEDLLFNKVTLADAGFIKQYGDCLGDIAARDLICAQKFNGLTVLPPLLTDEMIAQYTSALLAGTITSGWTFGAGAALQIPFAMQMAYRFNGIGVTQNVLYENQKLIANQFNSAIGKIQDSLSSTASALGKLQDVVNQNAQALNTLVKQLSSNFGCISSVLNDILSRLDKVEAEVQIDCLITGRLQSLQTYVTQQLIRAAEIRASANLAATKMSECVLGQSKRVDFCGKGYHLMSFPQSAPHGVVFLHVTYVPAQEKNFTTAPAICHDGKAHFPREGVFVSNGTHWFVTQRNFYEPQIITTDNTFVSGNCDVVIGIVNNTVYDPLQPELDSFKEELDKYFKNHTSPDVDLGDISGINASVVNIQKEIDRLNEVAKNLNESLIDLQELGKYEQYIKGGGSGGGQIYEGKLTAEGLRFGIVASRFNHALVDRLVEGAIDAIVRHGGREEDITLVRVPGSWEIPVAAGELARKEDIDAVIAIGVLIRGATPHFDYIASEVSKGLADLSLELRKPITFGVITADTLEQAIERAGTKHGNKGWEAALSAIEMANLFKSLR

SEQ ID NO: 4467 - protein, 1371 aa, Artificial Sequence
  SARS-CoV-2/SARS-CoV-2/Yunnan-01/human/2020/CHN__MT049951.1 spike protein (1-1211)(A972C_R995C) LumSynth construct
MFVFLVLLPLVSSQCVNLTTRTQLPPANTNSFTRGVYYPDKVFRSSVLHSTQDLFLPFFSNVTWFHAIHVSGTNGTKRFDNPVLPFNDGVYFASTEKSNIIRGWIFGTTLDSKTQSLLIVNNATNVVIKVCEFQFCNDPFLGVYYHKNNKSWMESEFRVYSSANNCTFEYVSQPFLMDLEGKQGNFKNLREFVFKNIDGYFKIYSKHTPINLVRDLPQGFSALEPLVDLPIGINITRFQTLLALHRSYLTPGDSSSGWTAGAAAYYVGYLQPRTFLLKYNENGTITDAVDCALDPLSETKCTLKSFTVEKGIYQTSNFRVQPTESIVRFPNITNLCPFGEVFNATRFASVYAWNRKRISNCVADYSVLYNSASFSTFKCYGVSPTKLNDLCFTNVYADSFVIRGDEVRQIAPGQTGKIADYNYKLPDDFTGCVIAWNSNNLDSKVGGNYNYLYRLFRKSNLKPFERDISTEIYQAGSTPCNGVEGFNCYFPLQSYGFQPTNGVGYQPYRVVVLSFELLHAPATVCGPKKSTNLVKNKCVNFNFNGLTGTGVLTESNKKFLPFQQFGRDIADTTDAVRDPQTLEILDITPCSFGGVSVITPGTNTSNQVAVLYQDVNCTEVPVAIHADQLTPTWRVYSTGSNVFQTRAGCLIGAEHVNNSYECDIPIGAGICASYQTQTNSPRRARSVASQSIIAYTMSLGAENSVAYSNNSIAIPTNFTISVTTEILPVSMTKTSVDCTMYICGDSTECSNLLLQYGSFCTQLNRALTGIAVEQDKNTQEVFAQVKQIYKTPPIKDFGGFNFSQILPDPSKPSKRSFIEDLLFNKVTLADAGFIKQYGDCLGDIAARDLICAQKFNGLTVLPPLLTDEMIAQYTSALLAGTITSGWTFGAGAALQIPFAMQMAYRFNGIGVTQNVLYENQKLIANQFNSAIGKIQDSLSSTASALGKLQDVVNQNAQALNTLVKQLSSNFGCISSVLNDILSRLDKVEAEVQIDCLITGRLQSLQTYVTQQLIRAAEIRASANLAATKMSECVLGQSKRVDFCGKGYHLMSFPQSAPHGVVFLHVTYVPAQEKNFTTAPAICHDGKAHFPREGVFVSNGTHWFVTQRNFYEPQIITTDNTFVSGNCDVVIGIVNNTVYDPLQPELDSFKEELDKYFKNHTSPDVDLGDISGINASVVNIQKEIDRLNEVAKNLNESLIDLQELGKYEQYIKGGGSGGGQIYEGKLTAEGLRFGIVASRFNHALVDRLVEGAIDAIVRHGGREEDITLVRVPGSWEIPVAAGELARKEDIDAVIAIGVLIRGATPHFDYIASEVSKGLADLSLELRKPITFGVITADTLEQAIERAGTKHGNKGWEAALSAIEMANLFKSLR

SEQ ID NO: 4468 - protein, 1371 aa, Artificial Sequence
  SARS-CoV-2/USA/WA-UW292/2020__EPI_ISL_418077 spike protein (1-1211)(A972C_R995C) LumSynth construct
MFVFLVLLPLVSSQCVNLTTRTQLPPAYTNSFTRGVYYPDKVFRSSVLHSTQDLFLPFFSNVTWFHAIHVSGTNGTKRFDNPVLPFNDGVYFASTEKSNIIRGWIFGTTLDSKTQSLLIVNNATNVVIKVCEFQFCNDPFLGVYYHKNNKSWMESEFRVYSSANNCTFEYVSQPFLMDLEGKQGNFKNLREFVFKNIDGYFKIYSKHTPINLVRDLPQGFSALEPLVDLPIGINITRFQTLLALHRSYLTPGDSSSGWTAGAAAYYVGYLQPRTFLLKYNENGTITDAVDCALDPLSETKCTLKSFTVEKGIYQTSNFRVQPTESIVRFPNITNLCPFGEVFNATRFASVYAWNRKRISNCVADYSVLYNSASFSTFKCYGVSPTKLNDLCFTNVYADSFVIRGDEVRQIAPGQTGKIADYNYKLPDDFTGCVIAWNSNNLDSKVGGNYNYLYRLFRKSNLKPFERDISTEIYQASSTPCNGVEGFNCYFPLQSYGFQPTNGVGYQPYRVVVLSFELLHAPATVCGPKKSTNLVKNKCVNFNFNGLTGTGVLTESNKKFLPFQQFGRDIADTTDAVRDPQTLEILDITPCSFGGVSVITPGTNTSNQVAVLYQDVNCTEVPVAIHADQLTPTWRVYSTGSNVFQTRAGCLIGAEHVNNSYECDIPIGAGICASYQTQTNSPRRARSVASQSIIAYTMSLGAENSVAYSNNSIAIPTNFTISVTTEILPVSMTKTSVDCTMYICGDSTECSNLLLQYGSFCTQLNRALTGIAVEQDKNTQEVFAQVKQIYKTPPIKDFGGFNFSQILPDPSKPSKRSFIEDLLFNKVTLADAGFIKQYGDCLGDIAARDLICAQKFNGLTVLPPLLTDEMIAQYTSALLAGTITSGWTFGAGAALQIPFAMQMAYRFNGIGVTQNVLYENQKLIANQFNSAIGKIQDSLSSTASALGKLQDVVNQNAQALNTLVKQLSSNFGCISSVLNDILSRLDKVEAEVQIDCLITGRLQSLQTYVTQQLIRAAEIRASANLAATKMSECVLGQSKRVDFCGKGYHLMSFPQSAPHGVVFLHVTYVPAQEKNFTTAPAICHDGKAHFPREGVFVSNGTHWFVTQRNFYEPQIITTDNTFVSGNCDVVIGIVNNTVYDPLQPELDSFKEELDKYFKNHTSPDVDLGDISGINASVVNIQKEIDRLNEVAKNLNESLIDLQELGKYEQYIKGGGSGGGQIYEGKLTAEGLRFGIVASRFNHALVDRLVEGAIDAIVRHGGREEDITLVRVPGSWEIPVAAGELARKEDIDAVIAIGVLIRGATPHFDYIASEVSKGLADLSLELRKPITFGVITADTLEQAIERAGTKHGNKGWEAALSAIEMANLFKSLR

SEQ ID NO: 4469 - protein, 1371 aa, Artificial Sequence
  SARS-CoV-2/Iceland/192/2020__EPI_ISL_417819 spike protein (1-1211)(A972C_R995C) LumSynth construct
MFVFFVLLPLVSSQCVNLTTRTQLPPAYTNSFTRGVYYPDKVFRSSVLHSTQDLFLPFFSNVTWFHAIHVSGTNGTKRFDNPVLPFNDGVYFASTEKSNIIRGWIFGTTLDSKTQSLLIVNNATNVVIKVCEFQFCNDPFLGVYYHKNNKSWMESEFRVYSSANNCTFEYVSQPFLMDLEGKQGNFKNLREFVFKNIDGYFKIYSKHTPINLVRDLPQGFSALEPLVDLPIGINITRFQTLLALHRSYLTPGDSSSGWTAGAAAYYVGYLQPRTFLLKYNENGTITDAVDCALDPLSETKCTLKSFTVEKGIYQTSNFRVQPTESIVRFPNITNLCPFGEVFNATRFASVYAWNRKRISNCVADYSVLYNSASFSTFKCYGVSPTKLNDLCFTNVYADSFVIRGDEVRQIAPGQTGKIADYNYKLPDDFTGCVIAWNSNNLDSKVGGNYNYLYRLFRKSNLKPFERDISTEIYQAGSTPCNGVEGFNCYFPLQSYGFQPTNGVGYQPYRVVVLSFELLHAPATVCGPKKSTNLVKNKCVNFNFNGLTGTGVLTESNKKFLPFQQFGRDIADTTDAVRDPQTLEILDITPCSFGGVSVITPGTNTSNQVAVLYQGVNCTEVPVAIHADQLTPTWRVYSTGSNVFQTRAGCLIGAEHVNNSYECDIPIGAGICASYQTQTNSPRRARSVASQSIIAYTMSLGAENSVAYSNNSIAIPTNFTISVTTEILPVSMTKTSVDCTMYICGDSTECSNLLLQYGSFCTQLNRALTGIAVEQDKNTQEVFAQVKQIYKTPPIKDFGGFNFSQILPDPSKPSKRSFIEDLLFNKVTLADAGFIKQYGDCLGDIAARDLICAQKFNGLTVLPPLLTDEMIAQYTSALLAGTITSGWTFGAGAALQIPFAMQMAYRFNGIGVTQNVLYENQKLIANQFNSAIGKIQDSLSSTASALGKLQDVVNQNAQALNTLVKQLSSNFGCISSVLNDILSRLDKVEAEVQIDCLITGRLQSLQTYVTQQLIRAAEIRASANLAATKMSECVLGQSKRVDFCGKGYHLMSFPQSAPHGVVFLHVTYVPAQEKNFTTAPAICHDGKAHFPREGVFVSNGTHWFVTQRNFYEPQIITTDNTFVSGNCDVVIGIVNNTVYDPLQPELDSFKEELDKYFKNHTSPDVDLGDISGINASVVNIQKEIDRLNEVAKNLNESLIDLQELGKYEQYIKGGGSGGGQIYEGKLTAEGLRFGIVASRFNHALVDRLVEGAIDAIVRHGGREEDITLVRVPGSWEIPVAAGELARKEDIDAVIAIGVLIRGATPHFDYIASEVSKGLADLSLELRKPITFGVITADTLEQAIERAGTKHGNKGWEAALSAIEMANLFKSLR

SEQ ID NO: 4470 - protein, 1371 aa, Artificial Sequence
  SARS-CoV-2/Belgium/ULG-6939/2020__EPI_ISL_417020 spike protein (1-1211)(A972C_R995C) LumSynth construct
MFVFLVLLPLVSSQCVNLTTRTQLPPAYTNSFTRGVYYPDKVFRSSVLHSTQDLFLPFFSNVTWFHAIHVSGTNGTKRFDNPVLPFNDGVYFASTEKSNIIRGWIFGTTLDSKTQSLLIVNNATNVVIKVCEFQFCNDPFLGVYYHKNNKSWMESEFRVYSSANNCTFEYVSQPFLMDLEGKQGNFKNLREFVFKNIDGYFKIYSKHTPINLVRDLPQGFSALEPLVDLPIGINITRFQTLLALHRSYLTPGDSSSGWTAGAAAYYVGYLQPRTFLLKYNENGTITDAVDCALDPLSETKCTLKSFTVEKGIYQTSNFRVQPTESIVRFPNITNLCPFGEVFNATRFASVYAWNRKRISNCVADYSVLYNSASFSTFKCYGVSPTKLNDLCFTNVYADSFVIRGDEVRQIAPGQTGKIADYNYKLPDDFTGCVIAWNSNNLDSKVGGNYNYLYRLFRKSNLKPFERDISTEIYQAGSTPCNGVEGFNCYFPLQSYGFQPTNGVGYQPYRVVVLSFELLHAPATVCGPKKSTNLVKNKCVNFNFNGLTGTGVLTESNKKFLPFQQFGRDIADTTDAVRDPQTLEILDITPCSFGGVSVITPGTNTSNQVAVLYQGVNCTEVPVAIHADQLTPTWRVYSTGSNVFQTRAGCLIGAEHVNNSYECDIPIGAGICASYQTQTNSPRRARSVASQSIIAYTMSLGAENSVVYSNNSIAIPTNFTISVTTEILPVSMTKTSVDCTMYICGDSTECSNLLLQYGSFCTQLNRALTGIAVEQDKNTQEVFAQVKQIYKTPPIKDFGGFNFSQILPDPSKPSKRSFIEDLLFNKVTLADAGFIKQYGDCLGDIAARDLICAQKFNGLTVLPPLLTDEMIAQYTSALLAGTITSGWTFGAGAALQIPFAMQMAYRFNGIGVTQNVLYENQKLIANQFNSAIGKIQDSLSSTASALGKLQDVVNQNAQALNTLVKQLSSNFGCISSVLNDILSRLDKVEAEVQIDCLITGRLQSLQTYVTQQLIRAAEIRASANLAATKMSECVLGQSKRVDFCGKGYHLMSFPQSAPHGVVFLHVTYVPAQEKNFTTAPAICHDGKAHFPREGVFVSNGTHWFVTQRNFYEPQIITTDNTFVSGNCDVVIGIVNNTVYDPLQPELDSFKEELDKYFKNHTSPDVDLGDISGINASVVNIQKEIDRLNEVAKNLNESLIDLQELGKYEQYIKGGGSGGGQIYEGKLTAEGLRFGIVASRFNHALVDRLVEGAIDAIVRHGGREEDITLVRVPGSWEIPVAAGELARKEDIDAVIAIGVLIRGATPHFDYIASEVSKGLADLSLELRKPITFGVITADTLEQAIERAGTKHGNKGWEAALSAIEMANLFKSLR

SEQ ID NO: 4471 - protein, 1371 aa, Artificial Sequence
  SARS-CoV-2/France/HF2496/2020__EPI_ISL_418231 spike protein (1-1211)(A972C_R995C) LumSynth construct
MFVFLVLLPLVSSQCVNLTTRTQLPPAYTNSFTRGVYYPDKVFRSSVLHSTQDLFLPFFSNVTWFHAIHVSGTNGTKRFDNPVLPFNDGVYFASTEKSNIIRGWIFGTTLDSKTQSLLIVNNATNVVIKVCEFQFCNDPFLGVYYHKNNKSWMESEFRVYSSANNCTFEYVSQPFLMDLEGKQGNFKNLREFVFKNIDGYFKIYSKHTPINLVRDLPQGFSALEPLVDLPIGINITRFQTLLALHRSYLTPGDSSSGWTAGAAAYYVGYLQPRTFLLKYNENGTITDAVDCALDPLSETKCTLKSFTVEKGIYQTSNFRVQPTESIVRFPNITNLCPFGEVFNATRFASVYAWNRKRISNCVADYSVLYNSASFSTFKCYGVSPTKLNDLCFTNVYADSFVIRGDEVRQIAPGQTGKIADYNYKLPDDFTGCVIAWNSNNLDSKVGGNYNYLYRLFRKSNLKPFERDISTEIYQAGSTPCNGVEGFNCYFPLQSYGFQPTNGVGYQPYRVVVLSFELLHAPATVCGPKKSTNLVKNKCVNFNFNGLTGTGVLTESNKKFLPFQQFGRDIADTTDAVRDPQTLEILDITPCSFGGVSVITPGTNTSNQVAVLYQGVNCTEVPVAIHADQLTPTWRVYSTGSNVFQTRAGCLIGAEHVNNSYECDIPIGAGICASYQTQTNSPRRARSVASQSIIAYTMSLGAENSVAYSNNSIAIPTNFTISVTTEILPVSMTKTSVDCTMYICGDSTECSNLLLQYGSFCTQLNRALTGIAVEQDKNTQEVFAQVKQIYKTPPIKDFGGFNFSQILPDPSKPSKRSFIEDLLFNKVTLADAGFIKQYGDCLGDIVARDLICAQKFNGLTVLPPLLTDEMIAQYTSALLAGTITSGWTFGAGAALQIPFAMQMAYRFNGIGVTQNVLYENQKLIANQFNSAIGKIQDSLSSTASALGKLQDVVNQNAQALNTLVKQLSSNFGCISSVLNDILSRLDKVEAEVQIDCLITGRLQSLQTYVTQQLIRAAEIRASANLAATKMSECVLGQSKRVDFCGKGYHLMSFPQSAPHGVVFLHVTYVPAQEKNFTTAPAICHDGKAHFPREGVFVSNGTHWFVTQRNFYEPQIITTDNTFVSGNCDVVIGIVNNTVYDPLQPELDSFKEELDKYFKNHTSPDVDLGDISGINASVVNIQKEIDRLNEVAKNLNESLIDLQELGKYEQYIKGGGSGGGQIYEGKLTAEGLRFGIVASRFNHALVDRLVEGAIDAIVRHGGREEDITLVRVPGSWEIPVAAGELARKEDIDAVIAIGVLIRGATPHFDYIASEVSKGLADLSLELRKPITFGVITADTLEQAIERAGTKHGNKGWEAALSAIEMANLFKSLR

SEQ ID NO: 4472 - protein, 1371 aa, Artificial Sequence
  SARS-CoV-2/USA/WA-UW291/2020__EPI_ISL_418076 spike protein (1-1211)(A972C_R995C) LumSynth construct
MFVFLVLLPLVSSQCVNLTTRTQLPPAYTNSFTRGVYYPDKVFRSSVLHSTQDLFLPFFSNVTWFHAIHVSGTNGTKRFDNPVLPFNDGVYFASTEKSNIIRGWIFGTTLDSKTQSLLIVNNATNVVIKVCEFQFCNDPFLGVYYHKNNKSWMESEFRVYSSANNCTFEYVSQPFLMDLEGKQGNFKNLREFVFKNIDGYFKIYSKHTPINLVRDLPQGFSALEPLVDLPIGINITRFQTLLALHRSYLTPGDSSSGWTAGAAAYYVGYLQPRTFLLKYNENGTITDAVDCALDPLSETKCTLKSFTVEKGIYQTSNFRVQPTESIVRFPNITNLCPFGEVFNATRFASVYAWNRKRISNCVADYSVLYNSASFSTFKCYGVSPTKLNDLCFTNVYADSFVIRGDEVRQIAPGQTGKIADYNYKLPDDFTGCVIAWNSNNLDSKVGGNYNYLYRLFRKSNLKPFERDISTEIYQAGSTPCNGVEGFNCYFPLQSYGFQPTNGVGYQPYRVVVLSFELLHAPATVCGPKKSTNLVKNKCVNFNFNGLTGTGVLTESNKKFLPFQQFGRDIADTTDAVRDPQTLEILDITPCSFGGVSVITPGTNTSNQVAVLYQGVNCTEVPVAIHADQLTPTWRVYSTGSNVFQTRAGCLIGAEHVNNSYECDIPIGAGICASYQTQTNSPRRARSVASQSIIAYTMSLGAENSVAYSNNSIAIPTNFTISVTTEILPVSMTKTSVDCTMYICGDSTECSNLLLQYGSFCTQLNRALTGIAVEQDKNTQEVFAQVKQIYKTPPIKDFGGFNFSQILPDPSKPSKRSFIEDLLFNKVTLADAGFIKQYGDCLGDIAARDLICAQKFNGLTVLPPLLTDEMIAQYTSALLAGTITSGWTFGAGAALQIPFAMQMAYRFNGIGVTQNVLYENQKLIANQFNSAIGKIQYSLSSTASALGKLQDVVNQNAQALNTLVKQLSSNFGCISSVLNDILSRLDKVEAEVQIDCLITGRLQSLQTYVTQQLIRAAEIRASANLAATKMSECVLGQSKRVDFCGKGYHLMSFPQSAPHGVVFLHVTYVPAQEKNFTTAPAICHDGKAHFPREGVFVSNGTHWFVTQRNFYEPQIITTDNTFVSGNCDVVIGIVNNTVYDPLQPELDSFKEELDKYFKNHTSPDVDLGDISGINASVVNIQKEIDRLNEVAKNLNESLIDLQELGKYEQYIKGGGSGGGQIYEGKLTAEGLRFGIVASRFNHALVDRLVEGAIDAIVRHGGREEDITLVRVPGSWEIPVAAGELARKEDIDAVIAIGVLIRGATPHFDYIASEVSKGLADLSLELRKPITFGVITADTLEQAIERAGTKHGNKGWEAALSAIEMANLFKSLR

SEQ ID NO: 4473 - protein, 1371 aa, Artificial Sequence; identical to SEQ ID NO: 4436
  SARS-CoV-2/Portugal/PT0034/2020__EPI_ISL_418019 spike protein (1-1211)(A972C_R995C) LumSynth construct

SEQ ID NO: 4474 - protein, 1371 aa, Artificial Sequence
  SARS-CoV-2/Iceland/202/2020__EPI_ISL_417750 spike protein (1-1211)(A972C_R995C) LumSynth construct
MFVFLVLLPLVSSQCVNLTTRTQLPPAYTNSFTRGVYYPDKVFRSSVLHSTQDLFLPFFSNVTWFHAIHVSGTNGTKRFDNPVLPFNDGVYFASTEKSNIIRGWIFGTTLDSKTQSLLIVNNATNVVIKVCEFQFCNDPFLGVYYHKNNKSWMESEFRVYSSANNCTFEYVSQPFLMDLEGKQGNFKNLREFVFKNIDGYFKIYSKHTPINLVRDLPQGFSALEPLVDLPIGINITRFQTLLALHRSYLTPGDSSSGWTAGAAAYYVGYLQPRTFLLKYNENGTITDAVDCALDPLSETKCTLKSFTVEKGIYQTSNFRVQPTESIVRFPNITNLCPFGEVFNATRFASVYAWNRKRISNCVADYSVLYNSASFSTFKCYGVSPTKLNDLCFTNVYADSFVIRGDEVRQIAPGQTGKIADYNYKLPDDFTGCVIAWNSNNLDSKVGGNYNYLYRLFRKSNLKPFERDISTEIYQAGSTPCNGVEGFNCYFPLQSYGFQPTNGVGYQPYRVVVLSFELLHAPATVCGPKKSTNLVKNKCVNFNFNGLTGTGVLTESNKKFLPFQQFGRDIADTTDAVRDPQTLEILDITPCSFGGVSVITPGTNTSNQVAVLYQDVNCTEVPVAIHADQLTPTWRVYSTGSNVFQTRAGCLIGAEHVNNSYECDIPIGAGICASYQTQTNSPRRARSVASQSIIAYTMSLGAENSVAYSNNSIAIPTNFTISVTTEILPVSMTKTSVDCTMYICGDSTECSNLLLQYGSFCTQLNRALTGIAVEQDKNTQEVFAQVKQIYKTPPIKDFGGFNFSQILPDPSKPSKRSFIEDLLFNKVTLADAGFIKQYGDCLGDIAARDLICAQKFNGLTVLPPLLTDEMIAQYTSALLAGTITSGWTFGAGAALQIPFAMQMAYRFNGIGVTQNVLYENQKLIANQFNSAIGKIQDSLSSTASALGKLQDVVNQNAQALNTLVKQLSSNFGCISSVLNDILSRLDKVEAEVQIDCLITGRLQSLQTYVTQQLIRAAEIRASANLAATKMSECVLGQSKRVDFCGKGYHLMSFPQSAPHGVVFLHVTYVPAQEKNFTTAPAICHDGKAHFPREGVFVSNGTHWFVTQRNFYEPQIITTDNTFVSGNCDVVIGIVNNTVYDPLQPELDSFKEELDKYFKNHTSPDVDLGDIPGINASVVNIQKEIDRLNEVAKNLNESLIDLQELGKYEQYIKGGGSGGGQIYEGKLTAEGLRFGIVASRFNHALVDRLVEGAIDAIVRHGGREEDITLVRVPGSWEIPVAAGELARKEDIDAVIAIGVLIRGATPHFDYIASEVSKGLADLSLELRKPITFGVITADTLEQAIERAGTKHGNKGWEAALSAIEMANLFKSLR

SEQ ID NO: 4475 - protein, 1371 aa, Artificial Sequence
  SARS-CoV-2/USA/WA-UW261/2020__EPI_ISL_418046 spike protein (1-1211)(A972C_R995C) LumSynth construct
MFVFLVLLPLVSSQCVNLTTRTQLPPAYTNSFTRGVYYPDKVFRSSVLHSTQDLFLPFFSNVTWFHAIHVSGTNGTKRFDNPVLPFNDGVYFASTEKSNIIRGWIFGTTLDSKTQSLLIVNNATNVVIKVCEFQFCNDPFLGVYYHKNNKSWMESEFRVYSSANNCTFEYVSQPFLMDLEGKQGNFKNLREFVFKNIDGYFKIYSKHTPINLVRDLPQGFSALEPLVDLPIGINITRFQTLLALHRSYLTPGDSSSGWTAGAAAYYVGYLQPRTFLLKYNENGTITDAVDCALDPLSETKCTLKSFTVEKGIYQTSNFRVQPTESIVRFPNITNLCPFGEVFNATRFTSVYAWNRKRISNCVADYSVLYNSASFSTFKCYGVSPTKLNDLCFTNVYADSFVIRGDEVRQIAPGQTGKIADYNYKLPDDFTGCVIAWNSNNLDSKVGGNYNYLYRLFRKSNLKPFERDISTEIYQAGSTPCNGVEGFNCYFPLQSYGFQPTNGVGYQPYRVVVLSFELLHAPATVCGPKKSTNLVKNKCVNFNFNGLTGTGVLTESNKKFLPFQQFGRDIADTTDAVRDPQTLEILDITPCSFGGVSVITPGTNTSNQVAVLYQDVNCTEVPVAIHADQLTPTWRVYSTGSNVFQTRAGCLIGAEHVNNSYECDIPIGAGICASYQTQTNSPRRARSVASQSIIAYTMSLGAENSVAYSNNSIAIPTNFTISVTTEILPVSMTKTSVDCTMYICGDSTECSNLLLQYGSFCTQLNRALTGIAVEQDKNTQEVFAQVKQIYKTPPIKDFGGFNFSQILPDPSKPSKRSFIEDLLFNKVTLADAGFIKQYGDCLGDIAARDLICAQKFNGLTVLPPLLTDEMIAQYTSALLAGTITSGWTFGAGAALQIPFAMQMAYRFNGIGVTQNVLYENQKLIANQFNSAIGKIQDSLSSTASALGKLQDVVNQNAQALNTLVKQLSSNFGCISSVLNDILSRLDKVEAEVQIDCLITGRLQSLQTYVTQQLIRAAEIRASANLAATKMSECVLGQSKRVDFCGKGYHLMSFPQSAPHGVVFLHVTYVPAQEKNFTTAPAICHDGKAHFPREGVFVSNGTHWFVTQRNFYEPQIITTDNTFVSGNCDVVIGIVNNTVYDPLQPELDSFKEELDKYFKNHTSPDVDLGDISGINASVVNIQKEIDRLNEVAKNLNESLIDLQELGKYEQYIKGGGSGGGQIYEGKLTAEGLRFGIVASRFNHALVDRLVEGAIDAIVRHGGREEDITLVRVPGSWEIPVAAGELARKEDIDAVIAIGVLIRGATPHFDYIASEVSKGLADLSLELRKPITFGVITADTLEQAIERAGTKHGNKGWEAALSAIEMANLFKSLR

SEQ ID NO: 4476 - protein, 1371 aa, Artificial Sequence
  SARS-CoV-2/Portugal/PT0035/2020__EPI_ISL_418020 spike protein (1-1211)(A972C_R995C) LumSynth construct
MFVFLVLLPLVSSQCVNLTTRTQLPPAYTNSFTRGVYYPDKVFRSSVLHSTQDLFLPFFSNVTWFHAIHVSGTNGTKRFDNPVLPFNDGVYFASTEKSNIIRGWIFGTTLDSKTQSLLIVNNATNVVIKVCEFQFCNDPFLGVYYHKNNKSWMESEFRVYSSANNCTFEYVSQPFLMDLEGKQGNFKNLREFVFKNIDGYFKIYSKHTPINLVRDLPQGFSALEPLVDLPIGINITRFQTLLALHRSYLTPGDSSSGWTAGAAAYYVGYLQPRTFLLKYNENGTITDAVDCALDPLSETKCTLKSFTVEKGIYQTSNFRVQPTESIVRFPNITNLCPFGEVFNATRFASVYAWNRKRISNCVADYSVLYNSASFSTFKCYGVSPTKLNDLCFTNVYADSFVIRGDEVRQIAPGQTGKIADYNYKLPDDFTGCVIAWNSNNLDSKVGGNYNYLYRLFRKSNLKPFERDISTEIYQAGSTPCNGVEGFNCYFPLQSYGFQPTNGVGYQPYRVVVLSFELLHAPATVCGPKKSTNLVKNKCVNFNFNGLTGTGVLTESNKKFLPFQQFGRDIADTTDAVRDPQTLEILDITPCSFGGVSVITPGTNTSNQVAVLYQDVNCTEVPVAIHADQLTPTWRVYSTGSNVFQTRAGCLIGAEHVNNSYECDIPIGAGICASYQTQTNSPRRARSVASQSIIAYTMSLGAENSVAYSNNSIAIPTNFTISVTTEILPVSMTKTSVDCTMYICGDSTECSNLLLQYGSFCTQLNRALTGIAVEQDKNTQEVFAQVKQIYKTPPIKDFGGFNFSQILPDPSKPSKRSFIEDLLFNKVTLADAGFIKQYGDCLGDISARDLICAQKFNGLTVLPPLLTDEMIAQYTSALLAGTITSGWTFGAGAALQIPFAMQMAYRFNGIGVTQNVLYENQKLIANQFNSAIGKIQDSLSSTASALGKLQDVVNQNAQALNTLVKQLSSNFGCISSVLNDILSRLDKVEAEVQIDCLITGRLQSLQTYVTQQLIRAAEIRASANLAATKMSECVLGQSKRVDFCGKGYHLMSFPQSAPHGVVFLHVTYVPAQEKNFTTAPAICHDGKAHFPREGVFVSNGTHWFVTQRNFYEPQIITTDNTFVSGNCDVVIGIVNNTVYDPLQPELDSFKEELDKYFKNHTSPDVDLGDISGINASVVNIQKEIDRLNEVAKNLNESLIDLQELGKYEQYIKGGGSGGGQIYEGKLTAEGLRFGIVASRFNHALVDRLVEGAIDAIVRHGGREEDITLVRVPGSWEIPVAAGELARKEDIDAVIAIGVLIRGATPHFDYIASEVSKGLADLSLELRKPITFGVITADTLEQAIERAGTKHGNKGWEAALSAIEMANLFKSLR

SEQ ID NO: 4477 - protein, 1371 aa, Artificial Sequence
  SARS-CoV-2/USA/NY-NYUMC7/2020__EPI_ISL_418192 spike protein (1-1211)(A972C_R995C) LumSynth construct
MFVFLVLLPLVSSQCVNLTTRTQLPPAYTNSFTRGVYYPDKVFRSSVLHSTQDLFLPFFSNVTWFHAIHVSGTNGTKRFDNPVLPFNDGVYFASTEKSNIIRGWIFGTTLDSKTQSLLIVNNATNVVIKVCEFQFCNDPFLGVYHHKNNKSWMESEFRVYSSANNCTFEYVSQPFLMDLEGKQGNFKNLREFVFKNIDGYFKIYSKHTPINLVRDLPQGFSALEPLVDLPIGINITRFQTLLALHRSYLTPGDSSSGWTAGAAAYYVGYLQPRTFLLKYNENGTITDAVDCALDPLSETKCTLKSFTVEKGIYQTSNFRVQPTESIVRFPNITNLCPFGEVFNATRFASVYAWNRKRISNCVADYSVLYNSASFSTFKCYGVSPTKLNDLCFTNVYADSFVIRGDEVRQIAPGQTGKIADYNYKLPDDFTGCVIAWNSNNLDSKVGGNYNYLYRLFRKSNLKPFERDISTEIYQAGSTPCNGVEGFNCYFPLQSYGFQPTNGVGYQPYRVVVLSFELLHAPATVCGPKKSTNLVKNKCVNFNFNGLTGTGVLTESNKKFLPFQQFGRDIADTTDAVRDPQTLEILDITPCSFGGVSVITPGTNTSNQVAVLYQGVNCTEVPVAIHADQLTPTWRVYSTGSNVFQTRAGCLIGAEHVNNSYECDIPIGAGICASYQTQTNSPRRARSVASQSIIAYTMSLGAENSVAYSNNSIAIPTNFTISVTTEILPVSMTKTSVDCTMYICGDSTECSNLLLQYGSFCTQLNRALTGIAVEQDKNTQEVFAQVKQIYKTPPIKDFGGFNFSQILPDPSKPSKRSFIEDLLFNKVTLADAGFIKQYGDCLGDIAARDLICAQKFNGLTVLPPLLTDEMIAQYTSALLAGTITSGWTFGAGAALQIPFAMQMAYRFNGIGVTQNVLYENQKLIANQFNSAIGKIQDSLSSTASALGKLQDVVNQNAQALNTLVKQLSSNFGCISSVLNDILSRLDKVEAEVQIDCLITGRLQSLQTYVTQQLIRAAEIRASANLAATKMSECVLGQSKRVDFCGKGYHLMSFPQSAPHGVVFLHVTYVPAQEKNFTTAPAICHDGKAHFPREGVFVSNGTHWFVTQRNFYEPQIITTDNTFVSGNCDVVIGIVNNTVYDPLQPELDSFKEELDKYFKNHTSPDVDLGDISGINASVVNIQKEIDRLNEVAKNLNESLIDLQELGKYEQYIKGGGSGGGQIYEGKLTAEGLRFGIVASRFNHALVDRLVEGAIDAIVRHGGREEDITLVRVPGSWEIPVAAGELARKEDIDAVIAIGVLIRGATPHFDYIASEVSKGLADLSLELRKPITFGVITADTLEQAIERAGTKHGNKGWEAALSAIEMANLFKSLR

SEQ ID NO: 4478 - protein, 1371 aa, Artificial Sequence
  SARS-CoV-2/Iceland/189/2020__EPI_ISL_417709 spike protein (1-1211)(A972C_R995C) LumSynth construct
MFVFLVLLPLVSSQCVNLTTRTQLPPAYTNSFTRGVYYPDKVFRSSVLHSTQDLFLPFFSNVTWFHAIHVSGTNGTKRFDNPVLPFNDGVYFASTEKSNIIRGWIFGTTLDSKTQSLLIVNNATNVVIKVCEFQFCNDPFLGVYYHKNNKSWMESEFRVYSSANNCTFEYVSQPFLMDLEGKQGNFKNLREFVFKNIDGYFKIYSKHTPINLVRDLPQGFSALEPLVDLPIGINITRFQTLLALHRSYLTPGDSSSGWTAGAAAYYVGYLQPRTFLLKYNENGTITDAVDCALDPLSETKCTLKSFTVEKGIYQTSNFRVQPTESIVRFPNITNLCPFGEVFNATRFASVYAWNRKRISNCVADYSVLYNSASFSTFKCYGVSPTKLNDLCFTNVYADSFVIRGDEVRQIAPGQTGKIADYNYKLPDDFTGCVIAWNSNNLDSKVGGNYNYLYRLFRKSNLKPFERDISTEIYQAGSTPCNGVEGFNCYFPLQSYGFQPTNGVGYQPYRVVVLSFELLHAPATVCGPKKSTNLVKNKCVNFNFNGLTGTGVLTESNKKFLPFQQFGRDIADTTDAVRDPQTLEILDITPCSFGGVSVITPGTNTSNQVAVLYQGVNCTEVPVAIHADQLTPTWRVYSTGSNVFQTRAGCLIGAEHVNNSYECDIPIGAGICASYQTQTNSPRRARSVASQSIIAYTMSLGAENSVAYSNNSIAIPTNFTISVTTEILPVSMTKTSVDCTMYICGDSTECSNLLLQYGSFCTQLNRALTGIAVEQDKNTQEVFAQVKQIYKTPPIKDFGGFNFSQILPDPSKPSKRSFIEDLLFNKVTLADAGFTKQYGDCLGDIAARDLICAQKFNGLTVLPPLLTDEMIAQYTSALLAGTITSGWTFGAGAALQIPFAMQMAYRFNGIGVTQNVLYENQKLIANQFNSAIGKIQDSLSSTASALGKLQDVVNQNAQALNTLVKQLSSNFGCISSVLNDILSRLDKVEAEVQIDCLITGRLQSLQTYVTQQLIRAAEIRASANLAATKMSECVLGQSKRVDFCGKGYHLMSFPQSAPHGVVFLHVTYVPAQEKNFTTAPAICHDGKAHFPREGVFVSNGTHWFVTQRNFYEPQIITTDNTFVSGNCDVVIGIVNNTVYDPLQPELDSFKEELDKYFKNHTSPDVDLGDISGINASVVNIQKEIDRLNEVAKNLNESLIDLQELGKYEQYIKGGGSGGGQIYEGKLTAEGLRFGIVASRFNHALVDRLVEGAIDAIVRHGGREEDITLVRVPGSWEIPVAAGELARKEDIDAVIAIGVLIRGATPHFDYIASEVSKGLADLSLELRKPITFGVITADTLEQAIERAGTKHGNKGWEAALSAIEMANLFKSLR

SEQ ID NO: 4479 - protein, 1371 aa, Artificial Sequence
  SARS-CoV-2/Australia/NSW56/2020__EPI_ISL_417408 spike protein (1-1211)(A972C_R995C) LumSynth construct
MFVFLVLLPLVSSQCVNLTTRTQLPPAYTNSFTRGVYYPDKVFRSSVLHSTQDLFLPFFSNVTWFHAIHVSGTNGTKRFDNPVLPFNDGVYFASTEKSNIIRGWIFGTTLDSKTQSLLIVNNATNVVIKVCEFQFCNDPFLGVYYHKNNKSWMESEFRVYSSANNCTFEYVSQPFLMDLEGKQGNFKNLREFVFKNIDGYFKIYSKHTPINLVRDLPQGFSALEPLVDLPIGINITRFQTLLALHRSYLTPGDSSSGWTAGAAAYYVGYLQPRTFLLKYNENGTITDAVDCALDPLSETKCTLKSFTVEKGIYQTSNFRVQPTESIVRFPNITNLCPFGEVFNATRFASVYAWNRKRISNCVADYSVLYNSASFSTFKCYGVSPTKLNDLCFTNVYADSFVIRGDEVRQIAPGQTGKIADYNYKLPDDFTGCVIAWNSNNLDSKVGGNYNYLYRLFRKSNLKPFERDISTEIYQAGSTPCNGVEGFNCYFPLQSYGFQPTNGVGYQPYRVVVLSFELLHAPATVCGPKKSTNLVKNKCVNFNFNGLTGTGVLTESNKKFLPFQQFGRDIADTTDAVRDPQTLEILDITPCSFGGVSVITPGTNTSNQVAVLYQDVNCTEVPVAIHADQLTPTWRVYSTGSNVFQTRAGCLIGAEHVNNSYECDIPIGAGICASYQTQTNSPRRARSVASQSIIAYTMSLGAENSVAYSNNSIAIPTNFTISVTTEILPVSMTKTSVDCTMYICGDSTECSNLLLQYGSFCTQLNRALTGIAVEQDKNTQEVFAQVKQIYKTPPIKDFGGFNFSQILPDSSKPSKRSFIEDLLFNKVTLADAGFIKQYGDCLGDIAARDLICAQKFNGLTVLPPLLTDEMIAQYTSALLAGTITSGWTFGAGAALQIPFAMQMAYRFNGIGVTQNVLYENQKLIANQFNSAIGKIQDSLSSTASALGKLQDVVNQNAQALNTLVKQLSSNFGCISSVLNDILSRLDKVEAEVQIDCLITGRLQSLQTYVTQQLIRAAEIRASANLAATKMSECVLGQSKRVDFCGKGYHLMSFPQSAPHGVVFLHVTYVPAQEKNFTTAPAICHDGKAHFPREGVFVSNGTHWFVTQRNFYEPQIITTDNTFVSGNCDVVIGIVNNTVYDPLQPELDSFKEELDKYFKNHTSPDVDLGDISGINASVVNIQKEIDRLNEVAKNLNESLIDLQELGKYEQYIKGGGSGGGQIYEGKLTAEGLRFGIVASRFNHALVDRLVEGAIDAIVRHGGREEDITLVRVPGSWEIPVAAGELARKEDIDAVIAIGVLIRGATPHFDYIASEVSKGLADLSLELRKPITFGVITADTLEQAIERAGTKHGNKGWEAALSAIEMANLFKSLR

SEQ ID NO: 4480 - protein, 1371 aa, Artificial Sequence
  SARS-CoV-2/Iceland/280/2020__EPI_ISL_417608 spike protein (1-1211)(A972C_R995C) LumSynth construct
MFVFLVLLPLVSSQCVNLTTRTQLPPAYTNSFTRGVYYPDKVFRSSVLHSTQDLFLPFFSNVTWFHAIHVSGTNGTKRFDNPVLPFNDGVYFASTEKSNIIRGWIFGTTLDSKTQSLLIVNNATNVVIKVCEFQFCNDPFLGVYYHKNNKSWMESEFRVYSSANNCTFEYVSQPFLMDLEGKQGNFKNLREFVFKNIDGYFKIYSKHTPINLVRDLPQGFSALEPLVDLPIGINITRFQTLLALHRSYLTPGDSSSGWTAGAAAYYVGYLQPRTFLLKYNENGTITDAVDCALDPLSETKCTLKSFTVEKGIYQTSNFRVQPTESIVRFPNITNLCPFGEVFNATRFASVYAWNRKRISNCVADYSVLYNSASFSTFKCYGVSPTKLNDLCFTNVYADSFVIRGDEVRQIAPGQTGKIADYNYKLPDDFTGCVIAWNSNNLDSKVGGNYNYLYRLFRKSNLKPFERDISTEIYQAGSTPCNGVEGFNCYFPLQSYGFQPTNGVGYQPYRVVVLSFELLHAPATVCGPKKSTNLVKNKCVNFNFNGLTGTGVLTESNKKFLPFQQFGRDIADTTDAVRDPQTLEILDITPCSFGGVSVITPGTNTSNQVAVLYQGVNCTEVPVAIHADQLTPTWRVYSTGSNVFQTRAGCLIGAEHVNNSYECDIPIGAGICASYHTQTNSPRRARSVASQSIIAYTMSLGAENSVAYSNNSIAIPTNFTISVTTEILPVSMTKTSVDCTMYICGDSTECSNLLLQYGSFCTQLNRALTGIAVEQDKNTQEVFAQVKQIYKTPPIKDFGGFNFSQILPDPSKPSKRSFIEDLLFNKVTLADAGFIKQYGDCLGDIAARDLICAQKFNGLTVLPPLLTDEMIAQYTSALLAGTITSGWTFGAGAALQIPFAMQMAYRFNGIGVTQNVLYENQKLIANQFNSAIGKIQDSLSSTASALGKLQDVVNQNAQALNTLVKQLSSNFGCISSVLNDILSRLDKVEAEVQIDCLITGRLQSLQTYVTQQLIRAAEIRASANLAATKMSECVLGQSKRVDFCGKGYHLMSFPQSAPHGVVFLHVTYVPAQEKNFTTAPAICHDGKAHFPREGVFVSNGTHWFVTQRNFYEPQIITTDNTFVSGNCDVVIGIVNNTVYDPLQPELDSFKEELDKYFKNHTSPDVDLGDISGINASVVNIQKEIDRLNEVAKNLNESLIDLQELGKYEQYIKGGGSGGGQIYEGKLTAEGLRFGIVASRFNHALVDRLVEGAIDAIVRHGGREEDITLVRVPGSWEIPVAAGELARKEDIDAVIAIGVLIRGATPHFDYIASEVSKGLADLSLELRKPITFGVITADTLEQAIERAGTKHGNKGWEAALSAIEMANLFKSLR

SEQ ID NO: 4481 - protein, 1371 aa, Artificial Sequence; identical to SEQ ID NO: 4436
  SARS-CoV-2/Iceland/247/2020__EPI_ISL_417575 spike protein (1-1211)(A972C_R995C) LumSynth construct

SEQ ID NO: 4482 - protein, 1371 aa, Artificial Sequence
  SARS-CoV-2/Iceland/238/2020__EPI_ISL_417566 spike protein (1-1211)(A972C_R995C) LumSynth construct
MFVFLVLLPLVSSQCVNLTTRTQLPPAYTNSFTRGVYYPDKVFRSSVLHSTQDLFLPFFSNVTWFHAIHVSGTNGTKRFDNPVLPFNDGVYFASTEKSNIIRGWIFGTTLDSKTQSLLIVNNATNVVIKVCEFQFCNDPFLGVYYHKNNKSWMESEFRVYSSANNCTFEYVSQPFLMDLEGKQGNFKNLREFVFKNIDGYFKIYSKHTPINLVRDLPQGFSALEPLVDLPIGINITRFQTLLALHRSYLTPGDSSSGWTAGAAAYYVGYLQPRTFLLKYNENGTITDAVDCALDPLSETKCTLKSFTVEKGIYQTSNFRVQPTESIVRFPNITNLCPFGEVFNATRFASVYAWNRKRISNCVADYSVLYNSASFSTFKCYGVSPTKLNDLCFTNVYADSFVIRGDEVRQIAPGQTGKIADYNYKLPDDFTGCVIAWNSNNLDSKVGGNYNYLYRLFRKSNLKPFERDISTEIYQAGSTPCNGVEGFNCYFPLQSYGFQPTNGVGYQPYRVVVLSFELLHAPATVCGPKKSTNLVKNKCVNFNFNGLTGTGVLTESNKKFLPFQQFGRDIADTTDAVRDPQTLEILDITPCSFGGVSVITPGTNTSNQVAVLYQGVNCTEVPVAIHADQLTPTWRVYSTGSNVFQTRAGCLIGAEHVNNSYECDIPIGAGICASYQTQTNSPRRARSVASQSIIAYTMSLGAENSVAYSNNSIAIPTNFTISVTTEILPVSMTKTSVDCTMYICGDSTECSNLLLQYGSFCTQLNRALTGIAVEQDKNTQEVFAQVKQIYKTPPIKDFGGFNFSQILPDPSKPSKRSFIEDLLFNKVTLADVGFIKQYGDCLGDIAARDLICAQKFNGLTVLPPLLTDEMIAQYTSALLAGTITSGWTFGAGAALQIPFAMQMAYRFNGIGVTQNVLYENQKLIANQFNSAIGKIQDSLSSTASALGKLQDVVNQNAQALNTLVKQLSSNFGCISSVLNDILSRLDKVEAEVQIDCLITGRLQSLQTYVTQQLIRAAEIRASANLAATKMSECVLGQSKRVDFCGKGYHLMSFPQSAPHGVVFLHVTYVPAQEKNFTTAPAICHDGKAHFPREGVFVSNGTHWFVTQRNFYEPQIITTDNTFVSGNCDVVIGIVNNTVYDPLQPELDSFKEELDKYFKNHTSPDVDLGDISGINASVVNIQKEIDRLNEVAKNLNESLIDLQELGKYEQYIKGGGSGGGQIYEGKLTAEGLRFGIVASRFNHALVDRLVEGAIDAIVRHGGREEDITLVRVPGSWEIPVAAGELARKEDIDAVIAIGVLIRGATPHFDYIASEVSKGLADLSLELRKPITFGVITADTLEQAIERAGTKHGNKGWEAALSAIEMANLFKSLR

SEQ ID NO: 4483 - protein, 1371 aa, Artificial Sequence
  SARS-CoV-2/Greece/16/2020__EPI_ISL_418265 spike protein (1-1211)(A972C_R995C) LumSynth construct
MFVFLVLLPLVSSQCVNLTTRTQLPPAYTNSFTRGVYYPDKVFRSSVLHSTQDLFLPFFSNVTWFHAIHVSGTNGTKRFDNPVLPFNDGVYFASTEKSNIIRGWIFGTTLDSKTQSLLIVNNATNVVIKVCEFQFCNDPFLGVYYHKNNKSWMESEFRVYSSANNCTFEYVSQPFLMDLEGKQGNFKNLREFVFKNVDGYFKIYSKHTPINLVRDLPQGFSALEPLVDLPIGINITRFQTLLALHRSYLTPGDSSSGWTAGAAAYYVGYLQPRTFLLKYNENGTITDAVDCALDPLSETKCTLKSFTVEKGIYQTSNFRVQPTESIVRFPNITNLCPFGEVFNATRFASVYAWNRKRISNCVADYSVLYNSASFSTFKCYGVSPTKLNDLCFTNVYADSFVIRGDEVRQIAPGQTGKIADYNYKLPDDFTGCVIAWNSNNLDSKVGGNYNYLYRLFRKSNLKPFERDISTEIYQAGSTPCNGVEGFNCYFPLQSYGFQPTNGVGYQPYRVVVLSFELLHAPATVCGPKKSTNLVKNKCVNFNFNGLTGTGVLTESNKKFLPFQQFGRDIADTTDAVRDPQTLEILDITPCSFGGVSVITPGTNTSNQVAVLYQDVNCTEVPVAIHADQLTPTWRVYSTGSNVFQTRAGCLIGAEHVNNSYECDIPIGAGICASYQTQTNSPRRARSVASQSIIAYTMSLGAENSVAYSNNSIAIPTNFTISVTTEILPVSMTKTSVDCTMYICGDSTECSNLLLQYGSFCTQLNRALTGIAVEQDKNTQEVFAQVKQIYKTPPIKDFGGFNFSQILPDPSKPSKRSFIEDLLFNKVTLADAGFIKQYGDCLGDIAARDLICAQKFNGLTVLPPLLTDEMIAQYTSALLAGTITSGWTFGAGAALQIPFAMQMAYRFNGIGVTQNVLYENQKLIANQFNSAIGKIQDSLSSTASALGKLQDVVNQNAQALNTLVKQLSSNFGCISSVLNDILSRLDKVEAEVQIDCLITGRLQSLQTYVTQQLIRAAEIRASANLAATKMSECVLGQSKRVDFCGKGYHLMSFPQSAPHGVVFLHVTYVPAQEKNFTTAPAICHDGKAHFPREGVFVSNGTHWFVTQRNFYEPQIITTDNTFVSGNCDVVIGIVNNTVYDPLQPELDSFKEELDKYFKNHTSPDVDLGDISGINASVVNIQKEIDRLNEVAKNLNESLIDLQELGKYEQYIKGGGSGGGQIYEGKLTAEGLRFGIVASRFNHALVDRLVEGAIDAIVRHGGREEDITLVRVPGSWEIPVAAGELARKEDIDAVIAIGVLIRGATPHFDYIASEVSKGLADLSLELRKPITFGVITADTLEQAIERAGTKHGNKGWEAALSAIEMANLFKSLR

SEQ ID NO: 4484 - protein, 1371 aa, Artificial Sequence
  SARS-CoV-2/Iceland/319/2020__EPI_ISL_417648 spike protein (1-1211)(A972C_R995C) LumSynth construct
MFVFLVLLPLVSSQCVNLTTRTQLPPAYTNSFTRGVYYPDKVFRSSVLHSTQDLFLPFFSNVTWFHAIHVSGTNGTKRFDNPVLPFNDGVYFASTEKSNIIRGWIFGTTLDSKTQSLLIVNNATNVVIKVCEFQFCNDPFLGVYYHKNNKSWMESEFRVYSSANNCTFEYVSQPFLIDLEGKQGNFKNLREFVFKNIDGYFKIYSKHTPINLVRDLPQGFSALEPLVDLPIGINITRFQTLLALHRSYLTPGDSSSGWTAGAAAYYVGYLQPRTFLLKYNENGTITDAVDCALDPLSETKCTLKSFTVEKGIYQTSNFRVQPTESIVRFPNITNLCPFGEVFNATRFASVYAWNRKRISNCVADYSVLYNSASFSTFKCYGVSPTKLNDLCFTNVYADSFVIRGDEVRQIAPGQTGKIADYNYKLPDDFTGCVIAWNSNNLDSKVGGNYNYLYRLFRKSNLKPFERDISTEIYQAGSTPCNGVEGFNCYFPLQSYGFQPTNGVGYQPYRVVVLSFELLHAPATVCGPKKSTNLVKNKCVNFNFNGLTGTGVLTESNKKFLPFQQFGRDIADTTDAVRDPQTLEILDITPCSFGGVSVITPGTNTSNQVAVLYQGVNCTEVPVAIHADQLTPTWRVYSTGSNVFQTRAGCLIGAEHVNNSYECDIPIGAGICASYQTQTNSPRRARSVASQSIIAYTMSLGAENSVAYSNNSIAIPTNFTISVTTEILPVSMTKTSVDCTMYICGDSTECSNLLLQYGSFCTQLNRALTGIAVEQDKNTQEVFAQVKQIYKTPPIKDFGGFNFSQILPDPSKPSKRSFIEDLLFNKVTLADAGFIKQYGDCLGDIAARDLICAQKFNGLTVLPPLLTDEMIAQYTSALLAGTITSGWTFGAGAALQIPFAMQMAYRFNGIGVTQNVLYENQKLIANQFNSAIGKIQDSLSSTASALGKLQDVVNQNAQALNTLVKQLSSNFGCISSVLNDILSRLDKVEAEVQIDCLITGRLQSLQTYVTQQLIRAAEIRASANLAATKMSECVLGQSKRVDFCGKGYHLMSFPQSAPHGVVFLHVTYVPAQEKNFTTAPAICHDGKAHFPREGVFVSNGTHWFVTQRNFYEPQIITTDNTFVSGNCDVVIGIVNNTVYDPLQPELDSFKEELDKYFKNHTSPDVDLGDISGINASVVNIQKEIDRLNEVAKNLNESLIDLQELGKYEQYIKGGGSGGGQIYEGKLTAEGLRFGIVASRFNHALVDRLVEGAIDAIVRHGGREEDITLVRVPGSWEIPVAAGELARKEDIDAVIAIGVLIRGATPHFDYIASEVSKGLADLSLELRKPITFGVITADTLEQAIERAGTKHGNKGWEAALSAIEMANLFKSLR

SEQ ID NO: 4485 - protein, 1371 aa, Artificial Sequence
  SARS-CoV-2/Congo/94/2020__EPI_ISL_417947 spike protein (1-1211)(A972C_R995C) LumSynth construct
MFVFLVLLPLVSSQCVNLTTRTQLPPAYTNSFTRGVYYPDKVFRSSVLHSTQDLFLPFFSNVTWFHAIHVSGTNGTKRFDNPVLPFNDGVYFASTEKSNIIRGWIFGTTLDSKTQSLLIVNNATNVVIKVCEFQFCNDPFLGVYYHKNNKSWMESEFRVYSSANNCTFEYVSQPFLMDLEGKQGNFKNLREFVFKNIDGYFKIYSKHTPINLVRDLPQGFSALEPLVDLPIGINITRFQTLLALHRSYLTPGDSSSGWTAGAAAYYVGYLQPRTFLLKYNENGTITDAVDCALDPLSETKCTLKSFTVEKGIYQTSNFRVQPTESIVRFPNITNLCPFGEVFNATRFASVYAWNRKRISNCVADYSVLYNSASFSTFKCYGVSPTKLNDLCFTNVYADSFVIRGDEVRQIAPGQTGKIADYNYKLPDDFTGCVIAWNSNNLDSKVGGNYNYLYRLFRKSNLKPFERDISTEIYQAGSTPCNGVEGFNCYFPLQSYGFQPTNGVGYQPYRVVVLSFELLHAPATVCGPKKSTNLVKNKCVNFNFNGLTGTGVLTESNKKFLPFQQFGRDIADTTDAVRDPQTLEILDITPCSFGGVSVITPGTNTSNQVAVLYQGVNCTEVPVAIHADQLTPTWRVYSTGSNVFQTRAGCLIGAEHVNNSYECDIPIGAGICASYQTQTNSPRRARSVASQSIIAYTMSLGAENSVAYSNNSIAIPTNFTISVTTEILPVSMTKTSVDCTMYICGDSTECSNLLLQYGSFCTQLNRALTGIAVEQDKNTQEVFAQVKQIYKTPPIKDFGGFNFSQILPDPSKPSKRSFIEDILFNKVTLADAGFIKQYGDCLGDIAARDLICAQKFNGLTVLPPLLTDEMIAQYTSALLAGTITSGWTFGAGAALQIPFAMQMAYRFNGIGVTQNVLYENQKLIANQFNSAIGKIQDSLSSTASALGKLQDVVNQNAQALNTLVKQLSSNFGCISSVLNDILSRLDKVEAEVQIDCLITGRLQSLQTYVTQQLIRAAEIRASANLAATKMSECVLGQSKRVDFCGKGYHLMSFPQSAPHGVVFLHVTYVPAQEKNFTTAPAICHDGKAHFPREGVFVSNGTHWFVTQRNFYEPQIITTDNTFVSGNCDVVIGIVNNTVYDPLQPELDSFKEELDKYFKNHTSPDVDLGDISGINASVVNIQKEIDRLNEVAKNLNESLIDLQELGKYEQYIKGGGSGGGQIYEGKLTAEGLRFGIVASRFNHALVDRLVEGAIDAIVRHGGREEDITLVRVPGSWEIPVAAGELARKEDIDAVIAIGVLIRGATPHFDYIASEVSKGLADLSLELRKPITFGVITADTLEQAIERAGTKHGNKGWEAALSAIEMANLFKSLR

SEQ ID NO: 4486 - protein, 1371 aa, Artificial Sequence
  SARS-CoV-2/Congo/158/2020__EPI_ISL_417950 spike protein (1-1211)(A972C_R995C) LumSynth construct
MFVFLVLLPLVSSQCVNLTTRTQLPPAYTNSFTRGVYYPDKVFRSSVLHSTQDLFLPFFSNVTWFHAIHVSGTNGTKRFDNPVLPFNDGVYFASTEKSNIIRGWIFGTTLDSKTQSLLIVNNATNVVIKVCEFQFCNDPFLGVYYHKNNKSWMESEFRVYSSANNCTFEYVSQPFLMDLEGKQGNFKNLREFVFKNIDGYFKIYSKHTPINLVRDLPQGFSALEPLVDLPIGINITRFQTLLALHRSYLTPGDSSSGWTAGAAAYYVGYLQPRTFLLKYNENGTITDAVDCALDPLSETKCTLKSFTVEKGIYQTSNFRVQPTESIVRFPNITNLCPFGEVFNATRFASVYAWNRKRISNCVADYSVLYNSASFSTFKCYGVSPTKLNDLCFTNVYADSFVIRGDEVRQIAPGQTGKIADYNYKLPDDFTGCVIAWNSNNLDSKVGGNYNYLYRLFRKSNLKPFERDISTEIYQAGSTPCNGVEGFNCYFPLQSYGFQPTNGVGYQPYRVVVLSFELLHAPATVCGPKKSTNLVKNKCVNFNFNGLTGTGVLTESNKKFLPFQQFGRDIADTTDAVRDPQTLEILDITPCSFGGVSVITPGTNTSNQVAVLYQDVNCTEVPVAIHADQLTPTWRVYSTGSNVFQTRAGCLIGAEHVNNSYECDIPIGAGICASYQTQTNSPRRARSVASQSIIAYTMSLGAENSVAYSNNSIAIPTNFTISVTTEILPVSMTKTSVDCTMYICGDSTECSNLLLQYGSFCTQLNRALTGIAVEQDKNTQEVFAQVKQIYKTPPIKDFGGFNFSQILPDPSKPSKRSFIEDLLFNKVTLADAGFIKQYGDCLGDIAARDLICAQKFNGLTVLPPLLTDEMIAQYTSALLAGTITSGWTFGAGAALQIPFAMQMAYRFNGIGVTQNVLYENQKLIANQFNSAIGKIQDSLSSTASALGKLQDVVNQNAQALNTLVKQLSSNFGCISSVLNDILSRLDKVEAEVQIDCLITGRLQSLQTYVTQQLIRAAEIRASANLAATKMSECVLGQSKRVDFCGKGYHLMSFPQSAPHGVVFLHVTYVPAQEKNFTTAPAICHDGKAHFPREGVFVSNGTHWFVTQRNFYEPQIITTDNTFLSGNCDVVIGIVNNTVYDPLQPELDSFKEELDKYFKNHTSPDVDLGDISGINASVVNIQKEIDRLNEVAKNLNESLIDLQELGKYEQYIKGGGSGGGQIYEGKLTAEGLRFGIVASRFNHALVDRLVEGAIDAIVRHGGREEDITLVRVPGSWEIPVAAGELARKEDIDAVIAIGVLIRGATPHFDYIASEVSKGLADLSLELRKPITFGVITADTLEQAIERAGTKHGNKGWEAALSAIEMANLFKSLR

SEQ ID NO: 4487 - protein, 1371 aa, Artificial Sequence
  SARS-CoV-2/USA/UT-00034/2020__EPI_ISL_417977 spike protein (1-1211)(A972C_R995C) LumSynth construct
MFVFLVLLPLVSSQCVNLTTRTQLPPAYTNSFTRGVYYPDKVFRSSVLHSTQDLFLPFFSNVTWFHAIHVSGTNGTKRFDNPVLPFNDGVYFASTEKSNIIRGWIFGTTLDSKTQSLLIVNNATNVVIKVCEFQFCNDPFLGVYYYKNNKSWMESEFRVYSSANNCTFEYVSQPFLMDLEGKQGNFKNLREFVFKNIDGYFKIYSKHTPINLVRDLPQGFSALEPLVDLPIGINITRFQTLLALHRSYLTPGDSSSGWTAGAAAYYVGYLQPRTFLLKYNENGTITDAVDCALDPLSETKCTLKSFTVEKGIYQTSNFRVQPTESIVRFPNITNLCPFGEVFNATRFASVYAWNRKRISNCVADYSVLYNSASFSTFKCYGVSPTKLNDLCFTNVYADSFVIRGDEVRQIAPGQTGKIADYNYKLPDDFTGCVIAWNSNNLDSKVGGNYNYLYRLFRKSNLKPFERDISTEIYQAGSTPCNGVEGFNCYFPLQSYGFQPTNGVGYQPYRVVVLSFELLHAPATVCGPKKSTNLVKNKCVNFNFNGLTGTGVLTESNKKFLPFQQFGRDIADTTDAVRDPQTLEILDITPCSFGGVSVITPGTNTSNQVAVLYQGVNCTEVPVAIHADQLTPTWRVYSTGSNVFQTRAGCLIGAEHVNNSYECDIPIGAGICASYQTQTNSPRRARSVASQSIIAYTMSLGAENSVAYSNNSIAIPTNFTISVTTEILPVSMTKTSVDCTMYICGDSTECSNLLLQYGSFCTQLNRALTGIAVEQDKNTQEVFAQVKQIYKTPPIKDFGGFNFSQILPDPSKPSKRSFIEDLLFNKVTLADAGFIKQYGDCLGDIAARDLICAQKFNGLTVLPPLLTDEMIAQYTSALLAGTITSGWTFGAGAALQIPFAMQMAYRFNGIGVTQNVLYENQKLIANQFNSAIGKIQDSLSSTASALGKLQDVVNQNAQALNTLVKQLSSNFGCISSVLNDILSRLDKVEAEVQIDCLITGRLQSLQTYVTQQLIRAAEIRASANLAATKMSECVLGQSKRVDFCGKGYHLMSFPQSAPHGVVFLHVTYVPAQEKNFTTAPAICHDGKAHFPREGVFVSNGTHWFVTQRNFYEPQIITTDNTFVSGNCDVVIGIVNNTVYDPLQPELDSFKEELDKYFKNHTSPDVDLGDISGINASVVNIQKEIDRLNEVAKNLNESLIDLQELGKYEQYIKGGGSGGGQIYEGKLTAEGLRFGIVASRFNHALVDRLVEGAIDAIVRHGGREEDITLVRVPGSWEIPVAAGELARKEDIDAVIAIGVLIRGATPHFDYIASEVSKGLADLSLELRKPITFGVITADTLEQAIERAGTKHGNKGWEAALSAIEMANLFKSLR

SEQ ID NO: 4488 - protein, 1371 aa, Artificial Sequence
  SARS-CoV-2/USA/UT-00033/2020__EPI_ISL_417976 spike protein (1-1211)(A972C_R995C) LumSynth construct
MFVFLVLLPLVSSQCVNLTTRTQLPPAYTNSFTRGVYYPDKVFRSSVLHSTQDLFLPFFSNVTWFHAIHVSGTNGTKRFDNPVLPFNDGVYFASTEKSNIIRGWIFGTTLDSKTQSLLIVNNATNVVIKVCEFQFCNDPFLGVYYHKNNKSWMESEFRVYSSANNCTFEYVSQPFLMDLEGKQGNFKNLREFVFKNIDGYFKIYSKHTPINLVRDLPQGFSALEPLVDLPIGINITRFQTLLALHRSYLTPGDSSSGLTAGAAAYYVGYLQPRTFLLKYNENGTITDAVDCALDPLSETKCTLKSFTVEKGIYQTSNFRVQPTESIVRFPNITNLCPFGEVFNATRFASVYAWNRKRISNCVADYSVLYNSASFSTFKCYGVSPTKLNDLCFTNVYADSFVIRGDEVRQIAPGQTGKIADYNYKLPDDFTGCVIAWNSNNLDSKVGGNYNYLYRLFRKSNLKPFERDISTEIYQAGSTPCNGVEGFNCYFPLQSYGFQPTNGVGYQPYRVVVLSFELLHAPATVCGPKKSTNLVKNKCVNFNFNGLTGTGVLTESNKKFLPFQQFGRDIADTTDAVRDPQTLEILDITPCSFGGVSVITPGTNTSNQVAVLYQGVNCTEVPVAIHADQLTPTWRVYSTGSNVFQTRAGCLIGAEHVNNSYECDIPIGAGICASYQTQTNSPRRARSVASQSIIAYTMSLGAENSVAYSNNSIAIPTNFTISVTTEILPVSMTKTSVDCTMYICGDSTECSNLLLQYGSFCTQLNRALTGIAVEQDKNTQEVFAQVKQIYKTPPIKDFGGFNFSQILPDPSKPSKRSFIEDLLFNKVTLADAGFIKQYGDCLGDIAARDLICAQKFNGLTVLPPLLTDEMIAQYTSALLAGTITSGWTFGAGAALQIPFAMQMAYRFNGIGVTQNVLYENQKLIANQFNSAIGKIQDSLSSTASALGKLQDVVNQNAQALNTLVKQLSSNFGCISSVLNDILSRLDKVEAEVQIDCLITGRLQSLQTYVTQQLIRAAEIRASANLAATKMSECVLGQSKRVDFCGKGYHLMSFPQSAPHGVVFLHVTYVPAQEKNFTTAPAICHDGKAHFPREGVFVSNGTHWFVTQRNFYEPQIITTDNTFVSGNCDVVIGIVNNTVYDPLQPELDSFKEELDKYFKNHTSPDVDLGDISGINASVVNIQKEIDRLNEVAKNLNESLIDLQELGKYEQYIKGGGSGGGQIYEGKLTAEGLRFGIVASRFNHALVDRLVEGAIDAIVRHGGREEDITLVRVPGSWEIPVAAGELARKEDIDAVIAIGVLIRGATPHFDYIASEVSKGLADLSLELRKPITFGVITADTLEQAIERAGTKHGNKGWEAALSAIEMANLFKSLR

SEQ ID NO: 4489 - protein, 1371 aa, Artificial Sequence
  SARS-CoV-2/USA/WI-13/2020__EPI_ISL_417516 spike protein (1-1211)(A972C_R995C) LumSynth construct
MFVFLVLLPLVSSQCVNLTTRTQLPPAYTNSFTRGVYYPDKVFRSSVLHSTQDLFLPFFSNVTWFHAIHVSGTNGTKRFDNPVLPFNDGVYFASTEKSNIIRGWIFGTTLDSKTQSLLIVNNATNVVIKVCEFQFCNDPFLGVYYHKNNKSWMESEFRVYSSANNCTFEYVSQPFLMDLEGKQGNFKNLREFVFKNIDGYFKIYSKHTPINLVRDLPQGFSALEPLVDLPIGINITRFQTLLALHRSYLTPGDSSSGWTAGAAAYYVGYLQPRTFLLKYNENGTITDAVDCALDPLSETKCTLKSFTVEKGIYQTSNFRVLPTESIVRFPNITNLCPFGEVFNATRFASVYAWNRKRISNCVADYSVLYNSASFSTFKCYGVSPTKLNDLCFTNVYADSFVIRGDEVRQIAPGQTGKIADYNYKLPDDFTGCVIAWNSNNLDSKVGGNYNYLYRLFRKSNLKPFERDISTEIYQAGSTPCNGVEGFNCYFPLQSYGFQPTNGVGYQPYRVVVLSFELLHAPATVCGPKKSTNLVKNKCVNFNFNGLTGTGVLTESNKKFLPFQQFGRDIADTTDAVRDPQTLEILDITPCSFGGVSVITPGTNTSNQVAVLYQGVNCTEVPVAIHADQLTPTWRVYSTGSNVFQTRAGCLIGAEHVNNSYECDIPIGAGICASYQTQTNSPRRARSVASQSIIAYTMSLGAENSVAYSNNSIAIPTNFTISVTTEILPVSMTKTSVDCTMYICGDSTECSNLLLQYGSFCTQLNRALTGIAVEQDKNTQEVFAQVKQIYKTPPIKDFGGFNFSQILPDPSKPSKRSFIEDLLFNKVTLADAGFIKQYGDCLGDIAARDLICAQKFNGLTVLPPLLTDEMIAQYTSALLAGTITSGWTFGAGAALQIPFAMQMAYRFNGIGVTQNVLYENQKLIANQFNSAIGKIQDSLSSTASALGKLQDVVNQNAQALNTLVKQLSSNFGCISSVLNDILSRLDKVEAEVQIDCLITGRLQSLQTYVTQQLIRAAEIRASANLAATKMSECVLGQSKRVDFCGKGYHLMSFPQSAPHGVVFLHVTYVPAQEKNFTTAPAICHDGKAHFPREGVFVSNGTHWFVTQRNFYEPQIITTDNTFVSGNCDVVIGIVNNTVYDPLQPELDSFKEELDKYFKNHTSPDVDLGDISGINASVVNIQKEIDRLNEVAKNLNESLIDLQELGKYEQYIKGGGSGGGQIYEGKLTAEGLRFGIVASRFNHALVDRLVEGAIDAIVRHGGREEDITLVRVPGSWEIPVAAGELARKEDIDAVIAIGVLIRGATPHFDYIASEVSKGLADLSLELRKPITFGVITADTLEQAIERAGTKHGNKGWEAALSAIEMANLFKSLR

SEQ ID NO: 4490 - protein, 1370 aa, Artificial Sequence
  SARS-CoV-2/India/1-27/2020__EPI_ISL_413522 spike protein (1-1210)(A971C_R994C) LumSynth construct
MFVFLVLLPLVSSQCVNLTTRTQLPPAYTNSFTRGVYYPDKVFRSSVLHSTQDLFLPFFSNVTWFHAIHVSGTNGTKRFDNPVLPFNDGVYFASTEKSNIIRGWIFGTTLDSKTQSLLIVNNATNVVIKVCEFQFCNDPFLGVYHKNNKSWMESEFRVYSSANNCTFEYVSQPFLMDLEGKQGNFKNLREFVFKNIDGYFKIYSKHTPINLVRDLPQGFSALEPLVDLPIGINITRFQTLLALHRSYLTPGDSSSGWTAGAAAYYVGYLQPRTFLLKYNENGTITDAVDCALDPLSETKCTLKSFTVEKGIYQTSNFRVQPTESIVRFPNITNLCPFGEVFNATRFASVYAWNRKRISNCVADYSVLYNSASFSTFKCYGVSPTKLNDLCFTNVYADSFVIRGDEVIQIAPGQTGKIADYNYKLPDDFTGCVIAWNSNNLDSKVGGNYNYLYRLFRKSNLKPFERDISTEIYQAGSTPCNGVEGFNCYFPLQSYGFQPTNGVGYQPYRVVVLSFELLHAPATVCGPKKSTNLVKNKCVNFNFNGLTGTGVLTESNKKFLPFQQFGRDIADTTDAVRDPQTLEILDITPCSFGGVSVITPGTNTSNQVAVLYQDVNCTEVPVAIHADQLTPTWRVYSTGSNVFQTRAGCLIGAEHVNNSYECDIPIGAGICASYQTQTNSPRRARSVASQSIIAYTMSLGAENSVAYSNNSIAIPTNFTISVTTEILPVSMTKTSVDCTMYICGDSTECSNLLLQYGSFCTQLNRALTGIAVEQDKNTQEVFAQVKQIYKTPPIKDFGGFNFSQILPDPSKPSKRSFIEDLLFNKVTLADAGFIKQYGDCLGDIAARDLICAQKFNGLTVLPPLLTDEMIAQYTSALLAGTITSGWTFGAGAALQIPFAMQMAYRFNGIGVTQNVLYENQKLIANQFNSAIGKIQDSLSSTASALGKLQDVVNQNAQALNTLVKQLSSNFGCISSVLNDILSRLDKVEAEVQIDCLITGRLQSLQTYVTQQLIRAAEIRASANLAATKMSECVLGQSKRVDFCGKGYHLMSFPQSAPHGVVFLHVTYVPAQEKNFTTAPAICHDGKAHFPREGVFVSNGTHWFVTQRNFYEPQIITTDNTFVSGNCDVVIGIVNNTVYDPLQPELDSFKEELDKYFKNHTSPDVDLGDISGINASVVNIQKEIDRLNEVAKNLNESLIDLQELGKYEQYIKGGGSGGGQIYEGKLTAEGLRFGIVASRFNHALVDRLVEGAIDAIVRHGGREEDITLVRVPGSWEIPVAAGELARKEDIDAVIAIGVLIRGATPHFDYIASEVSKGLADLSLELRKPITFGVITADTLEQAIERAGTKHGNKGWEAALSAIEMANLFKSLR

SEQ ID NO: 4491 - protein, 1365 aa, Artificial Sequence
  SARS-CoV-2/pangolin/Guangxi/P4L/2017__EPI_ISL_410538 spike protein (1-1205)(A966C_R989C) LumSynth construct
MFVFLFVLPLVSSQCVNLTTRTGIPPGYTNSSTRGVYYPDKVFRSSILHLTQDLFLPFFSNVTWFNTINYQGGFKKFDNPVLPFNDGVYFASTEKSNIIRGWIFGTTLDARTQSLLIVNNATNVVIKVCEFQFCTDPFLGVYYHNNNKTWVENEFRVYSSANNCTFEYISQPFLMDLEGKQGNFKNLREFVFKNVDGYFKIYSKHTPIDLVRDLPRGFAALEPLVDLPIGINITRFQTLLALHRSYLTPGNLESGWTTGAAAYYVGYLQQRTFLLSYNQNGTITDAVDCSLDPLSETKCTLKSLTVEKGIYQTSNFRVQPTISIVRFPNITNLCPFGEVFNASKFASVYAWNRKRISNCVADYSVLYNSTSFSTFKCYGVSPTKLNDLCFTNVYADSFVVKGDEVRQIAPGQTGVIADYNYKLPDDFTGCVIAWNSVKQDALTGGNYGYLYRLFRKSKLKPFERDISTEIYQAGSTPCNGQVGLNCYYPLERYGFHPTTGVNYQPFRVVVLSFELLNGPATVCGPKLSTTLVKDKCVNFNFNGLTGTGVLTTSKKQFLPFQQFGRDISDTTDAVRDPQTLEILDITPCSFGGVSVITPGTNTSNQVAVLYQDVNCTEVPMAIHAEQLTPAWRVYSAGANVFQTRAGCLVGAEHVNNSYECDIPVGAGICASYHSMSSLRSVNQRSIIAYTMSLGAENSVAYSNNSIAIPTNFTISVTTEILPVSMTKTSVDCTMYICGDSIECSNLLLQYGSFCTQLNRALTGIAVEQDKNTQEVFAQVKQIYKTPPIKDFGGFNFSQILPDPSKPSKRSFIEDLLFNKVTLADAGFIKQYGDCLGDIAARDLICAQKFNGLTVLPPLLTDEMIAQYTSALLAGTITSGWTFGAGAALQIPFAMQMAYRFNGIGVTQNVLYENQKLIANQFNSAIGKIQDSLSSTASALGKLQDVVNQNAQALNTLVKQLSSNFGCISSVLNDILSRLDKVEAEVQIDCLITGRLQSLQTYVTQQLIRAAEIRASANLAATKMSECVLGQSKRVDFCGKGYHLMSFPQSAPHGVVFLHVTYVPAQEKNFTTAPAICHEGKAHFPREGVFVSNGTHWFITQRNFYEPQIITTDNTFVSGSCDVVIGIVNNTVYDPLQPELDSFKEELDKYFKNHTSPDVDLGDISGINASVVNIQKEIDRLNEVAKNLNESPIDLQELGKYEQYIKGGGSGGGQIYEGKLTAEGLRFGIVASRFNHALVDRLVEGAIDAIVRHGGREEDITLVRVPGSWEIPVAAGELARKEDIDAVIAIGVLIRGATPHFDYIASEVSKGLADLSLELRKPITFGVITADTLEQAIERAGTKHGNKGWEAALSAIEMANLFKSLR

SEQ ID NO: 4492 - protein, 1365 aa, Artificial Sequence
  SARS-CoV-2/pangolin/Guangxi/P5L/2017__EPI_ISL_410540 spike protein (1-1205)(A966C_R989C) LumSynth construct
MFVFLFVLPLVSSQCVNLTTRTGIPPGYTNSSTRGVYYPDKVFRSSILHLTQDLFLPFFSNVTWFNTINYQGGFKKFDNPVLPFNDGVYFASTEKSNIIRGWIFGTTLDARTQSLLIVNNATNVVIKVCEFQFCTDPFLGVYYHNNNKTWVENEFRVYSSANNCTFEYISQPFLMDLEGKQGNFKNLREFVFKNVDGYFKIYSKHTPIDLVRDLPRGFAALEPLVDLPIGINITRFQTLLALHRSYLTPGKLESGWTTGAAAYYVGYLQQRTFLLSYNQNGTITDAVDCSLDPLSETKCTLKSLTVEKGIYQTSNFRVQPTISIVRFPNITNLCPFGEVFNASKFASVYAWNRKRISNCVADYSVLYNSTSFSTFKCYGVSPTKLNDLCFTNVYADSFVVKGDEVRQIAPGQTGVIADYNYKLPDDFTGCVIAWNSVKQDALTGGNYGYLYRLFRKSKLKPFERDISTEIYQAGSTPCNGQVGLNCYYPLERYGFHPTTGVNYQPFRVVVLSFELLNGPATVCGPKLSTTLVKDKCVNFNFNGLTGTGVLTTSKKQFLPFQQFGRDISDTTDAVRDPQTLEILDITPCSFGGVSVITPGTNTSNQVAVLYQDVNCTEVPMAIHAEQLTPAWRVYSAGANVFQTRAGCLVGAEHVNNSYECDIPVGAGICASYHSMSSFRSVNQRSIIAYTMSLGAENSVAYSNNSIAIPTNFTISVTTEILPVSMTKTSVDCTMYICGDSIECSNLLLQYGSFCTQLNRALTGIAVEQDKNTQEVFAQVKQIYKTPPIKDFGGFNFSQILPDPSKPSKRSFIEDLLFNKVTLADAGFIKQYGDCLGDIAARDLICAQKFNGLTVLPPLLTDEMIAQYTSALLAGTITSGWTFGAGAALQIPFAMQMAYRFNGIGVTQNVLYENQKLIANQFNSAIGKIQDSLSSTASALGKLQDVVNQNAQALNTLVKQLSSNFGCISSVLNDILSRLDKVEAEVQIDCLITGRLQSLQTYVTQQLIRAAEIRASANLAATKMSECVLGQSKRVDFCGKGYHLMSFPQSAPHGVVFLHVTYVPAQEKNFTTAPAICHEGKAHFPREGVFVSNGTHWFITQRNFYEPQIITTDNTFVSGSCDVVIGIVNNTVYDPLQPELDSFKEELDKYFKNHTSPDVDLGDISGINASVVNIQKEIDRLNEVAKNLNESLIDLQELGKYEQYIKGGGSGGGQIYEGKLTAEGLRFGIVASRFNHALVDRLVEGAIDAIVRHGGREEDITLVRVPGSWEIPVAAGELARKEDIDAVIAIGVLIRGATPHFDYIASEVSKGLADLSLELRKPITFGVITADTLEQAIERAGTKHGNKGWEAALSAIEMANLFKSLR

SEQ ID NO: 4493 - protein, 1365 aa, Artificial Sequence
  SARS-CoV-2/pangolin/Guangxi/P5E/2017__EPI_ISL_410541 spike protein (1-1205)(A966C_R989C) LumSynth construct
MFVFLFVLPLVSSQCVNLTTRTGIPPGYTNSSTRGVYYPDKVFRSSILHLTQDLFLPFFSNVTWFNTITYQGGSKKFDNPVLPFNDGVYFASTEKSNIIRGWIFGTTLDARTQSLLIVNNATNVVIKVCEFQFCTDPFLGVYYHNNNKTWVENEFRVYSSANNCTFEYISQPFLMDLEGKQGNFKNLREFVFKNVDGYFKIYSKHTPIDLVRDLPRGFAALEPLVDLPIGINITRFQTLLALHRSYLTPGKLESGWTTGAAAYYVGYLQQRTFLLSYNQNGTITDAVDCSLDPLSETKCTLKSLTVEKGIYQTSNFRVQPTISIVRFPNITNLCPFGEVFNASKFASVYAWNRKRISNCVADYSVLYNSTSFSTFKCYGVSPTKLNDLCFTNVYADSFVVKGDEVRQIAPGQTGVIADYNYKLPDDFTGCVIAWNSVKQDALTGDNYGYLYRLFRKSKLKPFERDISTEIYQAGSTPCNGQVGLNCYYPLERYGFHPTTGVNYQPFRVVVLSFELLNGPATVCGPKLSTTLVKDKCVNFNFNGLTGTGVLTTSKKQFLPFQQFGRDISDTTDAVRDPQTLEILDITPCSFGGVSVITPGTNTSNQVAVLYQDVNCTEVPMAIHAEQLTPAWRVYSAGANVFQTRAGCLVGAEHVNNSYECDIPVGAGICASYHSMSSFRSVNQRSIIAYTMSLGAENSVAYSNNSIAIPTNFTISVTTEILPVSMTKTSVDCTMYICGDSIECSNLLLQYGSFCTQLNRALTGIAVEQDKNTQEVFAQVKQIYKTPPIKDFGGFNFSQILPDPSKPSKRSFIEDLLFNKVTLADAGFIKQYGDCLGDIAARDLICAQKFNGLTVLPPLLTDEMIAQYTSALLAGTITSGWTFGAGAALQIPFAMQMAYRFNGIGVTQNVLYENQKLIANQFNSAIGKIQDSLSSTASALGKLQDVVNQNAQALNTLVKQLSSNFGCISSVLNDILSRLDKVEAEVQIDCLITGRLQSLQTYVTQQLIRAAEIRASANLAATKMSECVLGQSKRVDFCGKGYHLMSFPQSAPHGVVFLHVTYVPAQEKNFTTAPAICHEGKAHFPREGVFVSNGTHWFITQRNFYEPQIITTDNTFVSGSCDVVIGIVNNTVYDPLQPELDSFKEELDKYFKNHTSPDVDLGDISGINASVVNIQKEIDRLNEVAKNLNESLIDLQELGKYEQYIKGGGSGGGQIYEGKLTAEGLRFGIVASRFNHALVDRLVEGAIDAIVRHGGREEDITLVRVPGSWEIPVAAGELARKEDIDAVIAIGVLIRGATPHFDYIASEVSKGLADLSLELRKPITFGVITADTLEQAIERAGTKHGNKGWEAALSAIEMANLFKSLR

SEQ ID NO: 4494 - protein, 1363 aa, Artificial Sequence
  SARS-CoV-2/pangolin/Guangxi/P1E/2017__EPI_ISL_410539 spike protein (1-1203)(A964C_R987C) LumSynth construct
MFVFLFVLPLVSSQCVNLTTRTGIQPGYTNSSTRGVYYPDKVFRSSILHLTQDLFLPFFSNVTWFNTINYQGGFKKFDNPVLPFNDGVYFASTEKSNIIRGWIFGTTLDARTQSLLIVNNATNVVIKVCEFQFCTDPFLGVYYHNNNKTWVENEFRVYSSANNCTFEYISQPFLMDLEGKQGNFKNLREFVFKNVDGYFKIYSKHTPIDLVRDLPRGFAALEPLVDLPIGINITRFQTLLALHRSYLTPGKLESGWTTGAAAYYVGYLQQRTFLLSYNQNGTITDAVDCSLDPLSETKCTLKSLTVEKGIYQTSNFRVQPTISIVRFPNITNLCPFGEVFNASKFASVYAWNRKRISNCVADYSVLYNSTSFSTFKCYGVSPTKLNDLCFTNVYADSFVVKGDEVRQIAPGQTGVIADYNYKLPDDFTGCVIAWNSVKQDALTGGNYLYRLFRKSKLKPFERDISTEIYQAGSTPCNGQVGLNCYYPLERYGFHPTTGVNYQPFRVVVLSFELLNGPATVCGPKLSTTLVKDKCVNFNFNGLTGTGVLTTSKKQFLPFQQFGRDISDTTDAVRDPQTLEILDITPCSFGGVSVITPGTNTSNQVAVLYQDVNCTEVPMAIHAEQLTPAWRVYSAGANVFQTRAGCLVGAEHVNNSYECDIPVGAGICASYHSMSSLRSVNQRSIIAYTMSLGAENSVAYSNNSIAIPTNFTISVTTEILPVSMTKTSVDCTMYICGDSIECSNLLLQYGSFCTQLNRALTGIAVEQDKNTQEVFAQVKQIYKTPPIKDFGGFNFSQILPDPSKPSKRSFIEDLLFNKVTLADAGFIKQYGDCLGDIAARDLICAQKFNGLTVLPPLLTDEMIAQYTSALLAGTITSGWTFGAGAALQIPFAMQMAYRFNGIGVTQNVLYENQKLIANQFNSAIGKIQDSLSSTASALGKLQDVVNQNAQALNTLVKQLSSNFGCISSVLNDILSRLDKVEAEVQIDCLITGRLQSLQTYVTQQLIRAAEIRASANLAATKMSECVLGQSKRVDFCGKGYHLMSFPQSAPHGVVFLHVTYVPAQEKNFTTAPAICHEGKAHFPREGVFVSNGTHWFITQRNFYEPQIITTDNTFVSGSCDVVIGIVNNTVYDPLQPELDSFKEELDKYFKNHTSPDVDLGDISGINASVVNIQKEIDRLNEVAKNLNESLIDLQELGKYEQYIKGGGSGGGQIYEGKLTAEGLRFGIVASRFNHALVDRLVEGAIDAIVRHGGREEDITLVRVPGSWEIPVAAGELARKEDIDAVIAIGVLIRGATPHFDYIASEVSKGLADLSLELRKPITFGVITADTLEQAIERAGTKHGNKGWEAALSAIEMANLFKSLR

SEQ ID NO: 4495 - protein, 1371 aa, Artificial Sequence
  SARS-CoV-2/Wuhan/WIV05/2019__EPI_ISL_402128 spike protein (1-1211)(A890C_V1040C) LumSynth construct
MFVFLVLLPLVSSQCVNLTTRTQLPPAYTNSFTRGVYYPDKVFRSSVLHSTQDLFLPFFSNVTWFHAIHVSGTNGTKRFDNPVLPFNDGVYFASTEKSNIIRGWIFGTTLDSKTQSLLIVNNATNVVIKVCEFQFCNDPFLGVYYHKNNKSWMESEFRVYSSANNCTFEYVSQPFLMDLEGKQGNFKNLREFVFKNIDGYFKIYSKHTPINLVRDLPQGFSALEPLVDLPIGINITRFQTLLALHRSYLTPGDSSSGWTAGAAAYYVGYLQPRTFLLKYNENGTITDAVDCALDPLSETKCTLKSFTVEKGIYQTSNFRVQPTESIVRFPNITNLCPFGEVFNATRFASVYAWNRKRISNCVADYSVLYNSASFSTFKCYGVSPTKLNDLCFTNVYADSFVIRGDEVRQIAPGQTGKIADYNYKLPDDFTGCVIAWNSNNLDSKVGGNYNYLYRLFRKSNLKPFERDISTEIYQAGSTPCNGVEGFNCYFPLQSYGFQPTNGVGYQPYRVVVLSFELLHAPATVCGPKKSTNLVKNKCVNFNFNGLTGTGVLTESNKKFLPFQQFGRDIADTTDAVRDPQTLEILDITPCSFGGVSVITPGTNTSNQVAVLYQDVNCTEVPVAIHADQLTPTWRVYSTGSNVFQTRAGCLIGAEHVNNSYECDIPIGAGICASYQTQTNSPRRARSVASQSIIAYTMSLGAENSVAYSNNSIAIPTNFTISVTTEILPVSMTKTSVDCTMYICGDSTECSNLLLQYGSFCTQLNRALTGIAVEQDKNTQEVFAQVKQIYKTPPIKDFGGFNFSQILPDPSKPSKRSFIEDLLFNKVTLADAGFIKQYGDCLGDIAARDLICAQKFNGLTVLPPLLTDEMIAQYTSALLAGTITSGWTFGCGAALQIPFAMQMAYRFNGIGVTQNVLYENQKLIANQFNSAIGKIQDSLSSTASALGKLQDVVNQNAQALNTLVKQLSSNFGAISSVLNDILSRLDKVEAEVQIDRLITGRLQSLQTYVTQQLIRAAEIRASANLAATKMSECVLGQSKRCDFCGKGYHLMSFPQSAPHGVVFLHVTYVPAQEKNFTTAPAICHDGKAHFPREGVFVSNGTHWFVTQRNFYEPQIITTDNTFVSGNCDVVIGIVNNTVYDPLQPELDSFKEELDKYFKNHTSPDVDLGDISGINASVVNIQKEIDRLNEVAKNLNESLIDLQELGKYEQYIKGGGSGGGQIYEGKLTAEGLRFGIVASRFNHALVDRLVEGAIDAIVRHGGREEDITLVRVPGSWEIPVAAGELARKEDIDAVIAIGVLIRGATPHFDYIASEVSKGLADLSLELRKPITFGVITADTLEQAIERAGTKHGNKGWEAALSAIEMANLFKSLR

SEQ ID NO: 4496 - protein, 1367 aa, Artificial Sequence; identical to SEQ ID NO: 4228
  SARS-CoV-2/bat/Yunnan/RaTG13/2013__EPI_ISL_402131 spike protein (1-1207)(A886C_V1036C) LumSynth construct

SEQ ID NO: 4497 - protein, 1371 aa, Artificial Sequence; identical to SEQ ID NO: 4229
  SARS-CoV-2/Wuhan/HBCDC-HB-01/2019__EPI_ISL_402132 spike protein (1-1211)(A890C_V1040C) LumSynth construct

SEQ ID NO: 4498 - protein, 1371 aa, Artificial Sequence; identical to SEQ ID NO: 4230
  SARS-CoV-2/Guangdong/20SF028/2020__EPI_ISL_403936 spike protein (1-1211)(A890C_V1040C) LumSynth construct

SEQ ID NO: 4499 - protein, 1371 aa, Artificial Sequence; identical to SEQ ID NO: 4231
  SARS-CoV-2/Shenzhen/SZTH-001/2020__EPI_ISL_406592 spike protein (1-1211)(A890C_V1040C) LumSynth construct

SEQ ID NO: 4500 - protein, 1371 aa, Artificial Sequence; identical to SEQ ID NO: 4232
  SARS-CoV-2/Shenzhen/SZTH-004/2020__EPI_ISL_406595 spike protein (1-1211)(A890C_V1040C) LumSynth construct

SEQ ID NO: 4501 - protein, 1371 aa, Artificial Sequence; identical to SEQ ID NO: 4233
  SARS-CoV-2/France/IDF0372/2020__EPI_ISL_406596 spike protein (1-1211)(A890C_V1040C) LumSynth construct

SEQ ID NO: 4502 - protein, 1371 aa, Artificial Sequence; identical to SEQ ID NO: 4234
  SARS-CoV-2/Australia/VIC01/2020__EPI_ISL_406844 spike protein (1-1211)(A890C_V1040C) LumSynth construct

SEQ ID NO: 4503 - protein, 1371 aa, Artificial Sequence; identical to SEQ ID NO: 4235
  SARS-CoV-2/Germany/BavPat1/2020__EPI_ISL_406862 spike protein (1-1211)(A890C_V1040C) LumSynth construct

SEQ ID NO: 4504 - protein, 1371 aa, Artificial Sequence; identical to SEQ ID NO: 4236
  SARS-CoV-2/Wuhan/HBCDC-HB-02/2020__EPI_ISL_412978 spike protein (1-1211)(A890C_V1040C) LumSynth construct

SEQ ID NO: 4505 - protein, 1371 aa, Artificial Sequence; identical to SEQ ID NO: 4237
  SARS-CoV-2/Australia/QLD02/2020__EPI_ISL_407896 spike protein (1-1211)(A890C_V1040C) LumSynth construct

SEQ ID NO: 4506 - protein, 1371 aa, Artificial Sequence; identical to SEQ ID NO: 4238
  SARS-CoV-2/India/1-31/2020__EPI_ISL_413523 spike protein (1-1211)(A890C_V1040C) LumSynth construct

SEQ ID NO: 4507 - protein, 1371 aa, Artificial Sequence; identical to SEQ ID NO: 4239
  SARS-CoV-2/Guangdong/GD2020087-P0008/2020__EPI_ISL_413863 spike protein (1-1211)(A890C_V1040C) LumSynth construct

SEQ ID NO: 4508 - protein, 1371 aa, Artificial Sequence; identical to SEQ ID NO: 4240
  SARS-CoV-2/Sweden/01/2020__EPI_ISL_411951 spike protein (1-1211)(A890C_V1040C) LumSynth construct

SEQ ID NO: 4509 - protein, 1371 aa, Artificial Sequence; identical to SEQ ID NO: 4241
  SARS-CoV-2/Tianmen/HBCDC-HB-07/2020__EPI_ISL_412983 spike protein (1-1211)(A890C_V1040C) LumSynth construct

SEQ ID NO: 4510 - protein, 1371 aa, Artificial Sequence; identical to SEQ ID NO: 4242
  SARS-CoV-2/Hong Kong/case42_VM20002493/2020__EPI_ISL_414527 spike protein (1-1211)(A890C_V1040C) LumSynth construct

SEQ ID NO: 4511 - protein, 1371 aa, Artificial Sequence; identical to SEQ ID NO: 4243
  SARS-CoV-2/USA/CruiseA-23/2020__EPI_ISL_414482 spike protein (1-1211)(A890C_V1040C) LumSynth construct

SEQ ID NO: 4512 - protein, 1371 aa, Artificial Sequence; identical to SEQ ID NO: 4244
  SARS-CoV-2/Hong Kong/case85_VM20002868/2020__EPI_ISL_414519 spike protein (1-1211)(A890C_V1040C) LumSynth construct

SEQ ID NO: 4513 - protein, 1371 aa, Artificial Sequence; identical to SEQ ID NO: 4235
  SARS-CoV-2/England/200990660/2020__EPI_ISL_414523 spike protein (1-1211)(A890C_V1040C) LumSynth construct

SEQ ID NO: 4514 - protein, 1371 aa, Artificial Sequence; identical to SEQ ID NO: 4246
  SARS-CoV-2/Australia/NSW09/2020__EPI_ISL_413595 spike protein (1-1211)(A890C_V1040C) LumSynth construct

SEQ ID NO: 4515 - protein, 1371 aa, Artificial Sequence; identical to SEQ ID NO: 4227
  SARS-CoV-2/Australia/NSW10/2020__EPI_ISL_413596 spike protein (1-1211)(A890C_V1040C) LumSynth construct

SEQ ID NO: 4516 - protein, 1371 aa, Artificial Sequence; identical to SEQ ID NO: 4248
  SARS-CoV-2/Switzerland/1000477797/2020__EPI_ISL_413023 spike protein (1-1211)(A890C_V1040C) LumSynth construct

SEQ ID NO: 4517 - protein, 1371 aa, Artificial Sequence; identical to SEQ ID NO: 4249
  SARS-CoV-2/Belgium/BA-02291/2020__EPI_ISL_415159 spike protein (1-1211)(A890C_V1040C) LumSynth construct

SEQ ID NO: 4518 - protein, 1371 aa, Artificial Sequence; identical to SEQ ID NO: 4250
  SARS-CoV-2/USA/WA8-UW5/2020__EPI_ISL_413486 spike protein (1-1211)(A890C_V1040C) LumSynth construct

SEQ ID NO: 4519 - protein, 1371 aa, Artificial Sequence; identical to SEQ ID NO: 4251
  SARS-CoV-2/England/20102000506/2020__EPI_ISL_415147 spike protein (1-1211)(A890C_V1040C) LumSynth construct

SEQ ID NO: 4520 - protein, 1371 aa, Artificial Sequence; identical to SEQ ID NO: 4252
  SARS-CoV-2/Belgium/VAG-03013/2020__EPI_ISL_415155 spike protein (1-1211)(A890C_V1040C) LumSynth construct

SEQ ID NO: 4521 - protein, 1371 aa, Artificial Sequence; identical to SEQ ID NO: 4253
  SARS-CoV-2/Belgium/BC-03016/2020__EPI_ISL_415157 spike protein (1-1211)(A890C_V1040C) LumSynth construct

SEQ ID NO: 4522 - protein, 1371 aa, Artificial Sequence; identical to SEQ ID NO: 4254
  SARS-CoV-2/Germany/BavPat3/2020__EPI_ISL_414521 spike protein (1-1211)(A890C_V1040C) LumSynth construct

SEQ ID NO: 4523 - protein, 1371 aa, Artificial Sequence; identical to SEQ ID NO: 4255
  SARS-CoV-2/France/HF1805/2020__EPI_ISL_414628 spike protein (1-1211)(A890C_V1040C) LumSynth construct

SEQ ID NO: 4524 - protein, 1371 aa, Artificial Sequence; identical to SEQ ID NO: 4256
  SARS-CoV-2/Netherlands/ZuidHolland_9/2020__EPI_ISL_414445 spike protein (1-1211)(A890C_V1040C) LumSynth construct

SEQ ID NO: 4525 - protein, 1371 aa, Artificial Sequence; identical to SEQ ID NO: 4257
  SARS-CoV-2/Finland/FIN03032020A/2020__EPI_ISL_413602 spike protein (1-1211)(A890C_V1040C) LumSynth construct

SEQ ID NO: 4526 - protein, 1371 aa, Artificial Sequence; identical to SEQ ID NO: 4258
  SARS-CoV-2/France/GE1977/2020__EPI_ISL_414632 spike protein (1-1211)(A890C_V1040C) LumSynth construct

SEQ ID NO: 4527 - protein, 1371 aa, Artificial Sequence; identical to SEQ ID NO: 4259
  SARS-CoV-2/Finland/FIN-313/2020__EPI_ISL_414641 spike protein (1-1211)(A890C_V1040C) LumSynth construct

SEQ ID NO: 4528 - protein, 1371 aa, Artificial Sequence; identical to SEQ ID NO: 4260
  SARS-CoV-2/Netherlands/ZuidHolland_2/2020__EPI_ISL_414556 spike protein (1-1211)(A890C_V1040C) LumSynth construct

SEQ ID NO: 4529 - protein, 1371 aa, Artificial Sequence; identical to SEQ ID NO: 4261
  SARS-CoV-2/USA/WA-UW31/2020__EPI_ISL_414618 spike protein (1-1211)(A890C_V1040C) LumSynth construct

SEQ ID NO: 4530 - protein, 1371 aa, Artificial Sequence; identical to SEQ ID NO: 4262
  SARS-CoV-2/South Korea/SNU01/2020__EPI_ISL_411929 spike protein (1-1211)(A890C_V1040C) LumSynth construct

SEQ ID NO: 4531 - protein, 1371 aa, Artificial Sequence; identical to SEQ ID NO: 4263
  SARS-CoV-2/China/WF0004/2020__EPI_ISL_413694 spike protein (1-1211)(A890C_V1040C) LumSynth construct

SEQ ID NO: 4532 - protein, 1371 aa, Artificial Sequence; identical to SEQ ID NO: 4264
  SARS-CoV-2/China/WF0028/2020__EPI_ISL_413791 spike protein (1-1211)(A890C_V1040C) LumSynth construct

SEQ ID NO: 4533 - protein, 1371 aa, Artificial Sequence; identical to SEQ ID NO: 4265
  SARS-CoV-2/2019-nCoV/USA-CruiseA-18/2020__MT159716.1 spike protein (1-1211)(A890C_V1040C) LumSynth construct

SEQ ID NO: 4534 - protein, 1371 aa, Artificial Sequence; identical to SEQ ID NO: 4266
  SARS-CoV-2/SARS-CoV-2/Yunnan-01/human/2020/CHN__MT049951.1 spike protein (1-1211)(A890C_V1040C) LumSynth construct

SEQ ID NO: 4535 - protein, 1371 aa, Artificial Sequence; identical to SEQ ID NO: 4267
  SARS-CoV-2/USA/WA-UW292/2020__EPI_ISL_418077 spike protein (1-1211)(A890C_V1040C) LumSynth construct

SEQ ID NO: 4536 - protein, 1371 aa, Artificial Sequence; identical to SEQ ID NO: 4268
  SARS-CoV-2/Iceland/192/2020__EPI_ISL_417819 spike protein (1-1211)(A890C_V1040C) LumSynth construct

SEQ ID NO: 4537 - protein, 1371 aa, Artificial Sequence; identical to SEQ ID NO: 4269
  SARS-CoV-2/Belgium/ULG-6939/2020__EPI_ISL_417020 spike protein (1-1211)(A890C_V1040C) LumSynth construct

SEQ ID NO: 4538 - protein, 1371 aa, Artificial Sequence; identical to SEQ ID NO: 4270
  SARS-CoV-2/France/HF2496/2020__EPI_ISL_418231 spike protein (1-1211)(A890C_V1040C) LumSynth construct

SEQ ID NO: 4539 - protein, 1371 aa, Artificial Sequence; identical to SEQ ID NO: 4271
  SARS-CoV-2/USA/WA-UW291/2020__EPI_ISL_418076 spike protein (1-1211)(A890C_V1040C) LumSynth construct

SEQ ID NO: 4540 - protein, 1371 aa, Artificial Sequence; identical to SEQ ID NO: 4235
  SARS-CoV-2/Portugal/PT0034/2020__EPI_ISL_418019 spike protein (1-1211)(A890C_V1040C) LumSynth construct

SEQ ID NO: 4541 - protein, 1371 aa, Artificial Sequence; identical to SEQ ID NO: 4273
  SARS-CoV-2/Iceland/202/2020__EPI_ISL_417750 spike protein (1-1211)(A890C_V1040C) LumSynth construct

SEQ ID NO: 4542 - protein, 1371 aa, Artificial Sequence; identical to SEQ ID NO: 4274
  SARS-CoV-2/USA/WA-UW261/2020__EPI_ISL_418046 spike protein (1-1211)(A890C_V1040C) LumSynth construct

SEQ ID NO: 4543 - protein, 1371 aa, Artificial Sequence; identical to SEQ ID NO: 4275
  SARS-CoV-2/Portugal/PT0035/2020__EPI_ISL_418020 spike protein (1-1211)(A890C_V1040C) LumSynth construct

SEQ ID NO: 4544 - protein, 1371 aa, Artificial Sequence; identical to SEQ ID NO: 4276
  SARS-CoV-2/USA/NY-NYUMC7/2020__EPI_ISL_418192 spike protein (1-1211)(A890C_V1040C) LumSynth construct

SEQ ID NO: 4545 - protein, 1371 aa, Artificial Sequence; identical to SEQ ID NO: 4277
  SARS-CoV-2/Iceland/189/2020__EPI_ISL_417709 spike protein (1-1211)(A890C_V1040C) LumSynth construct

SEQ ID NO: 4546 - protein, 1371 aa, Artificial Sequence; identical to SEQ ID NO: 4278
  SARS-CoV-2/Australia/NSW56/2020__EPI_ISL_417408 spike protein (1-1211)(A890C_V1040C) LumSynth construct

SEQ ID NO: 4547 - protein, 1371 aa, Artificial Sequence; identical to SEQ ID NO: 4279
  SARS-CoV-2/Iceland/280/2020__EPI_ISL_417608 spike protein (1-1211)(A890C_V1040C) LumSynth construct

SEQ ID NO: 4548 - protein, 1371 aa, Artificial Sequence; identical to SEQ ID NO: 4235
  SARS-CoV-2/Iceland/247/2020__EPI_ISL_417575 spike protein (1-1211)(A890C_V1040C) LumSynth construct

SEQ ID NO: 4549 - protein, 1371 aa, Artificial Sequence; identical to SEQ ID NO: 4281
  SARS-CoV-2/Iceland/238/2020__EPI_ISL_417566 spike protein (1-1211)(A890C_V1040C) LumSynth construct

SEQ ID NO: 4550 - protein, 1371 aa, Artificial Sequence; identical to SEQ ID NO: 4282
  SARS-CoV-2/Greece/16/2020__EPI_ISL_418265 spike protein (1-1211)(A890C_V1040C) LumSynth construct

SEQ ID NO: 4551 - protein, 1371 aa, Artificial Sequence; identical to SEQ ID NO: 4283
  SARS-CoV-2/Iceland/319/2020__EPI_ISL_417648 spike protein (1-1211)(A890C_V1040C) LumSynth construct

SEQ ID NO: 4552 - protein, 1371 aa, Artificial Sequence; identical to SEQ ID NO: 4284
  SARS-CoV-2/Congo/94/2020__EPI_ISL_417947 spike protein (1-1211)(A890C_V1040C) LumSynth construct

SEQ ID NO: 4553 - protein, 1371 aa, Artificial Sequence; identical to SEQ ID NO: 4285
  SARS-CoV-2/Congo/158/2020__EPI_ISL_417950 spike protein (1-1211)(A890C_V1040C) LumSynth construct

SEQ ID NO: 4554 - protein, 1371 aa, Artificial Sequence; identical to SEQ ID NO: 4286
  SARS-CoV-2/USA/UT-00034/2020__EPI_ISL_417977 spike protein (1-1211)(A890C_V1040C) LumSynth construct

SEQ ID NO: 4555 - protein, 1371 aa, Artificial Sequence; identical to SEQ ID NO: 4287
  SARS-CoV-2/USA/UT-00033/2020__EPI_ISL_417976 spike protein (1-1211)(A890C_V1040C) LumSynth construct

SEQ ID NO: 4556 - protein, 1371 aa, Artificial Sequence; identical to SEQ ID NO: 4288
  SARS-CoV-2/USA/WI-13/2020__EPI_ISL_417516 spike protein (1-1211)(A890C_V1040C) LumSynth construct

SEQ ID NO: 4557 - protein, 1370 aa, Artificial Sequence; identical to SEQ ID NO: 4289
  SARS-CoV-2/India/1-27/2020__EPI_ISL_413522 spike protein (1-1210)(A889C_V1039C) LumSynth construct

SEQ ID NO: 4558 - protein, 1365 aa, Artificial Sequence; identical to SEQ ID NO: 4290
  SARS-CoV-2/pangolin/Guangxi/P4L/2017__EPI_ISL_410538 spike protein (1-1205)(A884C_V1034C) LumSynth construct

SEQ ID NO: 4559 - protein, 1365 aa, Artificial Sequence; identical to SEQ ID NO: 4291
  SARS-CoV-2/pangolin/Guangxi/P5L/2017__EPI_ISL_410540 spike protein (1-1205)(A884C_V1034C) LumSynth construct

SEQ ID NO: 4560 - protein, 1365 aa, Artificial Sequence; identical to SEQ ID NO: 4292
  SARS-CoV-2/pangolin/Guangxi/P5E/2017__EPI_ISL_410541 spike protein (1-1205)(A884C_V1034C) LumSynth construct

SEQ ID NO: 4561 - protein, 1363 aa, Artificial Sequence; identical to SEQ ID NO: 4293
  SARS-CoV-2/pangolin/Guangxi/P1E/2017__EPI_ISL_410539 spike protein (1-1203)(A882C_V1032C) LumSynth construct

SEQ ID NO: 4562 - protein, 1371 aa, Artificial Sequence
  SARS-CoV-2/Wuhan/WIV05/2019__EPI_ISL_402128 spike protein (1-1211)(T874C_S1055C) LumSynth construct
MFVFLVLLPLVSSQCVNLTTRTQLPPAYTNSFTRGVYYPDKVFRSSVLHSTQDLFLPFFSNVTWFHAIHVSGTNGTKRFDNPVLPFNDGVYFASTEKSNIIRGWIFGTTLDSKTQSLLIVNNATNVVIKVCEFQFCNDPFLGVYYHKNNKSWMESEFRVYSSANNCTFEYVSQPFLMDLEGKQGNFKNLREFVFKNIDGYFKIYSKHTPINLVRDLPQGFSALEPLVDLPIGINITRFQTLLALHRSYLTPGDSSSGWTAGAAAYYVGYLQPRTFLLKYNENGTITDAVDCALDPLSETKCTLKSFTVEKGIYQTSNFRVQPTESIVRFPNITNLCPFGEVFNATRFASVYAWNRKRISNCVADYSVLYNSASFSTFKCYGVSPTKLNDLCFTNVYADSFVIRGDEVRQIAPGQTGKIADYNYKLPDDFTGCVIAWNSNNLDSKVGGNYNYLYRLFRKSNLKPFERDISTEIYQAGSTPCNGVEGFNCYFPLQSYGFQPTNGVGYQPYRVVVLSFELLHAPATVCGPKKSTNLVKNKCVNFNFNGLTGTGVLTESNKKFLPFQQFGRDIADTTDAVRDPQTLEILDITPCSFGGVSVITPGTNTSNQVAVLYQDVNCTEVPVAIHADQLTPTWRVYSTGSNVFQTRAGCLIGAEHVNNSYECDIPIGAGICASYQTQTNSPRRARSVASQSIIAYTMSLGAENSVAYSNNSIAIPTNFTISVTTEILPVSMTKTSVDCTMYICGDSTECSNLLLQYGSFCTQLNRALTGIAVEQDKNTQEVFAQVKQIYKTPPIKDFGGFNFSQILPDPSKPSKRSFIEDLLFNKVTLADAGFIKQYGDCLGDIAARDLICAQKFNGLTVLPPLLTDEMIAQYCSALLAGTITSGWTFGAGAALQIPFAMQMAYRFNGIGVTQNVLYENQKLIANQFNSAIGKIQDSLSSTASALGKLQDVVNQNAQALNTLVKQLSSNFGAISSVLNDILSRLDKVEAEVQIDRLITGRLQSLQTYVTQQLIRAAEIRASANLAATKMSECVLGQSKRVDFCGKGYHLMSFPQCAPHGVVFLHVTYVPAQEKNFTTAPAICHDGKAHFPREGVFVSNGTHWFVTQRNFYEPQIITTDNTFVSGNCDVVIGIVNNTVYDPLQPELDSFKEELDKYFKNHTSPDVDLGDISGINASVVNIQKEIDRLNEVAKNLNESLIDLQELGKYEQYIKGGGSGGGQIYEGKLTAEGLRFGIVASRFNHALVDRLVEGAIDAIVRHGGREEDITLVRVPGSWEIPVAAGELARKEDIDAVIAIGVLIRGATPHFDYIASEVSKGLADLSLELRKPITFGVITADTLEQAIERAGTKHGNKGWEAALSAIEMANLFKSLR

SEQ ID NO: 4563 - protein, 1367 aa, Artificial Sequence
  SARS-CoV-2/bat/Yunnan/RaTG13/2013__EPI_ISL_402131 spike protein (1-1207)(T870C_S1051C) LumSynth construct
MFVFLVLLPLVSSQCVNLTTRTQLPPAYTNSSTRGVYYPDKVFRSSVLHLTQDLFLPFFSNVTWFHAIHVSGTNGIKRFDNPVLPFNDGVYFASTEKSNIIRGWIFGTTLDSKTQSLLIVNNATNVVIKVCEFQFCNDPFLGVYYHKNNKSWMESEFRVYSSANNCTFEYVSQPFLMDLEGKQGNFKNLREFVFKNIDGYFKIYSKHTPINLVRDLPPGFSALEPLVDLPIGINITRFQTLLALHRSYLTPGDSSSGWTAGAAAYYVGYLQPRTFLLKYNENGTITDAVDCALDPLSETKCTLKSFTVEKGIYQTSNFRVQPTDSIVRFPNITNLCPFGEVFNATTFASVYAWNRKRISNCVADYSVLYNSTSFSTFKCYGVSPTKLNDLCFTNVYADSFVITGDEVRQIAPGQTGKIADYNYKLPDDFTGCVIAWNSKHIDAKEGGNFNYLYRLFRKANLKPFERDISTEIYQAGSKPCNGQTGLNCYYPLYRYGFYPTDGVGHQPYRVVVLSFELLNAPATVCGPKKSTNLVKNKCVNFNFNGLTGTGVLTESNKKFLPFQQFGRDIADTTDAVRDPQTLEILDITPCSFGGVSVITPGTNASNQVAVLYQDVNCTEVPVAIHADQLTPTWRVYSTGSNVFQTRAGCLIGAEHVNNSYECDIPIGAGICASYQTQTNSRSVASQSIIAYTMSLGAENSVAYSNNSIAIPTNFTISVTTEILPVSMTKTSVDCTMYICGDSTECSNLLLQYGSFCTQLNRALTGIAVEQDKNTQEVFAQVKQIYKTPPIKDFGGFNFSQILPDPSKPSKRSFIEDLLFNKVTLADAGFIKQYGDCLGDIAARDLICAQKFNGLTVLPPLLTDEMIAQYCSALLAGTITSGWTFGAGAALQIPFAMQMAYRFNGIGVTQNVLYENQKLIANQFNSAIGKIQDSLSSTASALGKLQDVVNQNAQALNTLVKQLSSNFGAISSVLNDILSRLDKVEAEVQIDRLITGRLQSLQTYVTQQLIRAAEIRASANLAATKMSECVLGQSKRVDFCGKGYHLMSFPQCAPHGVVFLHVTYVPAQEKNFTTAPAICHDGKAHFPREGVFVSNGTHWFVTQRNFYEPQIITTDNTFVSGSCDVVIGIVNNTVYDPLQPELDSFKEELDKYFKNHTSPDVDLGDISGINASVVNIQKEIDRLNEVAKNLNESLIDLQELGKYEQYIKGGGSGGGQIYEGKLTAEGLRFGIVASRFNHALVDRLVEGAIDAIVRHGGREEDITLVRVPGSWEIPVAAGELARKEDIDAVIAIGVLIRGATPHFDYIASEVSKGLADLSLELRKPITFGVITADTLEQAIERAGTKHGNKGWEAALSAIEMANLFKSLR

SEQ ID NO: 4564 - protein, 1371 aa, Artificial Sequence
  SARS-CoV-2/Wuhan/HBCDC-HB-01/2019__EPI_ISL_402132 spike protein (1-1211)(T874C_S1055C) LumSynth construct
MFVFLVLLPLVSSQCVNLTTRTQLPPAYTNSITRGVYYPDKVFRSSVLHSTQDLFLPFFSNVTWFHAIHVSGTNGTKRFDNPVLPFNDGVYFASTEKSNIIRGWIFGTTLDSKTQSLLIVNNATNVVIKVCEFQFCNDPFLGVYYHKNNKSWMESEFRVYSSANNCTFEYVSQPFLMDLEGKQGNFKNLREFVFKNIDGYFKIYSKHTPINLVRDLPQGFSALEPLVDLPIGINITRFQTLLALHRSYLTPGDSSSGWTAGAAAYYVGYLQPRTFLLKYNENGTITDAVDCALDPLSETKCTLKSFTVEKGIYQTSNFRVQPTESIVRFPNITNLCPFGEVFNATRFASVYAWNRKRISNCVADYSVLYNSASFSTFKCYGVSPTKLNDLCFTNVYADSFVIRGDEVRQIAPGQTGKIADYNYKLPDDFTGCVIAWNSNNLDSKVGGNYNYLYRLFRKSNLKPFERDISTEIYQAGSTPCNGVEGFNCYFPLQSYGFQPTNGVGYQPYRVVVLSFELLHAPATVCGPKKSTNLVKNKCVNFNFNGLTGTGVLTESNKKFLPFQQFGRDIADTTDAVRDPQTLEILDITPCSFGGVSVITPGTNTSNQVAVLYQDVNCTEVPVAIHADQLTPTWRVYSTGSNVFQTRAGCLIGAEHVNNSYECDIPIGAGICASYQTQTNSPRRARSVASQSIIAYTMSLGAENSVAYSNNSIAIPTNFTISVTTEILPVSMTKTSVDCTMYICGDSTECSNLLLQYGSFCTQLNRALTGIAVEQDKNTQEVFAQVKQIYKTPPIKDFGGFNFSQILPDPSKPSKRSFIEDLLFNKVTLADAGFIKQYGDCLGDIAARDLICAQKFNGLTVLPPLLTDEMIAQYCSALLAGTITSGWTFGAGAALQIPFAMQMAYRFNGIGVTQNVLYENQKLIANQFNSAIGKIQDSLSSTASALGKLQDVVNQNAQALNTLVKQLSSNFGAISSVLNDILSRLDKVEAEVQIDRLITGRLQSLQTYVTQQLIRAAEIRASANLAATKMSECVLGQSKRVDFCGKGYHLMSFPQCAPHGVVFLHVTYVPAQEKNFTTAPAICHDGKAHFPREGVFVSNGTHWFVTQRNFYEPQIITTDNTFVSGNCDVVIGIVNNTVYDPLQPELDSFKEELDKYFKNHTSPDVDLGDISGINASVVNIQKEIDRLNEVAKNLNESLIDLQELGKYEQYIKGGGSGGGQIYEGKLTAEGLRFGIVASRFNHALVDRLVEGAIDAIVRHGGREEDITLVRVPGSWEIPVAAGELARKEDIDAVIAIGVLIRGATPHFDYIASEVSKGLADLSLELRKPITFGVITADTLEQAIERAGTKHGNKGWEAALSAIEMANLFKSLR

SEQ ID NO: 4565 - protein, 1371 aa, Artificial Sequence
  SARS-CoV-2/Guangdong/20SF028/2020__EPI_ISL_403936 spike protein (1-1211)(T874C_S1055C) LumSynth construct
MFVFLVLLPLVSSQCVNLTTRTQLPPAYTNSFTRGVYYPDKVFRSSVLYSTQDLFLPFFSNVTWFHAIHVSGTNGTKRFDNPVLPFNDGVYFASTEKSNIIRGWIFGTTLDSKTQSLLIVNNATNVVIKVCEFQFCNDPFLGVYYHKNNKSWMESEFRVYSSANNCTFEYVSQPFLMDLEGKQGNFKNLREFVFKNIDGYFKIYSKHTPINLVRDLPQGFSALEPLVDLPIGINITRFQTLLALHRSYLTPGDSSSGWTAGAAAYYVGYLQPRTFLLKYNENGTITDAVDCALDPLSETKCTLKSFTVEKGIYQTSNFRVQPTESIVRFPNITNLCPFGEVFNATRFASVYAWNRKRISNCVADYSVLYNSASFSTFKCYGVSPTKLNDLCFTNVYADSFVIRGDEVRQIAPGQTGKIADYNYKLPDDFTGCVIAWNSNNLDSKVGGNYNYLYRLFRKSNLKPFERDISTEIYQAGSTPCNGVEGFNCYFPLQSYGFQPTNGVGYQPYRVVVLSFELLHAPATVCGPKKSTNLVKNKCVNFNFNGLTGTGVLTESNKKFLPFQQFGRDIADTTDAVRDPQTLEILDITPCSFGGVSVITPGTNTSNQVAVLYQDVNCTEVPVAIHADQLTPTWRVYSTGSNVFQTRAGCLIGAEHVNNSYECDIPIGAGICASYQTQTNSPRRARSVASQSIIAYTMSLGAENSVAYSNNSIAIPTNFTISVTTEILPVSMTKTSVDCTMYICGDSTECSNLLLQYGSFCTQLNRALTGIAVEQDKNTQEVFAQVKQIYKTPPIKDFGGFNFSQILPDPSKPSKRSFIEDLLFNKVTLADAGFIKQYGDCLGDIAARDLICAQKFNGLTVLPPLLTDEMIAQYCSALLAGTITSGWTFGAGAALQIPFAMQMAYRFNGIGVTQNVLYENQKLIANQFNSAIGKIQDSLSSTASALGKLQDVVNQNAQALNTLVKQLSSNFGAISSVLNDILSRLDKVEAEVQIDRLITGRLQSLQTYVTQQLIRAAEIRASANLAATKMSECVLGQSKRVDFCGKGYHLMSFPQCAPHGVVFLHVTYVPAQEKNFTTAPAICHDGKAHFPREGVFVSNGTHWFVTQRNFYEPQIITTDNTFVSGNCDVVIGIVNNTVYDPLQPELDSFKEELDKYFKNHTSPDVDLGDISGINASVVNIQKEIDRLNEVAKNLNESLIDLQELGKYEQYIKGGGSGGGQIYEGKLTAEGLRFGIVASRFNHALVDRLVEGAIDAIVRHGGREEDITLVRVPGSWEIPVAAGELARKEDIDAVIAIGVLIRGATPHFDYIASEVSKGLADLSLELRKPITFGVITADTLEQAIERAGTKHGNKGWEAALSAIEMANLFKSLR

SEQ ID NO: 4566 - protein, 1371 aa, Artificial Sequence
  SARS-CoV-2/Shenzhen/SZTH-001/2020__EPI_ISL_406592 spike protein (1-1211)(T874C_S1055C) LumSynth construct
MFVFLVLLPLVSSQCVNLTTRTQLPPAYTNSFTRGVYYPDKVFRSSVLHSTQDLFLPFFSNVTWFHAIHVSGTNGTKRFDNPVLPFNDGVYFASTEKSNIIRGWIFGTTLDSKTQSLLIVNNATNVVIKVCEFQFCNDPFLGVYYHKNNKSWMESEFRVYSSANNCTFEYVSQPFLMDLEGKQGNFKNLREFVFKNIDGYFKIYSKHTPINLVRDLPQGFSALEPLVDLPIGINITRFQTLLALHRSYLTPGDSSSGWTAGAAAYYVGYLQPRTFLLKYNENGTITDAVDCALDPLSETKCTLKSFTVEKGIYQTSNFRVQPTESIVRFPNITNLCPFGEVFNATRFASVYAWNRKRISNCVADYSVLYNSASFSTFKCYGVSPTKLNDLCFTNVYADSFVIRGDEVRQIAPGQTGKIADYNYKLPDDFTGCVIAWNSNNLDSKVGGNYNYLYRLFRKSNLKPFERDISTEIYQAGSTPCNGVEGFNCYFPLQSYGFQPTNGVGYQPYRVVVLSFELLHAPATVCGPKKSTNLVKNKCVNFNFNGLTGTGVLTESNKKFLPFQQFGRDIADTTDAVRDPQTLEILDITPCSFGGVSVITPGTNTSNQVAVLYQDVNCTEVPVAIHADQLTPTWRVYSTGSNVFQTRAGCLIGAEHVNNSYECDIPIGAGICASYQTQTNSPRRARSVASQSIIAYTMSLGAENSVAYSNNSIAIPTNFTISVTTEILPVSMTKTSVDCTMYICGDSTECSNLLLQYGSFCTQLNRALTGIAVEQDKNTQEVFAQVKQIYKTPPIKDFGGFNFSQILPDPSKPSKRSFIEDLLFNKVTLADAGFIKQYGDCLGDIAARDLICAQKFNGLTVLPPLLTDEMIAQYCSALLAGTITSGWTFGAGAALQIPFAMQMAYRFNGIGVTQNVLYENQKLIANQFNSAIGKIQDSLSSTASALGKLQDVVNQNAQALNTLVKQLSSNFGAISSVLNDILSRLDKVEAEVQIDRLITGRLQSLQTYVTQQLIRAAEIRASANLAATKMSECVLGQSKRVDFCGKGYHLMSFPQCAPHGVVFLHVTYVPAQEKNFTTAPAICHDGKAHFPREGVFVSNGTHWFVTQRNFYEPQIITTDNTFVSGNCDVLIGIVNNTVYDPLQPELDSFKEELDKYFKNHTSPDVDLGDISGINASVVNIQKEIDRLNEVAKNLNESLIDLQELGKYEQYIKGGGSGGGQIYEGKLTAEGLRFGIVASRFNHALVDRLVEGAIDAIVRHGGREEDITLVRVPGSWEIPVAAGELARKEDIDAVIAIGVLIRGATPHFDYIASEVSKGLADLSLELRKPITFGVITADTLEQAIERAGTKHGNKGWEAALSAIEMANLFKSLR

SEQ ID NO: 4567 - protein, 1371 aa, Artificial Sequence
  SARS-CoV-2/Shenzhen/SZTH-004/2020__EPI_ISL_406595 spike protein (1-1211)(T874C_S1055C) LumSynth construct
MFVFLVLLPLVSSQCVNLTTRTQLPPAYTNSFTRGVYYPDKVFRSSVLHSTQDLFLPFFSNVTWFHAIHVSGTNGTKRFDNPVLPFNDGVYFASTEKSNIIRGWIFGTTLDSKTQSLLIVNNATNVVIKVCEFQFCNDPFLGVYYHKNNKSWMESEFRVYSSANNCTFEYVSQPFLMDLEGKQGNFKNLREFVFKNIDGYFKIYSKHTPINLVRDLPQGFSALEPLVDLPIGINITRFQTLLALHRSYLTPGDSSSGWTAGAAAYYVGYLQPRTFLLKYNENGTITDAVDCALDPLSETKCTLKSFTVEKGIYQTSNFRVQPTESIVRFPNITNLCPFGEVFNATRFASVYAWDRKRISNCVAYYSVLYNSASFSTFKCYGVSPTKLNDLCFTNVYADSFVIRGDEVRQIAPGQTGKIADYNYKLPDDFTGCVIAWNSNNLDSKVGGNYNYLYRLFRKSNLKPFERDISTEIYQAGSTPCNGVEGFNCYFPLQSYGFQPTNGVGYQPYRVVVLSFELLHAPATVCGPKKSTNLVKNKCVNFNFNGLTGTGVLTESNKKFLPFQQFGRDIADTTDAVRDPQTLEILDITPCSFGGVSVITPGTNTSNQVAVLYQDVNCTEVPVAIHADQLTPTWRVYSTGSNVFQTRAGCLIGAEHVNNSYECDIPIGAGICASYQTQTNSPRRARSVASQSIIAYTMSLGAENSVAYSNNSIAIPTNFTISVTTEILPVSMTKTSVDCTMYICGDSTECSNLLLQYGSFCTQLNRALTGIAVEQDKNTQEVFAQVKQIYKTPPIKDFGGFNFSQILPDPSKPSKRSFIEDLLFNKVTLADAGFIKQYGDCLGDIAARDLICAQKFNGLTVLPPLLTDEMIAQYCSALLAGTITSGWTFGAGAALQIPFAMQMAYRFNGIGVTQNVLYENQKLIANQFNSAIGKIQDSLSSTASALGKLQDVVNQNAQALNTLVKQLSSNFGAISSVLNDILSRLDKVEAEVQIDRLITGRLQSLQTYVTQQLIRAAEIRASANLAATKMSECVLGQSKRVDFCGKGYHLMSFPQCAPHGVVFLHVTYVPAQEKNFTTAPAICHDGKAHFPREGVFVSNGTHWFVTQRNFYEPQIITTDNTFVSGNCDVVIGIVNNTVYDPLQPELDSFKEELDKYFKNHTSPDVDLGDISGINASVVNIQKEIDRLNEVAKNLNESLIDLQELGKYEQYIKGGGSGGGQIYEGKLTAEGLRFGIVASRFNHALVDRLVEGAIDAIVRHGGREEDITLVRVPGSWEIPVAAGELARKEDIDAVIAIGVLIRGATPHFDYIASEVSKGLADLSLELRKPITFGVITADTLEQAIERAGTKHGNKGWEAALSAIEMANLFKSLR

SEQ ID NO: 4568 - protein, 1371 aa, Artificial Sequence
  SARS-CoV-2/France/IDF0372/2020__EPI_ISL_406596 spike protein (1-1211)(T874C_S1055C) LumSynth construct
MFVFLVLLPLVSSQCVNLTTRTQLPPAYTNSFTRGVYYPDKVFRSSVLHSTQDLFLPFFSNVTWFHAIHVSGTNGTKRFDNPVLPFNDGVYFASTEKSNIIRGWIFGTTLDSKTQSLLIVNNATNVVIKVCEFQFCNDPFLGVYYHKNNKSWMESEFRVYSSANNCTFEYVSQPFLMDLEGKQGNFKNLREFVFKNIDGYFKIYSKHTPINLVRDLPQGFSALEPLVDLPIGINITRFQTLLALHRSYLTPGDSSSGWTAGAAAYYVGYLQPRTFLLKYNENGTITDAVDCALDPLSETKCTLKSFTVEKGIYQTSNFRVQPTESIVRFPNITNLCPFGEVFNATRFASVYAWNRKRISNCVADYSFLYNSASFSTFKCYGVSPTKLNDLCFTNVYADSFVIRGDEVRQIAPGQTGKIADYNYKLPDDFTGCVIAWNSNNLDSKVGGNYNYLYRLFRKSNLKPFERDISTEIYQAGSTPCNGVEGFNCYFPLQSYGFQPTNGVGYQPYRVVVLSFELLHAPATVCGPKKSTNLVKNKCVNFNFNGLTGTGVLTESNKKFLPFQQFGRDIADTTDAVRDPQTLEILDITPCSFGGVSVITPGTNTSNQVAVLYQDVNCTEVPVAIHADQLTPTWRVYSTGSNVFQTRAGCLIGAEHVNNSYECDIPIGAGICASYQTQTNSPRRARSVASQSIIAYTMSLGAENSVAYSNNSIAIPTNFTISVTTEILPVSMTKTSVDCTMYICGDSTECSNLLLQYGSFCTQLNRALTGIAVEQDKNTQEVFAQVKQIYKTPPIKDFGGFNFSQILPDPSKPSKRSFIEDLLFNKVTLADAGFIKQYGDCLGDIAARDLICAQKFNGLTVLPPLLTDEMIAQYCSALLAGTITSGWTFGAGAALQIPFAMQMAYRFNGIGVTQNVLYENQKLIANQFNSAIGKIQDSLSSTASALGKLQDVVNQNAQALNTLVKQLSSNFGAISSVLNDILSRLDKVEAEVQIDRLITGRLQSLQTYVTQQLIRAAEIRASANLAATKMSECVLGQSKRVDFCGKGYHLMSFPQCAPHGVVFLHVTYVPAQEKNFTTAPAICHDGKAHFPREGVFVSNGTHWFVTQRNFYEPQIITTDNTFVSGNCDVVIGIVNNTVYDPLQPELDSFKEELDKYFKNHTSPDVDLGDISGINASVVNIQKEIDRLNEVAKNLNESLIDLQELGKYEQYIKGGGSGGGQIYEGKLTAEGLRFGIVASRFNHALVDRLVEGAIDAIVRHGGREEDITLVRVPGSWEIPVAAGELARKEDIDAVIAIGVLIRGATPHFDYIASEVSKGLADLSLELRKPITFGVITADTLEQAIERAGTKHGNKGWEAALSAIEMANLFKSLR

SEQ ID NO: 4569 - protein, 1371 aa, Artificial Sequence
  SARS-CoV-2/Australia/VIC01/2020__EPI_ISL_406844 spike protein (1-1211)(T874C_S1055C) LumSynth construct
MFVFLVLLPLVSSQCVNLTTRTQLPPAYTNSFTRGVYYPDKVFRSSVLHSTQDLFLPFFSNVTWFHAIHVSGTNGTKRFDNPVLPFNDGVYFASTEKSNIIRGWIFGTTLDSKTQSLLIVNNATNVVIKVCEFQFCNDPFLGVYYHKNNKSWMESEFRVYSSANNCTFEYVSQPFLMDLEGKQGNFKNLREFVFKNIDGYFKIYSKHTPINLVRDLPQGFSALEPLVDLPIGINITRFQTLLALHRRYLTPGDSSSGWTAGAAAYYVGYLQPRTFLLKYNENGTITDAVDCALDPLSETKCTLKSFTVEKGIYQTSNFRVQPTESIVRFPNITNLCPFGEVFNATRFASVYAWNRKRISNCVADYSVLYNSASFSTFKCYGVSPTKLNDLCFTNVYADSFVIRGDEVRQIAPGQTGKIADYNYKLPDDFTGCVIAWNSNNLDSKVGGNYNYLYRLFRKSNLKPFERDISTEIYQAGSTPCNGVEGFNCYFPLQSYGFQPTNGVGYQPYRVVVLSFELLHAPATVCGPKKSTNLVKNKCVNFNFNGLTGTGVLTESNKKFLPFQQFGRDIADTTDAVRDPQTLEILDITPCSFGGVSVITPGTNTSNQVAVLYQDVNCTEVPVAIHADQLTPTWRVYSTGSNVFQTRAGCLIGAEHVNNSYECDIPIGAGICASYQTQTNSPRRARSVASQSIIAYTMSLGAENSVAYSNNSIAIPTNFTISVTTEILPVSMTKTSVDCTMYICGDSTECSNLLLQYGSFCTQLNRALTGIAVEQDKNTQEVFAQVKQIYKTPPIKDFGGFNFSQILPDPSKPSKRSFIEDLLFNKVTLADAGFIKQYGDCLGDIAARDLICAQKFNGLTVLPPLLTDEMIAQYCSALLAGTITSGWTFGAGAALQIPFAMQMAYRFNGIGVTQNVLYENQKLIANQFNSAIGKIQDSLSSTASALGKLQDVVNQNAQALNTLVKQLSSNFGAISSVLNDILSRLDKVEAEVQIDRLITGRLQSLQTYVTQQLIRAAEIRASANLAATKMSECVLGQSKRVDFCGKGYHLMSFPQCAPHGVVFLHVTYVPAQEKNFTTAPAICHDGKAHFPREGVFVSNGTHWFVTQRNFYEPQIITTDNTFVSGNCDVVIGIVNNTVYDPLQPELDSFKEELDKYFKNHTSPDVDLGDISGINASVVNIQKEIDRLNEVAKNLNESLIDLQELGKYEQYIKGGGSGGGQIYEGKLTAEGLRFGIVASRFNHALVDRLVEGAIDAIVRHGGREEDITLVRVPGSWEIPVAAGELARKEDIDAVIAIGVLIRGATPHFDYIASEVSKGLADLSLELRKPITFGVITADTLEQAIERAGTKHGNKGWEAALSAIEMANLFKSLR

SEQ ID NO: 4570 - protein, 1371 aa, Artificial Sequence
  SARS-CoV-2/Germany/BavPat1/2020__EPI_ISL_406862 spike protein (1-1211)(T874C_S1055C) LumSynth construct
MFVFLVLLPLVSSQCVNLTTRTQLPPAYTNSFTRGVYYPDKVFRSSVLHSTQDLFLPFFSNVTWFHAIHVSGTNGTKRFDNPVLPFNDGVYFASTEKSNIIRGWIFGTTLDSKTQSLLIVNNATNVVIKVCEFQFCNDPFLGVYYHKNNKSWMESEFRVYSSANNCTFEYVSQPFLMDLEGKQGNFKNLREFVFKNIDGYFKIYSKHTPINLVRDLPQGFSALEPLVDLPIGINITRFQTLLALHRSYLTPGDSSSGWTAGAAAYYVGYLQPRTFLLKYNENGTITDAVDCALDPLSETKCTLKSFTVEKGIYQTSNFRVQPTESIVRFPNITNLCPFGEVFNATRFASVYAWNRKRISNCVADYSVLYNSASFSTFKCYGVSPTKLNDLCFTNVYADSFVIRGDEVRQIAPGQTGKIADYNYKLPDDFTGCVIAWNSNNLDSKVGGNYNYLYRLFRKSNLKPFERDISTEIYQAGSTPCNGVEGFNCYFPLQSYGFQPTNGVGYQPYRVVVLSFELLHAPATVCGPKKSTNLVKNKCVNFNFNGLTGTGVLTESNKKFLPFQQFGRDIADTTDAVRDPQTLEILDITPCSFGGVSVITPGTNTSNQVAVLYQGVNCTEVPVAIHADQLTPTWRVYSTGSNVFQTRAGCLIGAEHVNNSYECDIPIGAGICASYQTQTNSPRRARSVASQSIIAYTMSLGAENSVAYSNNSIAIPTNFTISVTTEILPVSMTKTSVDCTMYICGDSTECSNLLLQYGSFCTQLNRALTGIAVEQDKNTQEVFAQVKQIYKTPPIKDFGGFNFSQILPDPSKPSKRSFIEDLLFNKVTLADAGFIKQYGDCLGDIAARDLICAQKFNGLTVLPPLLTDEMIAQYCSALLAGTITSGWTFGAGAALQIPFAMQMAYRFNGIGVTQNVLYENQKLIANQFNSAIGKIQDSLSSTASALGKLQDVVNQNAQALNTLVKQLSSNFGAISSVLNDILSRLDKVEAEVQIDRLITGRLQSLQTYVTQQLIRAAEIRASANLAATKMSECVLGQSKRVDFCGKGYHLMSFPQCAPHGVVFLHVTYVPAQEKNFTTAPAICHDGKAHFPREGVFVSNGTHWFVTQRNFYEPQIITTDNTFVSGNCDVVIGIVNNTVYDPLQPELDSFKEELDKYFKNHTSPDVDLGDISGINASVVNIQKEIDRLNEVAKNLNESLIDLQELGKYEQYIKGGGSGGGQIYEGKLTAEGLRFGIVASRFNHALVDRLVEGAIDAIVRHGGREEDITLVRVPGSWEIPVAAGELARKEDIDAVIAIGVLIRGATPHFDYIASEVSKGLADLSLELRKPITFGVITADTLEQAIERAGTKHGNKGWEAALSAIEMANLFKSLR

SEQ ID NO: 4571 - protein, 1371 aa, Artificial Sequence
  SARS-CoV-2/Wuhan/HBCDC-HB-02/2020__EPI_ISL_412978 spike protein (1-1211)(T874C_S1055C) LumSynth construct
MFVFLVLLPLVSSQCVNLTTRTQLPPAYTNSFTRGVYYPDKVFRSSVLHSTQDLFLPFFSNVTWFHAIHVSGTNGTKRFDNPVLPFNDGVYFASTEKSNIIRGWIFGTTLDSKTQSLLIVNNATNVVIKVCEFQFCNDPFLGVYYHKNNKSWMESEFRVYSSANNCTFEYVSQPFLMDLEGKQGNFKNLREFVFKNIDGYFKIYSKHTPINLVRDLPQGFSALEPLVDLPIGINITRFQTLLALHRSYLTPGDSSSGWTAGAAAYYVGYLQPRTFLLKYNENGTITDAVDCALDPLSETKCTLKSFTVEKGIYQTSNFRVQPTESIVRFPNITNLCPFGEVFNATRFASVYAWNRKRISNCVADYSVLYNSASFSTFKCYGVSPTKLNDLCFTNVYADSFVIRGDEVRQIAPGQTGKIADYNYKLPDDFTGCVIAWNSNNLDSKVGGNYNYLYRLFRKSNLKPFERDISTEIYQAGSTPCNGVEGFNCYFPLQSYGFQPTNGVGYQPYRVVVLSFELLHAPATVCGPKKSTNLVKNKCVNFNFNGLTGTGVLTESNKKFLPFQQFGRDIADTTDAVRDPQTLEILDITPCSFGGVSVITPGTNTSNQVAVLYQDVNCTEVPVAIHADQLTPTWRVYSTGSNVFQTRAGCLIGAEHVNNSYECDIPIGAGICASYQTQTNSPRRARSVASQSIIAYTMSLGAENSVAYSNNSIAIPTNFTISVTTEILPVSMTKTSVDCTMYICGDSTECSNFLLQYGSFCTQLNRALTGIAVEQDKNTQEVFAQVKQIYKTPPIKDFGGFNFSQILPDPSKPSKRSFIEDLLFNKVTLADAGFIKQYGDCLGDIAARDLICAQKFNGLTVLPPLLTDEMIAQYCSALLAGTITSGWTFGAGAALQIPFAMQMAYRFNGIGVTQNVLYENQKLIANQFNSAIGKIQDSLSSTASALGKLQDVVNQNAQALNTLVKQLSSNFGAISSVLNDILSRLDKVEAEVQIDRLITGRLQSLQTYVTQQLIRAAEIRASANLAATKMSECVLGQSKRVDFCGKGYHLMSFPQCAPHGVVFLHVTYVPAQEKNFTTAPAICHDGKAHFPREGVFVSNGTHWFVTQRNFYEPQIITTDNTFVSGNCDVVIGIVNNTVYDPLQPELDSFKEELDKYFKNHTSPDVDLGDISGINASVVNIQKEIDRLNEVAKNLNESLIDLQELGKYEQYIKGGGSGGGQIYEGKLTAEGLRFGIVASRFNHALVDRLVEGAIDAIVRHGGREEDITLVRVPGSWEIPVAAGELARKEDIDAVIAIGVLIRGATPHFDYIASEVSKGLADLSLELRKPITFGVITADTLEQAIERAGTKHGNKGWEAALSAIEMANLFKSLR

SEQ ID NO: 4572 - protein, 1371 aa, Artificial Sequence
  SARS-CoV-2/Australia/QLD02/2020__EPI_ISL_407896 spike protein (1-1211)(T874C_S1055C) LumSynth construct
MFVFLVLLPLVSSQCVNLTTRTQLPPAYTNSFTRGVYYPDKVFRSSVLHSTQDLFLPFFSNVTWFHAIHVSGTNGTKRFDNPVLPFNDGVYFASTEKSNIIRGWIFGTTLDSKTQSLLIVNNATNVVIKVCEFQFCNDPFLGVYYHKNNKSWMESEFRVYSSANNCTFEYVSQPFLMDLEGKQGNFKNLREFVFKNIDGYFKIYSKHTPINLVRDLPQGFSALEPLVDLPIGINITRFQTLLALHRSYLTPGDSSSGWTAGAAAYYVGYLQPRTFLLKYNENGTITDAVDCALDPLSETKCTLKSFTVEKGIYQTSNFRVQPTESIVRFPNITNLCPFGEVFNATRFASVYAWNRKRISNCVADYSVLYNSASFSTFKCYGVSPTKLNDLCFTNVYADSFVIRGDEVRQIAPGQTGKIADYNYKLPDDFTGCVIAWNSNNLDSKVGGNYNYLYRLFRKSNLKPFERDISTEIYQAGSTPCNGVEGFNCYFPLQSYGFQPTNGVGYQPYRVVVLSFELLHAPATVCGPKKSTNLVKNKCVNFNFNGLTGTGVLTESNKKFLPFQQFGRDIADTTDAVRDPQTLEILDITPCSFGGVSVITPGTNTSNQVAVLYQDVNCTEVPVAIHADQLTPTWRVYSTGSNVFQTRAGCLIGAEHVNNSYECDIPIGAGICASYQTQTNSPRRARSVASQSIIAYTMSLGAENSVAYSNNSIAIPTNFTISVTTEILPVSMTKTSVDCTMYICGDSTECSNLLLQYGSFCTQLNRALTGIAVEQDKNTQEVFAQVKQIYKTPPIKDFGGFNFSQILPDPSKPSKRSFIEDLLFNKVTLADAGFIKQYGDCLGDIAARDLICAQKFNGLTVLPPLLTDEMIAQYCSALLAGTITSGWTFGAGAALQIPFAMQMAYRFNGIGVTQNVLYENQKLIANQFNSAIGKIQDSLSSTASALGKLQDVVNQNAQALNTLVKQLSSNFGAISSVLNDILSRLDKVEAEVQIDRLITGRLQSLQTYVTQQLIRAAEIRASANLAATKMSECVLGQSKRVDFCGKGYHLMSFPQCAPHGVVFLHVTYVPAQEKNFTTAPAICHDGKAHFPREGVFVSNGTHWFVTQRNFYEPQIITTDNTFVSGNCDVVIGIVNNTVYDPLQLELDSFKEELDKYFKNHTSPDVDLGDISGINASVVNIQKEIDRLNEVAKNLNESLIDLQELGKYEQYIKGGGSGGGQIYEGKLTAEGLRFGIVASRFNHALVDRLVEGAIDAIVRHGGREEDITLVRVPGSWEIPVAAGELARKEDIDAVIAIGVLIRGATPHFDYIASEVSKGLADLSLELRKPITFGVITADTLEQAIERAGTKHGNKGWEAALSAIEMANLFKSLR

SEQ ID NO: 4573 - protein, 1371 aa, Artificial Sequence
  SARS-CoV-2/India/1-31/2020__EPI_ISL_413523 spike protein (1-1211)(T874C_S1055C) LumSynth construct
MFVFLVLLPLVSSQCVNLTTRTQLPPAYTNSFTRGVYYPDKVFRSSVLHSTQDLFLPFFSNVTWFHAIHVSGTNGTKRFDNPVLPFNDGVYFASTEKSNIIRGWIFGTTLDSKTQSLLIVNNATNVVIKVCEFQFCNDPFLGVYYHKNNKSWMESEFRVYSSANNCTFEYVSQPFLMDLEGKQGNFKNLREFVFKNIDGYFKIYSKHTPINLVRDLPQGFSALEPLVDLPIGINITRFQTLLALHRSYLTPGDSSSGWTAGAAAYYVGYLQPRTFLLKYNENGTITDAVDCALDPLSETKCTLKSFTVEKGIYQTSNFRVQPTESIVRFPNITNLCPFGEVFNATRFASVYAWNRKRISNCVADYSVLYNSASFSTFKCYGVSPTKLNDLCFTNVYADSFVIRGDEVRQIAPGQTGKIADYNYKLPDDFTGCVIAWNSNNLDSKVGGNYNYLYRLFRKSNLKPFERDISTEIYQAGSTPCNGVEGFNCYFPLQSYGFQPTNGVGYQPYRVVVLSFELLHAPATVCGPKKSTNLVKNKCVNFNFNGLTGTGVLTESNKKFLPFQQFGRDIADTTDAVRDPQTLEILDITPCSFGGVSVITPGTNTSNQVAVLYQDVNCTEVPVAIHADQLTPTWRVYSTGSNVFQTRAGCLIGAEHVNNSYECDIPIGAGICASYQTQTNSPRRARSVASQSIIAYTMSLGAENSVAYSNNSIAIPTNFTISVTTEILPVSMTKTSVDCTMYICGDSTECSNLLLQYGSFCTQLNRALTGIAVEQDKNTQEVFAQVKQIYKTPPIKDFGGFNFSQILPDPSKPSKRSFIEDLLFNKVTLADAGFIKQYGDCLGDIAARDLICAQKFNGLTVLPPLLTDEMIAQYCSALLAGTITSGWTFGAGAALQIPFAMQMAYRFNGIGVTQNVLYENQKLIANQFNSVIGKIQDSLSSTASALGKLQDVVNQNAQALNTLVKQLSSNFGAISSVLNDILSRLDKVEAEVQIDRLITGRLQSLQTYVTQQLIRAAEIRASANLAATKMSECVLGQSKRVDFCGKGYHLMSFPQCAPHGVVFLHVTYVPAQEKNFTTAPAICHDGKAHFPREGVFVSNGTHWFVTQRNFYEPQIITTDNTFVSGNCDVVIGIVNNTVYDPLQPELDSFKEELDKYFKNHTSPDVDLGDISGINASVVNIQKEIDRLNEVAKNLNESLIDLQELGKYEQYIKGGGSGGGQIYEGKLTAEGLRFGIVASRFNHALVDRLVEGAIDAIVRHGGREEDITLVRVPGSWEIPVAAGELARKEDIDAVIAIGVLIRGATPHFDYIASEVSKGLADLSLELRKPITFGVITADTLEQAIERAGTKHGNKGWEAALSAIEMANLFKSLR

SEQ ID NO: 4574 - protein, 1371 aa, Artificial Sequence
  SARS-CoV-2/Guangdong/GD2020087-P0008/2020__EPI_ISL_413863 spike protein (1-1211)(T874C_S1055C) LumSynth construct
MFVFLVLLPLVSSQCVNLTTRTQLPPAYTNSFTRGVYYPDKVFRSSVLHSTQDLFLPFFSNVTWFHAIHVSGTNGTKRFDNPVLPFNDGVYFASTEKSNIIRGWIFGTTLDSKTQSLLIVNNATNVVIKVCEFQFCNDPFLGVYYHKNNKSWMESEFRVYSSANNCTFEYVSQPFLMDLEGKQGNFKNLREFVFKNIDGYFKIYSKHTPINLVRDLPQGFSALEPLVDLPIGINITRFQTLLALHRSYLTPGDSSSGWTAGAAAYYVGYLQPRTFLLKYNENGTITDAVDCALDPLSETKCTLKSFTVEKGIYQTSNFRVQPTESIVRFPNITNLCPFGEVFNATRFASVYAWNRKRISNCVADYSVLYNSASFSTFKCYGVSPTKLNDLCFTNVYADSFVIRGDEVREIAPGQTGKIADYNYKLPDDFTGCVIAWNSNNLDSKVGGNYNYLYRLFRKSNLKPFERDISTEIYQAGSTPCNGVEGFNCYFPLQSYGFQPTNGVGYQPYRVVVLSFELLHAPATVCGPKKSTNLVKNKCVNFNFNGLTGTGVLTESNKKFLPFQQFGRDIADTTDAVRDPQTLEILDITPCSFGGVSVITPGTNTSNQVAVLYQDVNCTEVPVAIHADQLTPTWRVYSTGSNVFQTRAGCLIGAEHVNNSYECDIPIGAGICASYQTQTNSPRRARSVASQSIIAYTMSLGAENSVAYSNNSIAIPTNFTISVTTEILPVSMTKTSVDCTMYICGDSTECSNLLLQYGSFCTQLNRALTGIAVEQDKNTQEVFAQVKQIYKTPPIKDFGGFNFSQILPDPSKPSKRSFIEDLLFNKVTLADAGFIKQYGDCLGDIAARDLICAQKFNGLTVLPPLLTDEMIAQYCSALLAGTITSGWTFGAGAALQIPFAMQMAYRFNGIGVTQNVLYENQKLIANQFNSAIGKIQDSLSSTASALGKLQDVVNQNAQALNTLVKQLSSNFGAISSVLNDILSRLDKVEAEVQIDRLITGRLQSLQTYVTQQLIRAAEIRASANLAATKMSECVLGQSKRVDFCGKGYHLMSFPQCAPHGVVFLHVTYVPAQEKNFTTAPAICHDGKAHFPREGVFVSNGTHWFVTQRNFYEPQIITTDNTFVSGNCDVVIGIVNNTVYDPLQPELDSFKEELDKYFKNHTSPDVDLGDISGINASVVNIQKEIDRLNEVAKNLNESLIDLQELGKYEQYIKGGGSGGGQIYEGKLTAEGLRFGIVASRFNHALVDRLVEGAIDAIVRHGGREEDITLVRVPGSWEIPVAAGELARKEDIDAVIAIGVLIRGATPHFDYIASEVSKGLADLSLELRKPITFGVITADTLEQAIERAGTKHGNKGWEAALSAIEMANLFKSLR

SEQ ID NO: 4575 - protein, 1371 aa, Artificial Sequence
  SARS-CoV-2/Sweden/01/2020__EPI_ISL_411951 spike protein (1-1211)(T874C_S1055C) LumSynth construct
MFVFLVLLPLVSSQCVNLTTRTQLPPAYTNSFTRGVYYPDKVFRSSVLHSTQDLFLPFFSNVTWFHAIHVSGTNGTKRFDNPVLPFNDGVYFASTEKSNIIRGWIFGTTLDSKTQSLLIVNNATNVVIKVCEFQFCNDPFLGVYYHKNNKSWMESEFRVYSSANNCTFEYVSQPFLMDLEGKQGNFKNLREFVFKNIDGYFKIYSKHTPINLVRDLPQGFSALEPLVDLPIGINITRFQTLLALHRSYLTPGDSSSGWTAGAAAYYVGYLQPRTFLLKYNENGTITDAVDCALDPLSETKCTLKSFTVEKGIYQTSNFRVQPTESIVRFPNITNLCPFGEVFNATRFASVYAWNRKRISNCVADYSVLYNSASFSTFKCYGVSPTKLNDLCFTNVYADSFVIRGDEVRQIAPGQTGKIADYNYKLPDDFTGCVIAWNSNNLDSKVGGNYNYLYRLFRKSNLKPFERDISTEIYQAGSTPCNGVEGFNCYFPLQSYGFQPTNGVGYQPYRVVVLSFELLHAPATVCGPKKSTNLVKNKCVNFNFNGLTGTGVLTESNKKFLPFQQFGRDIADTTDAVRDPQTLEILDITPCSFGGVSVITPGTNTSNQVAVLYQDVNCTEVPVAIHADQLTPTWRVYSTGSNVFQTRAGCLIGAEHVNNSYECDIPIGAGICASYQTQTNSPRRARSVASQSIIAYTMSLGAENSVAYSNNSIAIPTNFTISVTTEILPVSMTKTSVDCTMYICGDSTECSNLLLQYGSFCTQLNRALTGIAVEQDKNTQEVFAQVKQIYKTPPIKDCGGFNFSQILPDPSKPSKRSFIEDLLFNKVTLADAGFIKQYGDCLGDIAARDLICAQKFNGLTVLPPLLTDEMIAQYCSALLAGTITSGWTFGAGAALQIPFAMQMAYRFNGIGVTQNVLYENQKLIANQFNSAIGKIQDSLSSTASALGKLQDVVNQNAQALNTLVKQLSSNFGAISSVLNDILSRLDKVEAEVQIDRLITGRLQSLQTYVTQQLIRAAEIRASANLAATKMSECVLGQSKRVDFCGKGYHLMSFPQCAPHGVVFLHVTYVPAQEKNFTTAPAICHDGKAHFPREGVFVSNGTHWFVTQRNFYEPQIITTDNTFVSGNCDVVIGIVNNTVYDPLQPELDSFKEELDKYFKNHTSPDVDLGDISGINASVVNIQKEIDRLNEVAKNLNESLIDLQELGKYEQYIKGGGSGGGQIYEGKLTAEGLRFGIVASRFNHALVDRLVEGAIDAIVRHGGREEDITLVRVPGSWEIPVAAGELARKEDIDAVIAIGVLIRGATPHFDYIASEVSKGLADLSLELRKPITFGVITADTLEQAIERAGTKHGNKGWEAALSAIEMANLFKSLR

SEQ ID NO: 4576 - protein, 1371 aa, Artificial Sequence
  SARS-CoV-2/Tianmen/HBCDC-HB-07/2020__EPI_ISL_412983 spike protein (1-1211)(T874C_S1055C) LumSynth construct
MFVFLVLLPLVSSQCVNLTTRTQLPPAYTNSFTRGVYYPDKVFRSSVLHSTQDLFLPFFSNVTWFHAIHVSGTNGTKRFDNPVLPFNDGVYFASTEKSNIIRGWIFGTTLDSKTQSLLIVNNATNVVIKVCEFQFCNDPFLGVYYHKNNKSWMESEFRVYSSANNCTFEYVSQPFLMDLEGKQGNFKNLREFVFKNIDGYFKIYSKHTPINLVRDLPQGFSALEPLVDLPIGINITRFQTLLALHRSYLTPGDSSSGWTAGAAAYYVGYLQPRTFLLKYNENGTITDAVDCALDPLSETKCTLKSFTVEKGIYQTSNFRVQPTESIVRFPNITNLCPFGEVFNATRFASVYAWNRKRISNCVADYSVLYNSASFSTFKCYGVSPTKLNDLCFTNVYADSFVIRGDEVRQIAPGQTGKIADYNYKLPDDFTGCVIAWNSNNLDSKVGGNYNYLYRLFRKSNLKPFERDISTEIYQAGSTPCNGVEGFNCYFPLQSYGFQPTNGVGYQPYRVVVLSFELLHAPATVCGPKKSTNLVKNKCVNFNFNGLTGTGVLTESNKKFLPFQQFGRDIADTTDAVRDPQTLEILDITPCSFGGVSVITPGTNTSNQVAVLYQDLNCTEVPVAIHADQLTPTWRVYSTGSNVFQTRAGCLIGAEHVNNSYECDIPIGAGICASYQTQTNSPRRARSVASQSIIAYTMSLGAENSVAYSNNSIAIPTNFTISVTTEILPVSMTKTSVDCTMYICGDSTECSNLLLQYGSFCTQLNRALTGIAVEQDKNTQEVFAQVKQIYKTPPIKDFGGFNFSQILPDPSKPSKRSFIEDLLFNKVTLADAGFIKQYGDCLGDIAARDLICAQKFNGLTVLPPLLTDEMIAQYCSALLAGTITSGWTFGAGAALQIPFAMQMAYRFNGIGVTQNVLYENQKLIANQFNSAIGKIQDSLSSTASALGKLQDVVNQNAQALNTLVKQLSSNFGAISSVLNDILSRLDKVEAEVQIDRLITGRLQSLQTYVTQQLIRAAEIRASANLAATKMSECVLGQSKRVDFCGKGYHLMSFPQCAPHGVVFLHVTYVPAQEKNFTTAPAICHDGKAHFPREGVFVSNGTHWFVTQRNFYEPQIITTDNTFVSGNCDVVIGIVNNTVYDPLQPELDSFKEELDKYFKNHTSPDVDLGDISGINASVVNIQKEIDRLNEVAKNLNESLIDLQELGKYEQYIKGGGSGGGQIYEGKLTAEGLRFGIVASRFNHALVDRLVEGAIDAIVRHGGREEDITLVRVPGSWEIPVAAGELARKEDIDAVIAIGVLIRGATPHFDYIASEVSKGLADLSLELRKPITFGVITADTLEQAIERAGTKHGNKGWEAALSAIEMANLFKSLR

SEQ ID NO: 4577 - protein, 1371 aa, Artificial Sequence
  SARS-CoV-2/Hong Kong/case42_VM20002493/2020__EPI_ISL_414527 spike protein (1-1211)(T874C_S1055C) LumSynth construct
MFVFLVLLPLVSSQCVNLTTRTQLPPAYTNSFTRGVYYPDKVFRSSVLHSTQDLFLPFFSNVTWFHAIHVSGTNGTKRFDNPVLPFNDGVYFASTEKSNIIRGWIFGTTLDSKTQSLLIVNNATNVVIKVCEFQFCNDPFLGVYYHKNNKSWMESEFRVYSSANNCTFEYVSQPFLMDLEGKQGNFKNLREFVFKNIDGYFKIYSKHTPINLVRDLPQGFSALEPLVDLPIGINITRFQTLLALHRSYLTPGDSSSGWTAGAAAYYVGYLQPRTFLLKYNENGTITDAVDCALDPLSETKCTLKSFTVEKGIYQTSNFRVQPTESIVRFPNITNLCPFGEVFNATRFASVYAWNRKRISNCVADYSVLYNSASFSTFKCYGVSPTKLNDLCFTNVYADSFVIRGDEVRQIAPGQTGKIADYNYKLPDDFTGCVIAWNSNNLDSKVGGNYNYLYRLFRKSNLKPFERDISTEIYQAGSTPCNGVEGFNCYFPLQSYGFQPTNGVGYQPYRVVVLSFELLHAPATVCGPKKSTNLVKNKCVNFNFNGLTGTGVLTESNKKFLPFQQFGRDIADTTDAVRDPQTLEILDITPCSFGGVSVITPGTNTSNQVAVLYQDVNCTEVPVAIHADQLTPTWRVYSTGSNVFQTRAGCLIGAEHVNNSYECDIPIGAGICASYQTQTNSPRRARSVASQSIIAYTMSLGAENSVAYSNNSIAIPTNFAISVTTEILPVSMTKTSVDCTMYICGDSTECSNLLLQYGSFCTQLNRALTGIAVEQDKNTQEVFAQVKQIYKTPPIKDFGGFNFSQILPDPSKPSKRSFIEDLLFNKVTLADAGFIKQYGDCLGDIAARDLICAQKFNGLTVLPPLLTDEMIAQYCSALLAGTITSGWTFGAGAALQIPFAMQMAYRFNGIGVTQNVLYENQKLIANQFNSAIGKIQDSLSSTASALGKLQDVVNQNAQALNTLVKQLSSNFGAISSVLNDILSRLDKVEAEVQIDRLITGRLQSLQTYVTQQLIRAAEIRASANLAATKMSECVLGQSKRVDFCGKGYHLMSFPQCAPHGVVFLHVTYVPAQEKNFTTAPAICHDGKAHFPREGVFVSNGTHWFVTQRNFYEPQIITTDNTFVSGNCDVVIGIVNNTVYDPLQPELDSFKEELDKYFKNHTSPDVDLGDISGINASVVNIQKEIDRLNEVAKNLNESLIDLQELGKYEQYIKGGGSGGGQIYEGKLTAEGLRFGIVASRFNHALVDRLVEGAIDAIVRHGGREEDITLVRVPGSWEIPVAAGELARKEDIDAVIAIGVLIRGATPHFDYIASEVSKGLADLSLELRKPITFGVITADTLEQAIERAGTKHGNKGWEAALSAIEMANLFKSLR

SEQ ID NO: 4578 - protein, 1371 aa, Artificial Sequence
  SARS-CoV-2/USA/CruiseA-23/2020__EPI_ISL_414482 spike protein (1-1211)(T874C_S1055C) LumSynth construct
MFVFLVLLPLVSSQCVNLTTRTQLPPAYTNSFTRGVYYPDKVFRSSVLHSTQDLFLPFFSNVTWFHAIHVSGTNGTKRFDNPVLPFNDGVYFASTEKSNIIRGWIFGTTLDSKTQSLLIVNNATNVVIKVCEFQFCNDPFLGVYYHKNNKSWMESEFRVYSSANNCTFEYVSQPFLMDLEVKQGNFKNLREFVFKNIDGYFKIYSKHTPINLVRDLPQGFSALEPLVDLPIGINITRFQTLLALHRSYLTPGDSSSGWTAGAAAYYVGYLQPRTFLLKYNENGTITDAVDCALDPLSETKCTLKSFTVEKGIYQTSNFRVQPTESIVRFPNITNLCPFGEVFNATRFASVYAWNRKRISNCVADYSVLYNSASFSTFKCYGVSPTKLNDLCFTNVYADSFVIRGDEVRQIAPGQTGKIADYNYKLPDDFTGCVIAWNSNNLDSKVGGNYNYLYRLFRKSNLKPFERDISTEIYQAGSTPCNGVEGFNCYFPLQSYGFQPTNGVGYQPYRVVVLSFELLHAPATVCGPKKSTNLVKNKCVNFNFNGLTGTGVLTESNKKFLPFQQFGRDIADTTDAVRDPQTLEILDITPCSFGGVSVITPGTNTSNQVAVLYQDVNCTEVPVAIHADQLTPTWRVYSTGSNVFQTRAGCLIGAEHVNNSYECDIPIGAGICASYQTQTNSPRRARSVASQSIIAYTMSLGAENSVAYSNNSIAIPTNFTISVTTEILPVSMTKTSVDCTMYICGDSTECSNLLLQYGSFCTQLNRALTGIAVEQDKNTQEVFAQVKQIYKTPPIKDFGGFNFSQILPDPSKPSKRSFIEDLLFNKVTLADAGFIKQYGDCLGDIAARDLICAQKFNGLTVLPPLLTDEMIAQYCSALLAGTITSGWTFGAGAALQIPFAMQMAYRFNGIGVTQNVLYENQKLIANQFNSAIGKIQDSLSSTASALGKLQDVVNQNAQALNTLVKQLSSNFGAISSVLNDILSRLDKVEAEVQIDRLITGRLQSLQTYVTQQLIRAAEIRASANLAATKMSECVLGQSKRVDFCGKGYHLMSFPQCAPHGVVFLHVTYVPAQEKNFTTAPAICHDGKAHFPREGVFVSNGTHWFVTQRNFYEPQIITTDNTFVSGNCDVVIGIVNNTVYDPLQPELDSFKEELDKYFKNHTSPDVDLGDISGINASVVNIQKEIDRLNEVAKNLNESLIDLQELGKYEQYIKGGGSGGGQIYEGKLTAEGLRFGIVASRFNHALVDRLVEGAIDAIVRHGGREEDITLVRVPGSWEIPVAAGELARKEDIDAVIAIGVLIRGATPHFDYIASEVSKGLADLSLELRKPITFGVITADTLEQAIERAGTKHGNKGWEAALSAIEMANLFKSLR

SEQ ID NO: 4579 - protein, 1371 aa, Artificial Sequence
  SARS-CoV-2/Hong Kong/case85_VM20002868/2020__EPI_ISL_414519 spike protein (1-1211)(T874C_S1055C) LumSynth construct
MFVFLVLVPLVSSQCVNLTTRTQLPPAYTNSFTRGVYYPDKVFRSSVLHSTQDLFLPFFSNVTWFHAIHVSGTNGTKRFDNPVLPFNDGVYFASTEKSNIIRGWIFGTTLDSKTQSLLIVNNATNVVIKVCEFQFCNDPFLGVYYHKNNKSWMESEFRVYSSANNCTFEYVSQPFLMDLEGKQGNFKNLREFVFKNIDGYFKIYSKHTPINLVRDLPQGFSALEPLVDLPIGINITRFQTLLALHRSYLTPGDSSSGWTAGAAAYYVGYLQPRTFLLKYNENGTITDAVDCALDPLSETKCTLKSFTVEKGIYQTSNFRVQPTESIVRFPNITNLCPFGEVFNATRFASVYAWNRKRISNCVADYSVLYNSASFSTFKCYGVSPTKLNDLCFTNVYADSFVIRGDEVRQIAPGQTGKIADYNYKLPDDFTGCVIAWNSNNLDSKVGGNYNYLYRLFRKSNLKPFERDISTEIYQAGSTPCNGVEGFNCYFPLQSYGFQPTNGVGYQPYRVVVLSFELLHAPATVCGPKKSTNLVKNKCVNFNFNGLTGTGVLTESNKKFLPFQQFGRDIADTTDAVRDPQTLEILDITPCSFGGVSVITPGTNTSNQVAVLYQDVNCTEVPVAIHADQLTPTWRVYSTGSNVFQTRAGCLIGAEHVNNSYECDIPIGAGICASYQTQTNSPRRARSVASQSIIAYTMSLGAENSVAYSNNSIAIPTNFTISVTTEILPVSMTKTSVDCTMYICGDSTECSNLLLQYGSFCTQLNRALTGIAVEQDKNTQEVFAQVKQIYKTPPIKDFGGFNFSQILPDPSKPSKRSFIEDLLFNKVTLADAGFIKQYGDCLGDIAARDLICAQKFNGLTVLPPLLTDEMIAQYCSALLAGTITSGWTFGAGAALQIPFAMQMAYRFNGIGVTQNVLYENQKLIANQFNSAIGKIQDSLSSTASALGKLQDVVNQNAQALNTLVKQLSSNFGAISSVLNDILSRLDKVEAEVQIDRLITGRLQSLQTYVTQQLIRAAEIRASANLAATKMSECVLGQSKRVDFCGKGYHLMSFPQCAPHGVVFLHVTYVPAQEKNFTTAPAICHDGKAHFPREGVFVSNGTHWFVTQRNFYEPQIITTDNTFVSGNCDVVIGIVNNTVYDPLQPELDSFKEELDKYFKNHTSPDVDLGDISGINASVVNIQKEIDRLNEVAKNLNESLIDLQELGKYEQYIKGGGSGGGQIYEGKLTAEGLRFGIVASRFNHALVDRLVEGAIDAIVRHGGREEDITLVRVPGSWEIPVAAGELARKEDIDAVIAIGVLIRGATPHFDYIASEVSKGLADLSLELRKPITFGVITADTLEQAIERAGTKHGNKGWEAALSAIEMANLFKSLR

SEQ ID NO: 4580 - protein, 1371 aa, Artificial Sequence; identical to SEQ ID NO: 4570
  SARS-CoV-2/England/200990660/2020__EPI_ISL_414523 spike protein (1-1211)(T874C_S1055C) LumSynth construct

SEQ ID NO: 4581 - protein, 1371 aa, Artificial Sequence
  SARS-CoV-2/Australia/NSW09/2020__EPI_ISL_413595 spike protein (1-1211)(T874C_S1055C) LumSynth construct
MFVFLVLLPLVSSQCVNLTTRTQLPPAYTNSFTRGVYYPDKVFRSSVLHSTQDLFLPFFSNVTWFHAIHVSGTNGTKRFDNPVLPFNDGVYFASTEKSNIIRGWIFGTTLDSKTQSLLIVNNATNVVIKVCEFQFCNDPFLGVYYHKNNKSWMESEFRVYSSANNCTFEYVSQPFLMDLEGKQGNFKNLREFVFKNIDGYFKIYSKHTPINLVRDLPQGFSALEPLVDLPIGINITRFQTLLALHRSYLTPGDSSSGWTAGAAAYYVGYLQPRTFLLKYNENGTITDAVDCALDPLSETKCTLKSFTVEKGIYQTSNFRVQPTESIVRFPNITNLCPFGEVFNATRFASVYAWNRKRISNCVADYSVLYNSASFSTFKCYGVSPTKLNDLCFTNVYADSFVIRGDEVRQIAPGQTGKIADYNYKLPDDFTGCVIAWNSNNLDSKVGGNYNYLYRLFRKSNLKPFERDISTEIYQAGSTPCNGVEGFNCYFPLQSYGFQPTNGVGYQPYRVVVLSFELLHAPATVCGPKKSTNLVKNKCVNFNFNGLTGTGVLTESNKKFLPFQQFGRDIADTTDAVRDPQTLEILDITPCSFGGVSVITPGTNTSNQVAVLYQDVNCTEVPVAIHADQLTPTWRVYSTGSNVFQTRAGCLIGAEHVNNSYECDIPIGAGICASYQTQTNSPRRARSVASQSIIAYTMSLGAENSVAYSNNSIAIPTNFTISVTTEILPVSMTKTSVDCTMYICGDSTECSNLLLQYGSFCTQLNRALTGIAVEQDKNTQEVFAQVKQIYKTPPIKDFGGFNFSQILPDPSKPSKRSFIEDLLFNKVTLADAGFIKQYGDCLGDIAARDLICAQKFNGLTVLPPLLTDEMIAQYCSALLAGTITSGWTFGAGAALQIPFAMQMAYRFNGIGVTQNVLYENQKLIANQFNSAIGKIQDSLSFTASALGKLQDVVNQNAQALNTLVKQLSSNFGAISSVLNDILSRLDKVEAEVQIDRLITGRLQSLQTYVTQQLIRAAEIRASANLAATKMSECVLGQSKRVDFCGKGYHLMSFPQCAPHGVVFLHVTYVPAQEKNFTTAPAICHDGKAHFPREGVFVSNGTHWFVTQRNFYEPQIITTDNTFVSGNCDVVIGIVNNTVYDPLQPELDSFKEELDKYFKNHTSPDVDLGDISGINASVVNIQKEIDRLNEVAKNLNESLIDLQELGKYEQYIKGGGSGGGQIYEGKLTAEGLRFGIVASRFNHALVDRLVEGAIDAIVRHGGREEDITLVRVPGSWEIPVAAGELARKEDIDAVIAIGVLIRGATPHFDYIASEVSKGLADLSLELRKPITFGVITADTLEQAIERAGTKHGNKGWEAALSAIEMANLFKSLR

SEQ ID NO: 4582 - protein, 1371 aa, Artificial Sequence; identical to SEQ ID NO: 4562
  SARS-CoV-2/Australia/NSW10/2020__EPI_ISL_413596 spike protein (1-1211)(T874C_S1055C) LumSynth construct

SEQ ID NO: 4583 - protein, 1371 aa, Artificial Sequence
  SARS-CoV-2/Switzerland/1000477797/2020__EPI_ISL_413023 spike protein (1-1211)(T874C_S1055C) LumSynth construct
MFVFLVLLPLVSSQCVNLTTRTQLPPAYTNSFTRGVYYPDKVFRSSVLHSTQDLFLPFFSNVTWFHAIHVSGTNGTKRFDNPVLPFNDGVYFASTEKSNIIRGWIFGTTLDSKTQSLLIVNNATNVVIKVCEFQFCNDPFLGVYYHKNNKSWMESEFRVYSSANNCTFEYVSQPFLMDLEGKQGNFKNLREFVFKNIDGYFNIYSKHTPINLVRDLPQGFSALEPLVDLPIGINITRFQTLLALHRSYLTPGDSSSGWTAGAAAYYVGYLQPRTFLLKYNENGTITDAVDCALDPLSETKCTLKSFTVEKGIYQTSNFRVQPTESIVRFPNITNLCPFGEVFNATRFASVYAWNRKRISNCVADYSVLYNSASFSTFKCYGVSPTKLNDLCFTNVYADSFVIRGDEVRQIAPGQTGKIADYNYKLPDDFTGCVIAWNSNNLDSKVGGNYNYLYRLFRKSNLKPFERDISTEIYQAGSTPCNGVEGFNCYFPLQSYGFQPTNGVGYQPYRVVVLSFELLHAPATVCGPKKSTNLVKNKCVNFNFNGLTGTGVLTESNKKFLPFQQFGRDIADTTDAVRDPQTLEILDITPCSFGGVSVITPGTNTSNQVAVLYQGVNCTEVPVAIHADQLTPTWRVYSTGSNVFQTRAGCLIGAEHVNNSYECDIPIGAGICASYQTQTNSPRRARSVASQSIIAYTMSLGAENSVAYSNNSIAIPTNFTISVTTEILPVSMTKTSVDCTMYICGDSTECSNLLLQYGSFCTQLNRALTGIAVEQDKNTQEVFAQVKQIYKTPPIKDFGGFNFSQILPDPSKPSKRSFIEDLLFNKVTLADAGFIKQYGDCLGDIAARDLICAQKFNGLTVLPPLLTDEMIAQYCSALLAGTITSGWTFGAGAALQIPFAMQMAYRFNGIGVTQNVLYENQKLIANQFNSAIGKIQDSLSSTASALGKLQDVVNQNAQALNTLVKQLSSNFGAISSVLNDILSRLDKVEAEVQIDRLITGRLQSLQTYVTQQLIRAAEIRASANLAATKMSECVLGQSKRVDFCGKGYHLMSFPQCAPHGVVFLHVTYVPAQEKNFTTAPAICHDGKAHFPREGVFVSNGTHWFVTQRNFYEPQIITTDNTFVSGNCDVVIGIVNNTVYDPLQPELDSFKEELDKYFKNHTSPDVDLGDISGINASVVNIQKEIDRLNEVAKNLNESLIDLQELGKYEQYIKGGGSGGGQIYEGKLTAEGLRFGIVASRFNHALVDRLVEGAIDAIVRHGGREEDITLVRVPGSWEIPVAAGELARKEDIDAVIAIGVLIRGATPHFDYIASEVSKGLADLSLELRKPITFGVITADTLEQAIERAGTKHGNKGWEAALSAIEMANLFKSLR

SEQ ID NO: 4584 - protein, 1371 aa, Artificial Sequence
  SARS-CoV-2/Belgium/BA-02291/2020__EPI_ISL_415159 spike protein (1-1211)(T874C_S1055C) LumSynth construct
MFVFLVLLPLVSSQCVNLTTRTQLPPAYTNSFTRGVYYPDKVFRSSVLHSTQDLFLPFFSNVTWFHAIHVSGTNGTKRFDNPVLPFNDGVYFASTEKSNIIRGWIFGTTLDSKTQSLLIVNNATNVVIKVCEFQFCNDPFLGVYYHKNNKSWMESEFRVYSSANNCTFEYVSQPFLMDLEGKQGNFKNLREFVFKNIDGYFKIYSKHTPINLVRDLPQGFSALEPLVDLPIGINITRFQTLLALHRSYLTPGDSSSGWTAGAAAYYVGYLQPRTFLLKYNENGTITDAVDCALDPLSETKCTLKSFTVEKGIYQTSNFRVQPTESIVRFPNITNLCPFGEVFNATRFASVYAWNRKRISNCVADYSVLYNSASFSTFKCYGVSPTKLNDLCFTNVYADSFVIRGDEVRQIAPGQTGKIADYNYKLPDDFTGCVIAWNSNNLDSKVGGNYNYLYRLFRRSNLKPFERDISTEIYQAGSTPCNGVEGFNCYFPLQSYGFQPTNGVGYQPYRVVVLSFELLPAPATVCGPKKSTNLVKNKCVNFNFNGLTGTGVLTESNKKFLPFQQFGRDIADTTDAVRDPQTLEILDITPCSFGGVSVITPGTNTSNQVAVLYQGVNCTEVPVAIHADQLTPTWRVYSTGSNVFQTRAGCLIGAEHVNNSYECDIPIGAGICASYQTQTNSPRRARSVASQSIIAYTMSLGAENSVAYSNNSIAIPTNFTISVTTEILPVSMTKTSVDCTMYICGDSTECSNLLLQYGSFCTQLNRALTGIAVEQDKNTQEVFAQVKQIYKTPPIKDFGGFNFSQILPDPSKPSKRSFIEDLLFNKVTLADAGFIKQYGDCLGDIAARDLICAQKFNGLTVLPPLLTDEMIAQYCSALLAGTITSGWTFGAGAALQIPFAMQMAYRFNGIGVTQNVLYENQKLIANQFNSAIGKIQDSLSSAAPALGKLQDVVNQNAQALNTLVKQLSSNFGAISSVLNDILSRLDKVEAEVQIDRLITGRLQSLQTYVTQQLIRAAEIRASANLAATKMSECVLGQSKRVDFCGKGYHLMSFPQCAPHGVVFLHVTYVPAQEKNFTTAPAICHDGKAHFPREGVFVSNGTHWFVTQRNFYEPQIITTDNTFVSGNCDVVIGIVNNTVYDPLQPELDSFKEELDKYFKNHTSPDVDLGDISGINASVVNIQKEIDRLNEVAKNLNESLIDLQELGKYEQYIKGGGSGGGQIYEGKLTAEGLRFGIVASRFNHALVDRLVEGAIDAIVRHGGREEDITLVRVPGSWEIPVAAGELARKEDIDAVIAIGVLIRGATPHFDYIASEVSKGLADLSLELRKPITFGVITADTLEQAIERAGTKHGNKGWEAALSAIEMANLFKSLR

SEQ ID NO: 4585 - protein, 1371 aa, Artificial Sequence
  SARS-CoV-2/USA/WA8-UW5/2020__EPI_ISL_413486 spike protein (1-1211)(T874C_S1055C) LumSynth construct
MFVFLVLLPLVSSQCVNLTTRTQLPPAYTNSFTRGVYYPDKVFRSSVLHSTQDLFLPFFSNVTWFHAIHVSGTNGTKRFDNPVLPFNDGVYFASTEKSNIIRGWIFGTTLDSKTQSLLIVNNATNVVIKVCEFQFCNDPFLGVYYHKNNKSWMESEFRVYSSANNCTFEYVSQPFLMDLEGKQGNFKNLREFVFKNIDGYFKIYSKHTPINLVRDLPQGFSALEPLVDLPIGINITRFQTLLALHRSYLTPGDSSSGWTAGAAAYYVGYLQPRTFLLKYNENGTITDAVDCALDPLSETKCTLKSFTVEKGIYQTSNFRVQPTESIVRFPNITNLCPFGEVFNATRFASVYAWNRKRISNCVADYSVLYNSASFSTFKCYGVSPTKLNDLCFTNVYADSFVIRGDEVRQIAPGQTGKIADYNYKLPDDFTGCVIAWNSNNLDSKVGGNYNYLYRLFRKSNLKPFERDISTEIYQAGSTPCNGVEGFNCYFPLQSYGFQPTNGVGYQPYRVVVLSFELLHAPATVCGPKKSTNLVKNKCVNFNFNGLTGTGVLTESNKKFLPFQQFGRDIADTTDAVRDPQTLEILDITPCSFGGVSVITPGTNTSNQVAVLYQDVNCTEVPVAIHADQLTPTWRVYSTGSNVFQTRAGCLIGAEYVNNSYECDIPIGAGICASYQTQTNSPRRARSVASQSIIAYTMSLGAENSVAYSNNSIAIPTNFTISVTTEILPVSMTKTSVDCTMYICGDSTECSNLLLQYGSFCTQLNRALTGIAVEQDKNTQEVFAQVKQIYKTPPIKDFGGFNFSQILPDPSKPSKRSFIEDLLFNKVTLADAGFIKQYGDCLGDIAARDLICAQKFNGLTVLPPLLTDEMIAQYCSALLAGTITSGWTFGAGAALQIPFAMQMAYRFNGIGVTQNVLYENQKLIANQFNSAIGKIQDSLSSTASALGKLQDVVNQNAQALNTLVKQLSSNFGAISSVLNDILSRLDKVEAEVQIDRLITGRLQSLQTYVTQQLIRAAEIRASANLAATKMSECVLGQSKRVDFCGKGYHLMSFPQCAPHGVVFLHVTYVPAQEKNFTTAPAICHDGKAHFPREGVFVSNGTHWFVTQRNFYEPQIITTDNTFVSGNCDVVIGIVNNTVYDPLQPELDSFKEELDKYFKNHTSPDVDLGDISGINASVVNIQKEIDRLNEVAKNLNESLIDLQELGKYEQYIKGGGSGGGQIYEGKLTAEGLRFGIVASRFNHALVDRLVEGAIDAIVRHGGREEDITLVRVPGSWEIPVAAGELARKEDIDAVIAIGVLIRGATPHFDYIASEVSKGLADLSLELRKPITFGVITADTLEQAIERAGTKHGNKGWEAALSAIEMANLFKSLR

SEQ ID NO: 4586 - protein, 1371 aa, Artificial Sequence
  SARS-CoV-2/England/20102000506/2020__EPI_ISL_415147 spike protein (1-1211)(T874C_S1055C) LumSynth construct
MFVFLVLLPLVSSQCVNLTTRTQLPPAYTNSFTRGVYYPDKVFRSSVLHSTQDLFLPFFSNVTWFHAIHVSGTNGTKRFDNPVLPFNDGVYFASTEKSNIIRGWIFGTTLDSKTQSLLIVNNATNVVIKVCEFQFCNDPFLGVYYHKNNKSWMESEFRVYSSANNCTFEYVSQPFLMDLEGKQGNFKNLREFVFKNIDGYFKIYSKHTPINLVRDLPQGFSALEPLVDLPIGINITRFQTLLALHRSYLTPGDSSSGWTAGAAAYYVGYLQPRTFLLKYNENGTITDAVDCALDPLSETKCTLKSFTVEKGIYQTSNFRVQPTESIVRFPNITNLCPFGEVFNATRFASVYAWNRKRISNCVADYSVLYNSASFSTFKCYGVSPTKLNDLCFTNVYADSFVIRGDEVRQIAPGQTGKIADYNYKLPDDFTGCVIAWNSNNLDSKVGGNYNYLYRLFRKSNLKPFERDISTEIYQAGSTPCNGVEGFNCYFPLQSYGFQPTNGVGYQPYRVVVLSFELLHAPATVCGPKKSTNLVKNKCVNFNFNGLTGTGVLTESNKKFLPFQQFGRDIADTTDAVRDPQTLEILDITPCSFGGVSVITPGTNTSNQVAVLYQGVNCTEVPVAIHADQLTPTWRVYSTGSNVFQTRAGCLIGAEHVNNSYECDIPIGAGICASYQTQTNSPRRARSVASQSIIAYTMSLGAENSVAYSNNSIAIPTNFTISVTTEILPVSMTKTSVDCTMYICGDSTECSNLLLQYGSFCTQLNRALTGIAVEQDKNTQEVFAQVKQIYKTPPIKDFGGFNFSQILPDPSKPSKRSFIEDLLFNKVTLADAGFIKQYGYCLGDIAARDLICAQKFNGLTVLPPLLTDEMIAQYCSALLAGTITSGWTFGAGAALQIPFAMQMAYRFNGIGVTQNVLYENQKLIANQFNSAIGKIQDSLSSTASALGKLQDVVNQNAQALNTLVKQLSSNFGAISSVLNDILSRLDKVEAEVQIDRLITGRLQSLQTYVTQQLIRAAEIRASANLAATKMSECVLGQSKRVDFCGKGYHLMSFPQCAPHGVVFLHVTYVPAQEKNFTTAPAICHDGKAHFPREGVFVSNGTHWFVTQRNFYEPQIITTDNTFVSGNCDVVIGIVNNTVYDPLQPELDSFKEELDKYFKNHTSPDVDLGDISGINASVVNIQKEIDRLNEVAKNLNESLIDLQELGKYEQYIKGGGSGGGQIYEGKLTAEGLRFGIVASRFNHALVDRLVEGAIDAIVRHGGREEDITLVRVPGSWEIPVAAGELARKEDIDAVIAIGVLIRGATPHFDYIASEVSKGLADLSLELRKPITFGVITADTLEQAIERAGTKHGNKGWEAALSAIEMANLFKSLR

SEQ ID NO: 4587 - protein, 1371 aa, Artificial Sequence
  SARS-CoV-2/Belgium/VAG-03013/2020__EPI_ISL_415155 spike protein (1-1211)(T874C_S1055C) LumSynth construct
MFVFLVLLPLVSSQCVNLTTRTQLPPAYTNSFTRGVYYPDKVFRSSVLHSTQDLFLPFFSNVTWFHAIHVSGTNGTKRFDNPVLPFNDGVYFASTEKSNIIRGWIFGTTLDSKTQSLLIVNNATNVVIKVCEFQFCNDPFLGVYYHKNNKSWMESEFRVYSSANNCTFEYVSQPFLMDLEGKQGNFKNLREFVFKNIDGYFKIYSKHTPINLVRDLPQGFSALEPLVDLPIGINITRFQTLLALHRSYLTPGDSSSGWTAGAAAYYVGYLQPRTFLLKYNENGTITDAVDCALDPLSETKCTLKSFTVEKGIYQTSNFRVQPTESIVRFPNITNLCPFGEVFNATRFASVYAWNRKRISNCVADYSVLYNSASFSTFKCYGVSPTKLNDLCFTNVYADSFVIRGDEVRQIAPGQTGKIADYNYKLPDDFTGCVIAWNSNNLDSKVGGNYNYLYRLFRKSNLKPFERDISTEIYQAGSTPCNGVEGFNCYFPLQSYGFQPTNGVGYQPYRVVVLSFELLHAPATVCGPKKSTNLVKNKCVNFNFNGLTGTGVLTESNKKFLPFQQFGRDIADTTDAVRDPQTLEILDITPCSFGGVSVITPGTNTSNQVAVLYQGVNCTEVPVAIHADQLTPTWRVYSTGSNVFQTRAGCLIGAEHVNNSYECDIPIGAGICASYQTQTNSPRRARSVASQSIIAYTMSLGAENSVAYSNNSIAIPTNFTISVTTEILPVSMTKTSVDCTMYICGDSTECSNLLLQYGSFCTQLNRALTGIAVEQDKNTQEVFAQVKQIYKTPPIKDFGGFNFSQILPDPSKPSKRSFIEDLLFNKVTLADAGFIKQYGDCLGDIAARDLICAQKFNGLTVLPPLLTDEMIAQYCSALLAGTITSGWTFGAGAALQIPFAMQMAYRFNGIGVTQNVLYENQKLIANQFNSAIGKIQDSLSSTATALGKLQDVVNQNAQALNTLVKQLSSNFGAISSVLNDILSRLDKVEAEVQIDRLITGRLQSLQTYVTQQLIRAAEIRASANLAATKMSECVLGQSKRVDFCGKGYHLMSFPQCAPHGVVFLHVTYVPAQEKNFTTAPAICHDGKAHFPREGVFVSNGTHWFVTQRNFYEPQIITTDNTFVSGNCDVVIGIVNNTVYDPLQPELDSFKEELDKYFKNHTSPDVDLGDISGINASVVNIQKEIDRLNEVAKNLNESLIDLQELGKYEQYIKGGGSGGGQIYEGKLTAEGLRFGIVASRFNHALVDRLVEGAIDAIVRHGGREEDITLVRVPGSWEIPVAAGELARKEDIDAVIAIGVLIRGATPHFDYIASEVSKGLADLSLELRKPITFGVITADTLEQAIERAGTKHGNKGWEAALSAIEMANLFKSLR

SEQ ID NO: 4588 - protein, 1371 aa, Artificial Sequence
  SARS-CoV-2/Belgium/BC-03016/2020__EPI_ISL_415157 spike protein (1-1211)(T874C_S1055C) LumSynth construct
MFVFLVLLPLVSSQCVNLTTRTQLPPAYTNSFTRGVYYPDKVFRSSVLHSTQDLFLPFFSNVTWFHAIHVSGTNGTKRFDNPVLPFNDGVYFASTEKSNIIRGWIFGTTLDSKTQSLLIVNNATNVVIKVCEFQFCNDPFLGVYYHKNNKSWMESEFRVYSSANNCTFEYVSQPFLMDLEGKQGNFKNLREFVFKNIDGYFKIYSKHTPINLVRDLPQGFSALEPLVDLPIGINITRFQTLLALHRSYLTPGDSSSGWTAGAAAYYVGYLQPRTFLLKYNENGTITDAVDCALDPLSETKCTLKSFTVEKGIYQTSNFRVQPTESIVRFPNITNLCPFGEVFNATRFASVYAWNRKRISNCVADYSVLYNSASFSTFKCYGVSPTKLNDLCFTNVYADSFVIRGDEVRQIAPGQTGKIADYNYKLPDDFTGCVIAWNSNNLDSKVGGNYNYLYRLFRKSNLKPFERDISTEIYQAGSTPCNGVEGFNCYFPLQSYGFQPTNGVGYQPYRVVVLSFELLHAPATVCGPKKSTNLVKNKCVNFNFNGLTGTGVLTESNKKFLPFQQFGRDIADTTDAVRDPQTLEILDITPCSFGGVSVITPGTNTSNQVAVLYQGVNCTEVPVAIHADQLTPTWRVYSTGSNVFQTRAGCLIGAEHVNNSYECDIPIGAGICASYQTQTNSPRRARSVASQSIIAYTMSLGAENSVAYSNNSIAIPTNFTISVTTEILPVSMTKTSVDCTMYICGDSTECSNLLLQYGSFCTQLNRALTGIAVEQDKNTQEVFAQVKQIYKTPPIKDFGGFNFSQILPDPSKPSKRSFIEDLLFNKVTLADAGFIKQYGDCLGDIAARDLICAQKFNGLTVLPPLLTDEMIAQYCSALLAGTITSGWTFGAGAALQIPFAMQMAYRFNGIGVTQNVLYENQKLIANQFNSAIGKIQDSLSSTAPALGKLQDVVNQNAQALNTLVKQLSSNFGAISSVLNDILSRLDKVEAEVQIDRLITGRLQSLQTYVTQQLIRAAEIRASANLAATKMSECVLGQSKRVDFCGKGYHLMSFPQCAPHGVVFLHVTYVPAQEKNFTTAPAICHDGKAHFPREGVFVSNGTHWFVTQRNFYEPQIITTDNTFVSGNCDVVIGIVNNTVYDPLQPELDSFKEELDKYFKNHTSPDVDLGDISGINASVVNIQKEIDRLNEVAKNLNESLIDLQELGKYEQYIKGGGSGGGQIYEGKLTAEGLRFGIVASRFNHALVDRLVEGAIDAIVRHGGREEDITLVRVPGSWEIPVAAGELARKEDIDAVIAIGVLIRGATPHFDYIASEVSKGLADLSLELRKPITFGVITADTLEQAIERAGTKHGNKGWEAALSAIEMANLFKSLR

SEQ ID NO: 4589 - protein, 1371 aa, Artificial Sequence
  SARS-CoV-2/Germany/BavPat3/2020__EPI_ISL_414521 spike protein (1-1211)(T874C_S1055C) LumSynth construct
MFVFLVLLPLVSSQCVNLTTRTQLPPAYTNSFTRGVYYPDKVFRSSVLHSTQDLFLPFFSNVTWFHAIHVSGTNGTKRFDNPVLPFNDGVYFASTEKSNIIRGWIFGTTLDSKTQSLLIVNNATNVVIKVCEFQFCNDPFLGVYYHKNNKSWMESEFRVYSSANNCTFEYVSQPFLMDLEGKQGNFKNLREFVFKNIDGYFKIYSKHTPINLVRDLPQGFSALEPLVDLPIGINITRFQTLLALHRSYLTPGDSSSGWTAGAAAYYVGYLQPRTFLLKYNENGTITDAVDCALDPLSETKCTLKSFTVEKGIYQTSNFRVQPTESIVRFPNITNLCPFGEVFNATRFASVYAWNRKRISNCVADYSVLYNSASFSTFKCYGVSPTKLNDLCFTNVYADSFVIRGDEVRQIAPGQTGKIADYNYKLPDDFTGCVIAWNSNNLDSKVGGNYNYLYRLFRKSNLKPFERDISTEIYQAGSTPCNGVEGFNCYFPLQSYGFQPTNGVGYQPYRVVVLSFELLHAPATVCGPKKSTNLVKNKCVNFNFNGLTGTGVLTESNKKFLPFQQFGRDIADTTDAVRDPQTLEILDITPCSFGGVSVITPGTNTSNQVAVLYQDVNCTEVPVAIHADQLTPTWRVYSTGSNVFQTRAGCLIGAEHVNNSYECDIPIGAGICASYQTQTNSPRRARSVASQSIIAYTMSLGAENSVAYSNNSIAIPTNFTISVTTEILPVSMTKTSVDCTMYICGDSTECSNLLLQYGSFCTQLNRALTGIAVEQDKNTQQVFAQVKQIYKTPPIKDFGGFNFSQILPDPSKPSKRSFIEDLLFNKVTLADAGFIKQYGDCLGDIAARDLICAQKFNGLTVLPPLLTDEMIAQYCSALLAGTITSGWTFGAGAALQIPFAMQMAYRFNGIGVTQNVLYENQKLIANQFNSAIGKIQDSLSSTASALGKLQDVVNQNAQALNTLVKQLSSNFGAISSVLNDILSRLDKVEAEVQIDRLITGRLQSLQTYVTQQLIRAAEIRASANLAATKMSECVLGQSKRVDFCGKGYHLMSFPQCAPHGVVFLHVTYVPAQEKNFTTAPAICHDGKAHFPREGVFVSNGTHWFVTQRNFYEPQIITTDNTFVSGNCDVVIGIVNNTVYDPLQPELDSFKEELDKYFKNHTSPDVDLGDISGINASVVNIQKEIDRLNEVAKNLNESLIDLQELGKYEQYIKGGGSGGGQIYEGKLTAEGLRFGIVASRFNHALVDRLVEGAIDAIVRHGGREEDITLVRVPGSWEIPVAAGELARKEDIDAVIAIGVLIRGATPHFDYIASEVSKGLADLSLELRKPITFGVITADTLEQAIERAGTKHGNKGWEAALSAIEMANLFKSLR

SEQ ID NO: 4590 - protein, 1371 aa, Artificial Sequence
  SARS-CoV-2/France/HF1805/2020__EPI_ISL_414628 spike protein (1-1211)(T874C_S1055C) LumSynth construct
MFVFLVLLPLVSSQCVNLTTRTQLPPAYTNSFTRGVYYPDKVFRSSVLHSTQDLFLPFFSNVTWFHAIHVSGTNGTKRFDNPVLPFNDGVYFASTEKSNIIRGWIFGTTLDSKTQSLLIVNNATNVVIKVCEFQFCNDPFLGVYYHKNNKSWMESEFRVYSSANNCTFEYVSQPFLMDLEGKQGNFKNLREFVFKNIDGYFKIYSKHTPINLVRDLPQGFSALEPLVDLPIGINITRFQTLLALHRSYLTPGDSSSGWTAGAAAYYVGYLQPRTFLLKYNENGTITDAVDCALDPLSETKCTLKSFTVEKGIYQTSNFRVQPTESIVRFPNITNLCPFGEVFNATRFASVYAWNRKRISNCVADYSVLYNSASFSTFKCYGVSPTKLNDLCFTNVYADSFVIRGDEVRQIAPGQTGKIADYNYKLPDDFTGCVIAWNSNNLDSKVGGNYNYLYRLFRKSNLKPFERDISTEIYQAGSTPCNGVEGFNCYFPLQSYGFQPTNGVGYQPYRVVVLSFELLHAPATVCGPKKSTNLVKNKCVNFNFNGLTGTGVLTESNKKFLPFQQFGRDIADTTDAVRDPQTLEILDITPCSFGGVSVITPGTNTSNQVAVLYQGVNCTEVPVAIHADQLTPTWRVYSTGSNVFQTRAGCLIGAEHVNNSYECDIPIGAGICASYQTQTNSPRRARSVASQSIIAYTMSLGAENSVAYSNNSIAIPTNFTISVTTEILPVSMTKTSVDCTMYICGDSTECSNLLLQYGSFCTQLNRALTGIAVEQDKNTQEVFAQVKQIYKTPPIKDFGGFNFSQILPDPSKPSKRSFIEDLLFNKVTLADAGFIKQYGDCLGDIAARDLICAQKFNGLTVLPPLLTDEMIAQYCSALLAGTITSGWTFGAGAALQIPFAMQMAYRFNGIGVTQNVLYENQKLIANQFNSAIGKIQDSLSSTASALGKLQDVVNQNAQALNTLVKQLSSNFGAISSVLNDILSRLDKVEAEVQIDRLITGRLQSLQTYVTQQLIRAAEIRASANLAATKMSECVLGQSKRVDFCGKGYHLMSFPQCAPHGVVFLHVTYVPAQEKNFTTAPAICHDGKAHFPREGVFVSNGTHWFVTQRNFYEPQIITTDNTFVSGNCDVVIGVVNNTVYDPLQPELDSFKEELDKYFKNHTSPDVDLGDISGINASVVNIQKEIDRLNEVAKNLNESLIDLQELGKYEQYIKGGGSGGGQIYEGKLTAEGLRFGIVASRFNHALVDRLVEGAIDAIVRHGGREEDITLVRVPGSWEIPVAAGELARKEDIDAVIAIGVLIRGATPHFDYIASEVSKGLADLSLELRKPITFGVITADTLEQAIERAGTKHGNKGWEAALSAIEMANLFKSLR

SEQ ID NO: 4591 - protein, 1371 aa, Artificial Sequence
  SARS-CoV-2/Netherlands/ZuidHolland_9/2020__EPI_ISL_414445 spike protein (1-1211)(T874C_S1055C) LumSynth construct
MFVFLVLLPLVSSQCVNLTTRTQLPPAYTNSFTRGVYYPDKVFRSSVLHSTQDLFLPFFSNVTWFHAIHVSGTNGTKRFDNPVLPFNDGVYFASTEKSNIIRGWIFGTTLDSKTQSLLIVNNATNVVIKVCEFQFCNDPFLGVYYHKNNKSWMESEFRVYSSANNCTFEYVSQPFLMDLEGKQGNFKNLREFVFKNIDGYFKIYSKHTPINLVRDLPQGFSALEPLVDLPIGINITRFQTLLALHRSYLTPGDSSSGWTAGAAAYYVGYLQPRTFLLKYNENGTITDAVDCALDPLSETKCTLKSFTVEKGIYQTSNFRVQPTESIVRFPNITNLCPFGEVFNATRFASVYAWNRKRISNCVADYSVLYNSASFSTFKCYGVSPTKLNDLCFTNVYADSFVIRGDEVRQIAPGQTGKIADYNYKLPDDFTGCVIAWNSNNLDSKVGGNYNYLYRLFRKSNLKPFERDISTEIYQAGSTPCNGVEGFNCYFPLQSYGFQPTNGVGYQPYRVVVLSFELLHAPATVCGPKKSTNLVKNKCVNFNFNGLTGTGVLTESNKKFLPFQQFGRDIADTTDAVRDPQTLEILDITPCSFGGVSVITPGTNTSNQVAVLYQGVNCTEVPVAIHADQLTPTWRVYSTGSNVFQTRAGCLIGAEHVNNSYECDIPIGAGICASYQTQTNSPRRARSVASQSIIAYTMSLGAENSVAYSNNSIAIPTNFTISVTTEILPVSMTKTSVDCTMYICGDSTECSNLLLQYGSFCTQLNRALTGIAVEQDKNTQEVFAQVKQIYKTPPIKDFGGFNFSQILPDPSKPSKRSFIEDLLFNKVTLADAGFIKQYGDCLGDIAARDLICVQKFNGLTVLPPLLTDEMIAQYCSALLAGTITSGWTFGAGAALQIPFAMQMAYRFNGIGVTQNVLYENQKLIANQFNSAIGKIQDSLSSTASALGKLQDVVNQNAQALNTLVKQLSSNFGAISSVLNDILSRLDKVEAEVQIDRLITGRLQSLQTYVTQQLIRAAEIRASANLAATKMSECVLGQSKRVDFCGKGYHLMSFPQCAPHGVVFLHVTYVPAQEKNFTTAPAICHDGKAHFPREGVFVSNGTHWFVTQRNFYEPQIITTDNTFVSGNCDVVIGIVNNTVYDPLQPELDSFKEELDKYFKNHTSPDVDLGDISGINASVVNIQKEIDRLNEVAKNLNESLIDLQELGKYEQYIKGGGSGGGQIYEGKLTAEGLRFGIVASRFNHALVDRLVEGAIDAIVRHGGREEDITLVRVPGSWEIPVAAGELARKEDIDAVIAIGVLIRGATPHFDYIASEVSKGLADLSLELRKPITFGVITADTLEQAIERAGTKHGNKGWEAALSAIEMANLFKSLR

SEQ ID NO: 4592 - protein, 1371 aa, Artificial Sequence
  SARS-CoV-2/Finland/FIN03032020A/2020__EPI_ISL_413602 spike protein (1-1211)(T874C_S1055C) LumSynth construct
MFVFLVLLPLVSSQCVNLTTRTQLPPAYTNSFTRGVYYPDKVFRSSVLHSTQDLFLPFFSNVTWFHAIHVSGTNGTKRFDNPVLPFNDGVYFASTEKSNIIRGWIFGTTLDSKTQSLLIVNNATNVVIKVCEFQFCNDPFLGVYYHKNNKSWMESEFRVYSSANNCTFEYVSQPFLMDLEGKQGNFKNLREFVFKNIDGYFKIYSKHTPINLVRDLPQGFSALEPLVDLPIGINITRFQTLLALHRSYLTPGDSSSGWTAGAAAYYVGYLQPRTFLLKYNENGTITDAVDCALDPLSETKCTLKSFTVEKGIYQTSNFRVQPTESIVRFPNITNLCPFGEVFNATRFASVYAWNRKRISNCVADYSVLYNSASFSTFKCYGVSPTKLNDLCFTNVYADSFVIRGDEVRQIAPGQTGKIADYNYKLPDDFTGCVISWNSNNLDSKVGGNYNYLYRLFRKSNLKPFERDISTEIYQAGSTPCNGVEGFNCYFPLQSYGFQPTNGVGYQPYRVVVLSFELLHAPATVCGPKKSTNLVKNKCVNFNFNGLTGTGVLTESNKKFLPFQQFGRDIADTTDAVRDPQTLEILDITPCSFGGVSVITPGTNTSNQVAVLYQGVNCTEVPVAIHADQLTPTWRVYSTGSNVFQTRAGCLIGAEHVNNSYECDIPIGAGICASYQTQTNSPRRARSVASQSIIAYTMSLGAENSVAYSNNSIAIPTNFTISVTTEILPVSMTKTSVDCTMYICGDSTECSNLLLQYGSFCTQLNRALTGIAVEQDKNTQEVFAQVKQIYKTPPIKDFGGFNFSQILPDPSKPSKRSFIEDLLFNKVTLADAGFIKQYGDCLGDIAARDLICAQKFNGLTVLPPLLTDEMIAQYCSALLAGTITSGWTFGAGAALQIPFAMQMAYRFNGIGVTQNVLYENQKLIANQFNSAIGKIQDSLSSTASALGKLQDVVNQNAQALNTLVKQLSSNFGAISSVLNDILSRLDKVEAEVQIDRLITGRLQSLQTYVTQQLIRAAEIRASANLAATKMSECVLGQSKRVDFCGKGYHLMSFPQCAPHGVVFLHVTYVPAQEKNFTTAPAICHDGKAHFPREGVFVSNGTHWFVTQRNFYEPQIITTDNTFVSGNCDVVIGIVNNTVYDPLQPELDSFKEELDKYFKNHTSPDVDLGDISGINASVVNIQKEIDRLNEVAKNLNESLIDLQELGKYEQYIKGGGSGGGQIYEGKLTAEGLRFGIVASRFNHALVDRLVEGAIDAIVRHGGREEDITLVRVPGSWEIPVAAGELARKEDIDAVIAIGVLIRGATPHFDYIASEVSKGLADLSLELRKPITFGVITADTLEQAIERAGTKHGNKGWEAALSAIEMANLFKSLR

SEQ ID NO: 4593 - protein, 1371 aa, Artificial Sequence
  SARS-CoV-2/France/GE1977/2020__EPI_ISL_414632 spike protein (1-1211)(T874C_S1055C) LumSynth construct
MFVFLVLLPLVSSQCVNLTTRTQLPPAYTNSFTRGVYYPDKVFRSSVLHSTQDLFLPFFSNVTWFHAIHVSGTNGTKRFDNPVLPFNDGVYFASTEKSNIIRGWIFGTTLDSKTQSLLIVNNATNVVIKVCEFQFCNDPFLGVYYHKNNKSWMESEFRVYSSANNCTFEYVSQPFLMDLEGKQGNFKNLREFVFKNIDGYFKIYSKHTPINLVRDLPQGFSALEPLVDLPIGINITRFQTLLALHRSYLTPGDSSSGWTAGAAAYYVGYLQPRTFLLKYNENGTITDAVDCALDPLSETKCTLKSFTVEKGIYQTSNFRVQPTESIVRFPNITNLCPFGEVFNATRFASVYAWNRKRISNCVADYSVLYNSASFSTFKCYGVSPTKLNDLCFTNVYADSFVIRGDEVRQIAPGQTGKIADYNYKLPDDFTGCVIAWNSNNLDSKVGGNYNYLYRLFRKSNLKPFERDISTEIYQAGSTPCNGVEGFNCYFPLQSYGFQPTNGVGYQPYRVVVLSFELLHAPATVCGPKKSTNLVKNKCVNFNFNGLTGTGVLTESNKKFLPFQQFGRDIADTTDAVRDPQTLEILDITPCSFGGVSVITPGTNTSNQVAVLYQGVNCTEVPVAIHADQLTPTWRVYSTGSNVFQTRAGCLIGAEHVNNSYECDIPIGAGICASYQTQTNSPRRARSVASQSIIAYTMSLGAENSVAYSNNSIAIPTNFTISVTTEILPVSMTKTSVDCTMYICGDSTECSNLLLQYGSFCTQLNRALTGIAVEQDKNTQEVFAQVKQIYKTPPIKDFGGFNFSQILPDPSKPSKRSFIEDLLFNKVTLADAGFIKQYGDCLGDIAARDLICAQKFNGLTVLPPLLTDEMIAQYCSALLAGTITSGWTFGAGAALQIPFAMQMAYRFNGIGVTQNVLYENQKLIANQFNSAIGKIQDSLFSTASALGKLQDVVNQNAQALNTLVKQLSSNFGAISSVLNDILSRLDKVEAEVQIDRLITGRLQSLQTYVTQQLIRAAEIRASANLAATKMSECVLGQSKRVDFCGKGYHLMSFPQCAPHGVVFLHVTYVPAQEKNFTTAPAICHDGKAHFPREGVFVSNGTHWFVTQRNFYEPQIITTDNTFVSGNCDVVIGIVNNTVYDPLQPELDSFKEELDKYFKNHTSPDVDLGDISGINASVVNIQKEIDRLNEVAKNLNESLIDLQELGKYEQYIKGGGSGGGQIYEGKLTAEGLRFGIVASRFNHALVDRLVEGAIDAIVRHGGREEDITLVRVPGSWEIPVAAGELARKEDIDAVIAIGVLIRGATPHFDYIASEVSKGLADLSLELRKPITFGVITADTLEQAIERAGTKHGNKGWEAALSAIEMANLFKSLR

SEQ ID NO: 4594 - protein, 1371 aa, Artificial Sequence
  SARS-CoV-2/Finland/FIN-313/2020__EPI_ISL_414641 spike protein (1-1211)(T874C_S1055C) LumSynth construct
MFVFLVLLPLVSSQCVNLTTRTQLPPAYTNSFTRGVYYPDKVFRSSVLHSTQDLFLPFFSNVTWFHAIHVSGTNGTKRFDNPVLPFNDGVYFASTEKSNIIRGWIFGTTLDSKTQSLLIVNNATNVVIKVCEFQFCNDPFLGVYYHKNNKSWMESEFRVYSSANNCTFEYVSQPFLMDLEGKQGNFKNLREFVFKNIDGYFKIYSKHTPINLVRDLPQGFSALEPLVDLPIGINITRFKTLLALHRSYLTPGDSSSGWTAGAAAYYVGYLQPRTFLLKYNENGTITDAVDCALDPLSETKCTLKSFTVEKGIYQTSNFRVQPTESIVRFPNITNLCPFGEVFNATRFASVYAWNRKRISNCVADYSVLYNSASFSTFKCYGVSPTKLNDLCFTNVYADSFVIRGDEVRQIAPGQTGKIADYNYKLPDDFTGCVIAWNSNNLDSKVGGNYNYLYRLFRKSNLKPFERDISTEIYQAGSTPCNGVEGFNCYFPLQSYGFQPTNGVGYQPYRVVVLSFELLHAPATVCGPKKSTNLVKNKCVNFNFNGLTGTGVLTESNKKFLPFQQFGRDIADTTDAVRDPQTLEILDITPCSFGGVSVITPGTNTSNQVAVLYQGVNCTEVPVAIHADQLTPTWRVYSTGSNVFQTRAGCLIGAEHVNNSYECDIPIGAGICASYQTQTNSPRRARSVASQSIIAYTMSLGAENSVAYSNNSIAIPTNFTISVTTEILPVSMTKTSVDCTMYICGDSTECSNLLLQYGSFCTQLNRALTGIAVEQDKNTQEVFAQVKQIYKTPPIKDFGGFNFSQILPDPSKPSKRSFIEDLLFNKVTLADAGFIKQYGDCLGDIAARDLICAQKFNGLTVLPPLLTDEMIAQYCSALLAGTITSGWTFGAGAALQIPFAMQMAYRFNGIGVTQNVLYENQKLIANQFNSAIGKIQDSLSSTASALGKLQDVVNQNAQALNTLVKQLSSNFGAISSVLNDILSRLDKVEAEVQIDRLITGRLQSLQTYVTQQLIRAAEIRASANLAATKMSECVLGQSKRVDFCGKGYHLMSFPQCAPHGVVFLHVTYVPAQEKNFTTAPAICHDGKAHFPREGVFVSNGTHWFVTQRNFYEPQIITTDNTFVSGNCDVVIGIVNNTVYDPLQPELDSFKEELDKYFKNHTSPDVDLGDISGINASVVNIQKEIDRLNEVAKNLNESLIDLQELGKYEQYIKGGGSGGGQIYEGKLTAEGLRFGIVASRFNHALVDRLVEGAIDAIVRHGGREEDITLVRVPGSWEIPVAAGELARKEDIDAVIAIGVLIRGATPHFDYIASEVSKGLADLSLELRKPITFGVITADTLEQAIERAGTKHGNKGWEAALSAIEMANLFKSLR

SEQ ID NO: 4595 - protein, 1371 aa, Artificial Sequence
  SARS-CoV-2/Netherlands/ZuidHolland_2/2020__EPI_ISL_414556 spike protein (1-1211)(T874C_S1055C) LumSynth construct
MFVFLVLLPLVSSQCVNLTTRTQLPPAYTNSFTRGVYYPDKVFRSSVLHSTQDLFLPFFSNVTWFHAIHVSGTNGTKRFDNPVLPFNDGVYFASTEKSNIIRGWIFGTTLDSKTQSLLIVNNATNVVIKVCEFQFCNDPFLGVYYHKNNKSWMESEFRVYSSANNCTFEYVSQPFLMDLEGKQGNFKNLREFVFKNIDGYFKIYSKHTPINLVRDLPQGFSALEPLVDLPIGINITRFQTLLALHRSYLTPGDSSSGWTAGAAAYYVGYLQPRTFLLKYNENGTITDAVDCALDPLSETKCTLKSFTVEKGIYQTSNFRVQPTESIVRFPNITNLCPFGEVFNATRFASVYAWNRKRISNCVADYSVLYNSASFSTFKCYGVSPTKLNDLCFTNVYADSFVIRGDEVRQIAPGQTGKIADYNYKLPDDFTGCVIAWNSNNLDSKVGGNYNYLYRLFRKSNLKPFERDISTEIYQAGSTPCNGVEGFNCYFPLQSYGFQPTNGVGYQPYRVVVLSFELLHAPATVCGPKKSTNLVKNKCVNFNFNGLTGTGVLTESNKKFLPFQQFGRDIADTTDAVRDPQTLEILDITPCSFGGVSVITPGTNTSNQVAVLYQGVNCTEVPVAIHADQLTPTWRVYSTGSNVFQTRAGCLIGAEHVNNSYECDIPIGAGICASYQTQTNSPRRARSVASQSIIAYTMSLGAENSVAYSNNSIAIPTNFTISVTTEILPVSMTKTSVDCTMYICGDSTECSNLLLQYGSFCTQLNRALTGIALEQDKNTQEVFAQVKQIYKTPPIKDFGGFNFSQILPDPSKPSKRSFIEDLLFNKVTLADAGFIKQYGDCLGDIAARDLICAQKFNGLTVLPPLLTDEMIAQYCSALLAGTITSGWTFGAGAALQIPFAMQMAYRFNGIGVTQNVLYENQKLIANQFNSAIGKIQDSLSSTASALGKLQDVVNQNAQALNTLVKQLSSNFGAISSVLNDILSRLDKVEAEVQIDRLITGRLQSLQTYVTQQLIRAAEIRASANLAATKMSECVLGQSKRVDFCGKGYHLMSFPQCAPHGVVFLHVTYVPAQEKNFTTAPAICHDGKAHFPREGVFVSNGTHWFVTQRNFYEPQIITTDNTFVSGNCDVVIGIVNNTVYDPLQPELDSFKEELDKYFKNHTSPDVDLGDISGINASVVNIQKEIDRLNEVAKNLNESLIDLQELGKYEQYIKGGGSGGGQIYEGKLTAEGLRFGIVASRFNHALVDRLVEGAIDAIVRHGGREEDITLVRVPGSWEIPVAAGELARKEDIDAVIAIGVLIRGATPHFDYIASEVSKGLADLSLELRKPITFGVITADTLEQAIERAGTKHGNKGWEAALSAIEMANLFKSLR

SEQ ID NO: 4596 - protein, 1371 aa, Artificial Sequence
  SARS-CoV-2/USA/WA-UW31/2020__EPI_ISL_414618 spike protein (1-1211)(T874C_S1055C) LumSynth construct
MFVFLVLLPLVSSQCVNLTTRTQLPPAYTNSFTRGVYYPDKVFRSSVLHSTQDLFLPFFSNVTWFHAIHVSGTNGTKRFDNPVLPFNDGVYFASTEKSNIIRGWIFGTTLDSKTQSLLIVNNATNVVIKVCEFQFCNDPFLGVYYHKNNKSWMESEFRVYSSANNCTFEYVSQPFLMDLEGKQGNFKNLREFVFKNIDGYFKIYSKHTPINLVRDLPQGFSALEPLVDLPIGINITRFQTLLALHRSYLTPGDSSSGWTAGAAAYYVGYLQPRTFLLKYNENGTITDAVDCALDPLSETKCTLKSFTVEKGIYQTSNFRVQPTESIVRFPNITNLCPFGEVFNATRFASVYAWNRKRISNCVADYSVLYNSASFSTFKCYGVSPTKLNDLCFTNVYADSFVIRGDEVRQIAPGQTGKIADYNYKLPDDFTGCVIAWNSNNLDSKVGGNYNYLYRLFRKSNLKPFERDISTEIYQAGSTPCNGAEGFNCYFPLQSYGFQPTNGVGYQPYRVVVLSFELLHAPATVCGPKKSTNLVKNKCVNFNFNGLTGTGVLTESNKKFLPFQQFGRDIADTTDAVRDPQTLEILDITPCSFGGVSVITPGTNTSNQVAVLYQDVNCTEVPVAIHADQLTPTWRVYSTGSNVFQTRAGCLIGAEHVNNSYECDIPIGAGICASYQTQTNSPRRARSVASQSIIAYTMSLGAENSVAYSNNSIAIPTNFTISVTTEILPVSMTKTSVDCTMYICGDSTECSNLLLQYGSFCTQLNRALTGIAVEQDKNTQEVFAQVKQIYKTPPIKDFGGFNFSQILPDPSKPSKRSFIEDLLFNKVTLADAGFIKQYGDCLGDIAARDLICAQKFNGLTVLPPLLTDEMIAQYCSALLAGTITSGWTFGAGAALQIPFAMQMAYRFNGIGVTQNVLYENQKLIANQFNSAIGKIQDSLSSTASALGKLQDVVNQNAQALNTLVKQLSSNFGAISSVLNDILSRLDKVEAEVQIDRLITGRLQSLQTYVTQQLIRAAEIRASANLAATKMSECVLGQSKRVDFCGKGYHLMSFPQCAPHGVVFLHVTYVPAQEKNFTTAPAICHDGKAHFPREGVFVSNGTHWFVTQRNFYEPQIITTDNTFVSGNCDVVIGIVNNTVYDPLQPELDSFKEELDKYFKNHTSPDVDLGDISGINASVVNIQKEIDRLNEVAKNLNESLIDLQELGKYEQYIKGGGSGGGQIYEGKLTAEGLRFGIVASRFNHALVDRLVEGAIDAIVRHGGREEDITLVRVPGSWEIPVAAGELARKEDIDAVIAIGVLIRGATPHFDYIASEVSKGLADLSLELRKPITFGVITADTLEQAIERAGTKHGNKGWEAALSAIEMANLFKSLR

SEQ ID NO: 4597 - protein, 1371 aa, Artificial Sequence
  SARS-CoV-2/South Korea/SNU01/2020__EPI_ISL_411929 spike protein (1-1211)(T874C_S1055C) LumSynth construct
MFVFLVLLPLVSSQCVNLTTRTQLPPAYTNSFTRGVYYPDKVFRSSVLHSTQDLFLPFFSNVTWFHAIHVSGTNGTKRFDNPVLPFNDGVYFASTEKSNIIRGWIFGTTLDSKTQSLLIVNNATNVVIKVCEFQFCNDPFLGVYYHKNNKSWMESEFRVYSSANNCTFEYVSQPFLMDLEGKQGNFKNLREFVFKNIDGYFKIYSKHTPINLVRDLPQGFWALEPLVDLPIGINITRFQTLLALHRSYLTPGDSSSGWTAGAAAYYVGYLQPRTFLLKYNENGTITDAVDCALDPLSETKCTLKSFTVEKGIYQTSNFRVQPTESIVRFPNITNLCPFGEVFNATRFASVYAWNRKRISNCVADYSVLYNSASFSTFKCYGVSPTKLNDLCFTNVYADSFVIRGDEVRQIAPGQTGKIADYNYKLPDDFTGCVIAWNSNNLDSKVGGNYNYLYRLFRKSNLKPFERDISTEIYQAGSTPCNGVEGFNCYFPLQSYGFQPTNGVGYQPYRVVVLSFELLHAPATVCGPKKSTNLVKNKCVNFNFNGLTGTGVLTESNKKFLPFQQFGRDIADTTDAVRDPQTLEILDITPCSFGGVSVITPGTNTSNQVAVLYQDVNCTEVPVAIHADQLTPTWRVYSTGSNVFQTRAGCLIGAEHVNNSYECDIPIGAGICASYQTQTNSPRRARSVASQSIIAYTMSLGAENSVAYSNNSIAIPTNFTISVTTEILPVSMTKTSVDCTMYICGDSTECSNLLLQYGSFCTQLNRALTGIAVEQDKNTQEVFAQVKQIYKTPPIKDFGGFNFSQILPDPSKPSKRSFIEDLLFNKVTLADAGFIKQYGDCLGDIAARDLICAQKFNGLTVLPPLLTDEMIAQYCSALLAGTITSGWTFGAGAALQIPFAMQMAYRFNGIGVTQNVLYENQKLIANQFNSAIGKIQDSLSSTASALGKLQDVVNQNAQALNTLVKQLSSNFGAISSVLNDILSRLDKVEAEVQIDRLITGRLQSLQTYVTQQLIRAAEIRASANLAATKMSECVLGQSKRVDFCGKGYHLMSFPQCAPHGVVFLHVTYVPAQEKNFTTAPAICHDGKAHFPREGVFVSNGTHWFVTQRNFYEPQIITTDNTFVSGNCDVVIGIVNNTVYDPLQPELDSFKEELDKYFKNHTSPDVDLGDISGINASVVNIQKEIDRLNEVAKNLNESLIDLQELGKYEQYIKGGGSGGGQIYEGKLTAEGLRFGIVASRFNHALVDRLVEGAIDAIVRHGGREEDITLVRVPGSWEIPVAAGELARKEDIDAVIAIGVLIRGATPHFDYIASEVSKGLADLSLELRKPITFGVITADTLEQAIERAGTKHGNKGWEAALSAIEMANLFKSLR

SEQ ID NO: 4598 - protein, 1371 aa, Artificial Sequence
  SARS-CoV-2/China/WF0004/2020__EPI_ISL_413694 spike protein (1-1211)(T874C_S1055C) LumSynth construct
MFVFLVLLPLVSSQCVNLTTRTQLPPAYTNSFTRGVYYPDKVFRSSVLHSTQDLFLPFFSNVTWFHAIHVSGTNGTKRFDNPVLPFNDGVYFASTEKSNIIRGWIFGTTLDSKTQSLLIVNNATNVVIKVCEFQFCNDPFLGVYYHKNNKSWTESEFRVYSSANNCTFEYVSQPFLMDLEGKQGNFKNLREFVFKNIDGYFKIYSKHTPINLVRDLPQGFSALEPLVDLPIGINITRFQTLLALHRSYLTPGDSSSGWTAGAAAYYVGYLQPRTFLLKYNENGTITDAVDCALDPLSETKCTLKSFTVEKGIYQTSNFRVQPTESIVRFPNITNLCPFGEVFNATRFASVYAWNRKRISNCVADYSVLYNSASFSTFKCYGVSPTKLNDLCFTNVYADSFVIRGDEVRQIAPGQTGKIADYNYKLPDDFTGCVIAWNSNNLDSKVGGNYNYLYRLFRKSNLKPFERDISTEIYQAGSTPCNGVEGFNCYFPLQSYGFQPTNGVGYQPYRVVVLSFELLHAPATVCGPKKSTNLVKNKCVNFNFNGLTGTGVLTESNKKFLPFQQFGRDIADTTDAVRDPQTLEILDITPCSFGGVSVITPGTNTSNQVAVLYQDVNCTEVPVAIHADQLTPTWRVYSTGSNVFQTRAGCLIGAEHVNNSYECDIPIGAGICASYQTQTNSPRRARSVASQSIIAYTMSLGAENSVAYSNNSIAIPTNFTISVTTEILPVSMTKTSVDCTMYICGDSTECSNLLLQYGSFCTQLNRALTGIAVEQDKNTQEVFAQVKQIYKTPPIKDFGGFNFSQILPDPSKPSKRSFIEDLLFNKVTLADAGFIKQYGDCLGDIAARDLICAQKFNGLTVLPPLLTDEMIAQYCSALLAGTITSGWTFGAGAALQIPFAMQMAYRFNGIGVTQNVLYENQKLIANQFNSAIGKIQDSLSSTASALGKLQDVVNQNAQALNTLVKQLSSNFGAISSVLNDILSRLDKVEAEVQIDRLITGRLQSLQTYVTQQLIRAAEIRASANLAATKMSECVLGQSKRFDFCGKGYHLMSFPQCAPHGVVFLHVTYVPAQEKNFTTAPAICHDGKAHFPREGVFVSNGTHWFVTQRNFYEPQIITTDNTFVSGNCDVVIGIVNNTVYDPLQPELDSFKEELDKYFKNHTSPDVDLGDISGINASVVNIQKEIDRLNEVAKNLNESLIDLQELGKYEQYIKGGGSGGGQIYEGKLTAEGLRFGIVASRFNHALVDRLVEGAIDAIVRHGGREEDITLVRVPGSWEIPVAAGELARKEDIDAVIAIGVLIRGATPHFDYIASEVSKGLADLSLELRKPITFGVITADTLEQAIERAGTKHGNKGWEAALSAIEMANLFKSLR

SEQ ID NO: 4599 - protein, 1371 aa, Artificial Sequence
  SARS-CoV-2/China/WF0028/2020__EPI_ISL_413791 spike protein (1-1211)(T874C_S1055C) LumSynth construct
MFVFLVLLPLVSSQCVNLTTRTQLPPAYTNSFTRGVYYPDKVFRSSVLHSTQDLFLPFFSNVTWFHAIHVSGTNGTKRFDNPVLPFNDGVYFASTEKSNIIRGWIFGTTLDSKTQSLLIVNNATNVVIKVCEFQFCNDPFLGVYYHKNNKSWMESEFRVYSSANNCTFEYVSQPFLMDLEGKQGNFKNLREFVFKNIDGYFKIYSKHTPINLVRDLPQGFSALEPLVDLPIGINITRFQTLLALHRSYLTPGDSSSGWTAGAAAYYVGYLQPRTFLLKYNENGTITDAVDCALDPLSETKCTLKSFTVEKGIYQTSNFRVQPTESIVRFPNITNLCPFGEVFNATRFASVYAWNRKRISNCVADYSVLYNSASFSTFKCYGVSPTKLNDLCFTNVYADSFVIRGDEVRQIAPGQTGKIADYNYKLPDDFTGCVIAWNSNNLDSKVGGNYNYLYRLFRKSNLKPFERDISTEIYQAGSTPCNGVEGFNCYFPLQSYGFQPTNGVGYQPYRVVVLSFELLHAPATVCGPKKSTNLVKNKCVNFNFNGLTGTGVLTESNKKFLPFQQFGRDIADTTDAVRDPQTLEILDITPCSFGGVSVITPGTNTSNQVAVLYQDVNCTEVPVAIHADQLTPTWRVYSTGSNVFQTRAGCLIGAEHVNNSYECDIPIGAGICASYQTQTNSPRRARSVASQSIIAYTMSLGAENSVAYSNNSIAIPTNFTISVTTEILPVSMTKTSVDCTMYICGDSTECSNLLLQYGSFCTQLNRALTGIAVEQDKNTQEVFAQVKQIYKTPPIKDFGGFNFSQILPDPSKPSKRSFIEDLLFNKVTLADAGFIKQYGDCLGDIAARDLICAQKFNGLTVLPPLLTDEMIAQYCSALLAGTITSGWTFGAGAALQIPFAMQMAYRFNGIGVTQNVLYENQKLIANQFNSAIGKIQDSLSSTASALGKLQDVVNQNAQALNTLVKQLSSNFGAISSVLNDILSRLDKVEAEVQIDRLITGRLQSLQTYVTQQLIRAAEIRASANLAATKMSECVLGQSKRVDFCGKGYHLMSFPQCAPHGVVFLHVTYVPAQEKNFTTAPAICHDGKAHFPREGVFVSNGTHWFVTQRNFYEPQIITTDNTFVSGNCDVVIGIVNNTVYDPLQPELESFKEELDKYFKNHTSPDVDLGDISGINASVVNIQKEIDRLNEVAKNLNESLIDLQELGKYEQYIKGGGSGGGQIYEGKLTAEGLRFGIVASRFNHALVDRLVEGAIDAIVRHGGREEDITLVRVPGSWEIPVAAGELARKEDIDAVIAIGVLIRGATPHFDYIASEVSKGLADLSLELRKPITFGVITADTLEQAIERAGTKHGNKGWEAALSAIEMANLFKSLR

SEQ ID NO: 4600 - protein, 1371 aa, Artificial Sequence
  SARS-CoV-2/2019-nCoV/USA-CruiseA-18/2020__MT159716.1 spike protein (1-1211)(T874C_S1055C) LumSynth construct
MFVFLVLLPLVSSQCVNLTTRTQLPPAYTNSFTRGVYYPDKVFRSSVLHSTQDLFLPFFSNVTWFHAIHVSGTNGTKRFDNPVLPFNDGVYFASTEKSNIIRGWIFGTTLDSKTQSLLIVNNATNVVIKVCEFQFCNDPFLGVYYHKNNKSWMESELRVYSSANNCTFEYVSQPFLMDLEGKQGNFKNLREFVFKNIDGYFKIYSKHTPINLVRDLPQGFSALEPLVDLPIGINITRFQTLLALHRSYLTPGDSSSGWTAGAAAYYVGYLQPRTFLLKYNENGTITDAVDCALDPLSETKCTLKSFTVEKGIYQTSNFRVQPTESIVRFPNITNLCPFGEVFNATRFASVYAWNRKRISNCVADYSVLYNSASFSTFKCYGVSPTKLNDLCFTNVYADSFVIRGDEVRQIAPGQTGKIADYNYKLPDDFTGCVIAWNSNNLDSKVGGNYNYLYRLFRKSNLKPFERDISTEIYQAGSTPCNGVEGFNCYFPLQSYGFQPTNGVGYQPYRVVVLSFELLHAPATVCGPKKSTNLVKNKCVNFNFNGLTGTGVLTESNKKFLPFQQFGRDIADTTDAVRDPQTLEILDITPCSFGGVSVITPGTNTSNQVAVLYQDVNCTEVPVAIHADQLTPTWRVYSTGSNVFQTRAGCLIGAEHVNNSYECDIPIGAGICASYQTQTNSPRRARSVASQSIIAYTMSLGAENSVAYSNNSIAIPTNFTISVTTEILPVSMTKTSVDCTMYICGDSTECSNLLLQYGSFCTQLNRALTGIAVEQDKNTQEVFAQVKQIYKTPPIKDFGGFNFSQILPDPSKPSKRSFIEDLLFNKVTLADAGFIKQYGDCLGDIAARDLICAQKFNGLTVLPPLLTDEMIAQYCSALLAGTITSGWTFGAGAALQIPFAMQMAYRFNGIGVTQNVLYENQKLIANQFNSAIGKIQDSLSSTASALGKLQDVVNQNAQALNTLVKQLSSNFGAISSVLNDILSRLDKVEAEVQIDRLITGRLQSLQTYVTQQLIRAAEIRASANLAATKMSECVLGQSKRVDFCGKGYHLMSFPQCAPHGVVFLHVTYVPAQEKNFTTAPAICHDGKAHFPREGVFVSNGTHWFVTQRNFYEPQIITTDNTFVSGNCDVVIGIVNNTVYDPLQPELDSFKEELDKYFKNHTSPDVDLGDISGINASVVNIQKEIDRLNEVAKNLNESLIDLQELGKYEQYIKGGGSGGGQIYEGKLTAEGLRFGIVASRFNHALVDRLVEGAIDAIVRHGGREEDITLVRVPGSWEIPVAAGELARKEDIDAVIAIGVLIRGATPHFDYIASEVSKGLADLSLELRKPITFGVITADTLEQAIERAGTKHGNKGWEAALSAIEMANLFKSLR

SEQ ID NO: 4601 - protein, 1371 aa, Artificial Sequence
  SARS-CoV-2/SARS-CoV-2/Yunnan-01/human/2020/CHN__MT049951.1 spike protein (1-1211)(T874C_S1055C) LumSynth construct
MFVFLVLLPLVSSQCVNLTTRTQLPPANTNSFTRGVYYPDKVFRSSVLHSTQDLFLPFFSNVTWFHAIHVSGTNGTKRFDNPVLPFNDGVYFASTEKSNIIRGWIFGTTLDSKTQSLLIVNNATNVVIKVCEFQFCNDPFLGVYYHKNNKSWMESEFRVYSSANNCTFEYVSQPFLMDLEGKQGNFKNLREFVFKNIDGYFKIYSKHTPINLVRDLPQGFSALEPLVDLPIGINITRFQTLLALHRSYLTPGDSSSGWTAGAAAYYVGYLQPRTFLLKYNENGTITDAVDCALDPLSETKCTLKSFTVEKGIYQTSNFRVQPTESIVRFPNITNLCPFGEVFNATRFASVYAWNRKRISNCVADYSVLYNSASFSTFKCYGVSPTKLNDLCFTNVYADSFVIRGDEVRQIAPGQTGKIADYNYKLPDDFTGCVIAWNSNNLDSKVGGNYNYLYRLFRKSNLKPFERDISTEIYQAGSTPCNGVEGFNCYFPLQSYGFQPTNGVGYQPYRVVVLSFELLHAPATVCGPKKSTNLVKNKCVNFNFNGLTGTGVLTESNKKFLPFQQFGRDIADTTDAVRDPQTLEILDITPCSFGGVSVITPGTNTSNQVAVLYQDVNCTEVPVAIHADQLTPTWRVYSTGSNVFQTRAGCLIGAEHVNNSYECDIPIGAGICASYQTQTNSPRRARSVASQSIIAYTMSLGAENSVAYSNNSIAIPTNFTISVTTEILPVSMTKTSVDCTMYICGDSTECSNLLLQYGSFCTQLNRALTGIAVEQDKNTQEVFAQVKQIYKTPPIKDFGGFNFSQILPDPSKPSKRSFIEDLLFNKVTLADAGFIKQYGDCLGDIAARDLICAQKFNGLTVLPPLLTDEMIAQYCSALLAGTITSGWTFGAGAALQIPFAMQMAYRFNGIGVTQNVLYENQKLIANQFNSAIGKIQDSLSSTASALGKLQDVVNQNAQALNTLVKQLSSNFGAISSVLNDILSRLDKVEAEVQIDRLITGRLQSLQTYVTQQLIRAAEIRASANLAATKMSECVLGQSKRVDFCGKGYHLMSFPQCAPHGVVFLHVTYVPAQEKNFTTAPAICHDGKAHFPREGVFVSNGTHWFVTQRNFYEPQIITTDNTFVSGNCDVVIGIVNNTVYDPLQPELDSFKEELDKYFKNHTSPDVDLGDISGINASVVNIQKEIDRLNEVAKNLNESLIDLQELGKYEQYIKGGGSGGGQIYEGKLTAEGLRFGIVASRFNHALVDRLVEGAIDAIVRHGGREEDITLVRVPGSWEIPVAAGELARKEDIDAVIAIGVLIRGATPHFDYIASEVSKGLADLSLELRKPITFGVITADTLEQAIERAGTKHGNKGWEAALSAIEMANLFKSLR

SEQ ID NO: 4602 - protein, 1371 aa, Artificial Sequence
  SARS-CoV-2/USA/WA-UW292/2020__EPI_ISL_418077 spike protein (1-1211)(T874C_S1055C) LumSynth construct
MFVFLVLLPLVSSQCVNLTTRTQLPPAYTNSFTRGVYYPDKVFRSSVLHSTQDLFLPFFSNVTWFHAIHVSGTNGTKRFDNPVLPFNDGVYFASTEKSNIIRGWIFGTTLDSKTQSLLIVNNATNVVIKVCEFQFCNDPFLGVYYHKNNKSWMESEFRVYSSANNCTFEYVSQPFLMDLEGKQGNFKNLREFVFKNIDGYFKIYSKHTPINLVRDLPQGFSALEPLVDLPIGINITRFQTLLALHRSYLTPGDSSSGWTAGAAAYYVGYLQPRTFLLKYNENGTITDAVDCALDPLSETKCTLKSFTVEKGIYQTSNFRVQPTESIVRFPNITNLCPFGEVFNATRFASVYAWNRKRISNCVADYSVLYNSASFSTFKCYGVSPTKLNDLCFTNVYADSFVIRGDEVRQIAPGQTGKIADYNYKLPDDFTGCVIAWNSNNLDSKVGGNYNYLYRLFRKSNLKPFERDISTEIYQASSTPCNGVEGFNCYFPLQSYGFQPTNGVGYQPYRVVVLSFELLHAPATVCGPKKSTNLVKNKCVNFNFNGLTGTGVLTESNKKFLPFQQFGRDIADTTDAVRDPQTLEILDITPCSFGGVSVITPGTNTSNQVAVLYQDVNCTEVPVAIHADQLTPTWRVYSTGSNVFQTRAGCLIGAEHVNNSYECDIPIGAGICASYQTQTNSPRRARSVASQSIIAYTMSLGAENSVAYSNNSIAIPTNFTISVTTEILPVSMTKTSVDCTMYICGDSTECSNLLLQYGSFCTQLNRALTGIAVEQDKNTQEVFAQVKQIYKTPPIKDFGGFNFSQILPDPSKPSKRSFIEDLLFNKVTLADAGFIKQYGDCLGDIAARDLICAQKFNGLTVLPPLLTDEMIAQYCSALLAGTITSGWTFGAGAALQIPFAMQMAYRFNGIGVTQNVLYENQKLIANQFNSAIGKIQDSLSSTASALGKLQDVVNQNAQALNTLVKQLSSNFGAISSVLNDILSRLDKVEAEVQIDRLITGRLQSLQTYVTQQLIRAAEIRASANLAATKMSECVLGQSKRVDFCGKGYHLMSFPQCAPHGVVFLHVTYVPAQEKNFTTAPAICHDGKAHFPREGVFVSNGTHWFVTQRNFYEPQIITTDNTFVSGNCDVVIGIVNNTVYDPLQPELDSFKEELDKYFKNHTSPDVDLGDISGINASVVNIQKEIDRLNEVAKNLNESLIDLQELGKYEQYIKGGGSGGGQIYEGKLTAEGLRFGIVASRFNHALVDRLVEGAIDAIVRHGGREEDITLVRVPGSWEIPVAAGELARKEDIDAVIAIGVLIRGATPHFDYIASEVSKGLADLSLELRKPITFGVITADTLEQAIERAGTKHGNKGWEAALSAIEMANLFKSLR

SEQ ID NO: 4603 - protein, 1371 aa, Artificial Sequence
  SARS-CoV-2/Iceland/192/2020__EPI_ISL_417819 spike protein (1-1211)(T874C_S1055C) LumSynth construct
MFVFFVLLPLVSSQCVNLTTRTQLPPAYTNSFTRGVYYPDKVFRSSVLHSTQDLFLPFFSNVTWFHAIHVSGTNGTKRFDNPVLPFNDGVYFASTEKSNIIRGWIFGTTLDSKTQSLLIVNNATNVVIKVCEFQFCNDPFLGVYYHKNNKSWMESEFRVYSSANNCTFEYVSQPFLMDLEGKQGNFKNLREFVFKNIDGYFKIYSKHTPINLVRDLPQGFSALEPLVDLPIGINITRFQTLLALHRSYLTPGDSSSGWTAGAAAYYVGYLQPRTFLLKYNENGTITDAVDCALDPLSETKCTLKSFTVEKGIYQTSNFRVQPTESIVRFPNITNLCPFGEVFNATRFASVYAWNRKRISNCVADYSVLYNSASFSTFKCYGVSPTKLNDLCFTNVYADSFVIRGDEVRQIAPGQTGKIADYNYKLPDDFTGCVIAWNSNNLDSKVGGNYNYLYRLFRKSNLKPFERDISTEIYQAGSTPCNGVEGFNCYFPLQSYGFQPTNGVGYQPYRVVVLSFELLHAPATVCGPKKSTNLVKNKCVNFNFNGLTGTGVLTESNKKFLPFQQFGRDIADTTDAVRDPQTLEILDITPCSFGGVSVITPGTNTSNQVAVLYQGVNCTEVPVAIHADQLTPTWRVYSTGSNVFQTRAGCLIGAEHVNNSYECDIPIGAGICASYQTQTNSPRRARSVASQSIIAYTMSLGAENSVAYSNNSIAIPTNFTISVTTEILPVSMTKTSVDCTMYICGDSTECSNLLLQYGSFCTQLNRALTGIAVEQDKNTQEVFAQVKQIYKTPPIKDFGGFNFSQILPDPSKPSKRSFIEDLLFNKVTLADAGFIKQYGDCLGDIAARDLICAQKFNGLTVLPPLLTDEMIAQYCSALLAGTITSGWTFGAGAALQIPFAMQMAYRFNGIGVTQNVLYENQKLIANQFNSAIGKIQDSLSSTASALGKLQDVVNQNAQALNTLVKQLSSNFGAISSVLNDILSRLDKVEAEVQIDRLITGRLQSLQTYVTQQLIRAAEIRASANLAATKMSECVLGQSKRVDFCGKGYHLMSFPQCAPHGVVFLHVTYVPAQEKNFTTAPAICHDGKAHFPREGVFVSNGTHWFVTQRNFYEPQIITTDNTFVSGNCDVVIGIVNNTVYDPLQPELDSFKEELDKYFKNHTSPDVDLGDISGINASVVNIQKEIDRLNEVAKNLNESLIDLQELGKYEQYIKGGGSGGGQIYEGKLTAEGLRFGIVASRFNHALVDRLVEGAIDAIVRHGGREEDITLVRVPGSWEIPVAAGELARKEDIDAVIAIGVLIRGATPHFDYIASEVSKGLADLSLELRKPITFGVITADTLEQAIERAGTKHGNKGWEAALSAIEMANLFKSLR

SEQ ID NO: 4604 - protein, 1371 aa, Artificial Sequence
  SARS-CoV-2/Belgium/ULG-6939/2020__EPI_ISL_417020 spike protein (1-1211)(T874C_S1055C) LumSynth construct
MFVFLVLLPLVSSQCVNLTTRTQLPPAYTNSFTRGVYYPDKVFRSSVLHSTQDLFLPFFSNVTWFHAIHVSGTNGTKRFDNPVLPFNDGVYFASTEKSNIIRGWIFGTTLDSKTQSLLIVNNATNVVIKVCEFQFCNDPFLGVYYHKNNKSWMESEFRVYSSANNCTFEYVSQPFLMDLEGKQGNFKNLREFVFKNIDGYFKIYSKHTPINLVRDLPQGFSALEPLVDLPIGINITRFQTLLALHRSYLTPGDSSSGWTAGAAAYYVGYLQPRTFLLKYNENGTITDAVDCALDPLSETKCTLKSFTVEKGIYQTSNFRVQPTESIVRFPNITNLCPFGEVFNATRFASVYAWNRKRISNCVADYSVLYNSASFSTFKCYGVSPTKLNDLCFTNVYADSFVIRGDEVRQIAPGQTGKIADYNYKLPDDFTGCVIAWNSNNLDSKVGGNYNYLYRLFRKSNLKPFERDISTEIYQAGSTPCNGVEGFNCYFPLQSYGFQPTNGVGYQPYRVVVLSFELLHAPATVCGPKKSTNLVKNKCVNFNFNGLTGTGVLTESNKKFLPFQQFGRDIADTTDAVRDPQTLEILDITPCSFGGVSVITPGTNTSNQVAVLYQGVNCTEVPVAIHADQLTPTWRVYSTGSNVFQTRAGCLIGAEHVNNSYECDIPIGAGICASYQTQTNSPRRARSVASQSIIAYTMSLGAENSVVYSNNSIAIPTNFTISVTTEILPVSMTKTSVDCTMYICGDSTECSNLLLQYGSFCTQLNRALTGIAVEQDKNTQEVFAQVKQIYKTPPIKDFGGFNFSQILPDPSKPSKRSFIEDLLFNKVTLADAGFIKQYGDCLGDIAARDLICAQKFNGLTVLPPLLTDEMIAQYCSALLAGTITSGWTFGAGAALQIPFAMQMAYRFNGIGVTQNVLYENQKLIANQFNSAIGKIQDSLSSTASALGKLQDVVNQNAQALNTLVKQLSSNFGAISSVLNDILSRLDKVEAEVQIDRLITGRLQSLQTYVTQQLIRAAEIRASANLAATKMSECVLGQSKRVDFCGKGYHLMSFPQCAPHGVVFLHVTYVPAQEKNFTTAPAICHDGKAHFPREGVFVSNGTHWFVTQRNFYEPQIITTDNTFVSGNCDVVIGIVNNTVYDPLQPELDSFKEELDKYFKNHTSPDVDLGDISGINASVVNIQKEIDRLNEVAKNLNESLIDLQELGKYEQYIKGGGSGGGQIYEGKLTAEGLRFGIVASRFNHALVDRLVEGAIDAIVRHGGREEDITLVRVPGSWEIPVAAGELARKEDIDAVIAIGVLIRGATPHFDYIASEVSKGLADLSLELRKPITFGVITADTLEQAIERAGTKHGNKGWEAALSAIEMANLFKSLR

SEQ ID NO: 4605 - protein, 1371 aa, Artificial Sequence
  SARS-CoV-2/France/HF2496/2020__EPI_ISL_418231 spike protein (1-1211)(T874C_S1055C) LumSynth construct
MFVFLVLLPLVSSQCVNLTTRTQLPPAYTNSFTRGVYYPDKVFRSSVLHSTQDLFLPFFSNVTWFHAIHVSGTNGTKRFDNPVLPFNDGVYFASTEKSNIIRGWIFGTTLDSKTQSLLIVNNATNVVIKVCEFQFCNDPFLGVYYHKNNKSWMESEFRVYSSANNCTFEYVSQPFLMDLEGKQGNFKNLREFVFKNIDGYFKIYSKHTPINLVRDLPQGFSALEPLVDLPIGINITRFQTLLALHRSYLTPGDSSSGWTAGAAAYYVGYLQPRTFLLKYNENGTITDAVDCALDPLSETKCTLKSFTVEKGIYQTSNFRVQPTESIVRFPNITNLCPFGEVFNATRFASVYAWNRKRISNCVADYSVLYNSASFSTFKCYGVSPTKLNDLCFTNVYADSFVIRGDEVRQIAPGQTGKIADYNYKLPDDFTGCVIAWNSNNLDSKVGGNYNYLYRLFRKSNLKPFERDISTEIYQAGSTPCNGVEGFNCYFPLQSYGFQPTNGVGYQPYRVVVLSFELLHAPATVCGPKKSTNLVKNKCVNFNFNGLTGTGVLTESNKKFLPFQQFGRDIADTTDAVRDPQTLEILDITPCSFGGVSVITPGTNTSNQVAVLYQGVNCTEVPVAIHADQLTPTWRVYSTGSNVFQTRAGCLIGAEHVNNSYECDIPIGAGICASYQTQTNSPRRARSVASQSIIAYTMSLGAENSVAYSNNSIAIPTNFTISVTTEILPVSMTKTSVDCTMYICGDSTECSNLLLQYGSFCTQLNRALTGIAVEQDKNTQEVFAQVKQIYKTPPIKDFGGFNFSQILPDPSKPSKRSFIEDLLFNKVTLADAGFIKQYGDCLGDIVARDLICAQKFNGLTVLPPLLTDEMIAQYCSALLAGTITSGWTFGAGAALQIPFAMQMAYRFNGIGVTQNVLYENQKLIANQFNSAIGKIQDSLSSTASALGKLQDVVNQNAQALNTLVKQLSSNFGAISSVLNDILSRLDKVEAEVQIDRLITGRLQSLQTYVTQQLIRAAEIRASANLAATKMSECVLGQSKRVDFCGKGYHLMSFPQCAPHGVVFLHVTYVPAQEKNFTTAPAICHDGKAHFPREGVFVSNGTHWFVTQRNFYEPQIITTDNTFVSGNCDVVIGIVNNTVYDPLQPELDSFKEELDKYFKNHTSPDVDLGDISGINASVVNIQKEIDRLNEVAKNLNESLIDLQELGKYEQYIKGGGSGGGQIYEGKLTAEGLRFGIVASRFNHALVDRLVEGAIDAIVRHGGREEDITLVRVPGSWEIPVAAGELARKEDIDAVIAIGVLIRGATPHFDYIASEVSKGLADLSLELRKPITFGVITADTLEQAIERAGTKHGNKGWEAALSAIEMANLFKSLR

SEQ ID NO: 4606 - protein, 1371 aa, Artificial Sequence
  SARS-CoV-2/USA/WA-UW291/2020__EPI_ISL_418076 spike protein (1-1211)(T874C_S1055C) LumSynth construct
MFVFLVLLPLVSSQCVNLTTRTQLPPAYTNSFTRGVYYPDKVFRSSVLHSTQDLFLPFFSNVTWFHAIHVSGTNGTKRFDNPVLPFNDGVYFASTEKSNIIRGWIFGTTLDSKTQSLLIVNNATNVVIKVCEFQFCNDPFLGVYYHKNNKSWMESEFRVYSSANNCTFEYVSQPFLMDLEGKQGNFKNLREFVFKNIDGYFKIYSKHTPINLVRDLPQGFSALEPLVDLPIGINITRFQTLLALHRSYLTPGDSSSGWTAGAAAYYVGYLQPRTFLLKYNENGTITDAVDCALDPLSETKCTLKSFTVEKGIYQTSNFRVQPTESIVRFPNITNLCPFGEVFNATRFASVYAWNRKRISNCVADYSVLYNSASFSTFKCYGVSPTKLNDLCFTNVYADSFVIRGDEVRQIAPGQTGKIADYNYKLPDDFTGCVIAWNSNNLDSKVGGNYNYLYRLFRKSNLKPFERDISTEIYQAGSTPCNGVEGFNCYFPLQSYGFQPTNGVGYQPYRVVVLSFELLHAPATVCGPKKSTNLVKNKCVNFNFNGLTGTGVLTESNKKFLPFQQFGRDIADTTDAVRDPQTLEILDITPCSFGGVSVITPGTNTSNQVAVLYQGVNCTEVPVAIHADQLTPTWRVYSTGSNVFQTRAGCLIGAEHVNNSYECDIPIGAGICASYQTQTNSPRRARSVASQSIIAYTMSLGAENSVAYSNNSIAIPTNFTISVTTEILPVSMTKTSVDCTMYICGDSTECSNLLLQYGSFCTQLNRALTGIAVEQDKNTQEVFAQVKQIYKTPPIKDFGGFNFSQILPDPSKPSKRSFIEDLLFNKVTLADAGFIKQYGDCLGDIAARDLICAQKFNGLTVLPPLLTDEMIAQYCSALLAGTITSGWTFGAGAALQIPFAMQMAYRFNGIGVTQNVLYENQKLIANQFNSAIGKIQYSLSSTASALGKLQDVVNQNAQALNTLVKQLSSNFGAISSVLNDILSRLDKVEAEVQIDRLITGRLQSLQTYVTQQLIRAAEIRASANLAATKMSECVLGQSKRVDFCGKGYHLMSFPQCAPHGVVFLHVTYVPAQEKNFTTAPAICHDGKAHFPREGVFVSNGTHWFVTQRNFYEPQIITTDNTFVSGNCDVVIGIVNNTVYDPLQPELDSFKEELDKYFKNHTSPDVDLGDISGINASVVNIQKEIDRLNEVAKNLNESLIDLQELGKYEQYIKGGGSGGGQIYEGKLTAEGLRFGIVASRFNHALVDRLVEGAIDAIVRHGGREEDITLVRVPGSWEIPVAAGELARKEDIDAVIAIGVLIRGATPHFDYIASEVSKGLADLSLELRKPITFGVITADTLEQAIERAGTKHGNKGWEAALSAIEMANLFKSLR

SEQ ID NO: 4607 - protein, 1371 aa, Artificial Sequence; identical to SEQ ID NO: 4570
  SARS-CoV-2/Portugal/PT0034/2020__EPI_ISL_418019 spike protein (1-1211)(T874C_S1055C) LumSynth construct

SEQ ID NO: 4608 - protein, 1371 aa, Artificial Sequence
  SARS-CoV-2/Iceland/202/2020__EPI_ISL_417750 spike protein (1-1211)(T874C_S1055C) LumSynth construct
MFVFLVLLPLVSSQCVNLTTRTQLPPAYTNSFTRGVYYPDKVFRSSVLHSTQDLFLPFFSNVTWFHAIHVSGTNGTKRFDNPVLPFNDGVYFASTEKSNIIRGWIFGTTLDSKTQSLLIVNNATNVVIKVCEFQFCNDPFLGVYYHKNNKSWMESEFRVYSSANNCTFEYVSQPFLMDLEGKQGNFKNLREFVFKNIDGYFKIYSKHTPINLVRDLPQGFSALEPLVDLPIGINITRFQTLLALHRSYLTPGDSSSGWTAGAAAYYVGYLQPRTFLLKYNENGTITDAVDCALDPLSETKCTLKSFTVEKGIYQTSNFRVQPTESIVRFPNITNLCPFGEVFNATRFASVYAWNRKRISNCVADYSVLYNSASFSTFKCYGVSPTKLNDLCFTNVYADSFVIRGDEVRQIAPGQTGKIADYNYKLPDDFTGCVIAWNSNNLDSKVGGNYNYLYRLFRKSNLKPFERDISTEIYQAGSTPCNGVEGFNCYFPLQSYGFQPTNGVGYQPYRVVVLSFELLHAPATVCGPKKSTNLVKNKCVNFNFNGLTGTGVLTESNKKFLPFQQFGRDIADTTDAVRDPQTLEILDITPCSFGGVSVITPGTNTSNQVAVLYQDVNCTEVPVAIHADQLTPTWRVYSTGSNVFQTRAGCLIGAEHVNNSYECDIPIGAGICASYQTQTNSPRRARSVASQSIIAYTMSLGAENSVAYSNNSIAIPTNFTISVTTEILPVSMTKTSVDCTMYICGDSTECSNLLLQYGSFCTQLNRALTGIAVEQDKNTQEVFAQVKQIYKTPPIKDFGGFNFSQILPDPSKPSKRSFIEDLLFNKVTLADAGFIKQYGDCLGDIAARDLICAQKFNGLTVLPPLLTDEMIAQYCSALLAGTITSGWTFGAGAALQIPFAMQMAYRFNGIGVTQNVLYENQKLIANQFNSAIGKIQDSLSSTASALGKLQDVVNQNAQALNTLVKQLSSNFGAISSVLNDILSRLDKVEAEVQIDRLITGRLQSLQTYVTQQLIRAAEIRASANLAATKMSECVLGQSKRVDFCGKGYHLMSFPQCAPHGVVFLHVTYVPAQEKNFTTAPAICHDGKAHFPREGVFVSNGTHWFVTQRNFYEPQIITTDNTFVSGNCDVVIGIVNNTVYDPLQPELDSFKEELDKYFKNHTSPDVDLGDIPGINASVVNIQKEIDRLNEVAKNLNESLIDLQELGKYEQYIKGGGSGGGQIYEGKLTAEGLRFGIVASRFNHALVDRLVEGAIDAIVRHGGREEDITLVRVPGSWEIPVAAGELARKEDIDAVIAIGVLIRGATPHFDYIASEVSKGLADLSLELRKPITFGVITADTLEQAIERAGTKHGNKGWEAALSAIEMANLFKSLR

SEQ ID NO: 4609 - protein, 1371 aa, Artificial Sequence
  SARS-CoV-2/USA/WA-UW261/2020__EPI_ISL_418046 spike protein (1-1211)(T874C_S1055C) LumSynth construct
MFVFLVLLPLVSSQCVNLTTRTQLPPAYTNSFTRGVYYPDKVFRSSVLHSTQDLFLPFFSNVTWFHAIHVSGTNGTKRFDNPVLPFNDGVYFASTEKSNIIRGWIFGTTLDSKTQSLLIVNNATNVVIKVCEFQFCNDPFLGVYYHKNNKSWMESEFRVYSSANNCTFEYVSQPFLMDLEGKQGNFKNLREFVFKNIDGYFKIYSKHTPINLVRDLPQGFSALEPLVDLPIGINITRFQTLLALHRSYLTPGDSSSGWTAGAAAYYVGYLQPRTFLLKYNENGTITDAVDCALDPLSETKCTLKSFTVEKGIYQTSNFRVQPTESIVRFPNITNLCPFGEVFNATRFTSVYAWNRKRISNCVADYSVLYNSASFSTFKCYGVSPTKLNDLCFTNVYADSFVIRGDEVRQIAPGQTGKIADYNYKLPDDFTGCVIAWNSNNLDSKVGGNYNYLYRLFRKSNLKPFERDISTEIYQAGSTPCNGVEGFNCYFPLQSYGFQPTNGVGYQPYRVVVLSFELLHAPATVCGPKKSTNLVKNKCVNFNFNGLTGTGVLTESNKKFLPFQQFGRDIADTTDAVRDPQTLEILDITPCSFGGVSVITPGTNTSNQVAVLYQDVNCTEVPVAIHADQLTPTWRVYSTGSNVFQTRAGCLIGAEHVNNSYECDIPIGAGICASYQTQTNSPRRARSVASQSIIAYTMSLGAENSVAYSNNSIAIPTNFTISVTTEILPVSMTKTSVDCTMYICGDSTECSNLLLQYGSFCTQLNRALTGIAVEQDKNTQEVFAQVKQIYKTPPIKDFGGFNFSQILPDPSKPSKRSFIEDLLFNKVTLADAGFIKQYGDCLGDIAARDLICAQKFNGLTVLPPLLTDEMIAQYCSALLAGTITSGWTFGAGAALQIPFAMQMAYRFNGIGVTQNVLYENQKLIANQFNSAIGKIQDSLSSTASALGKLQDVVNQNAQALNTLVKQLSSNFGAISSVLNDILSRLDKVEAEVQIDRLITGRLQSLQTYVTQQLIRAAEIRASANLAATKMSECVLGQSKRVDFCGKGYHLMSFPQCAPHGVVFLHVTYVPAQEKNFTTAPAICHDGKAHFPREGVFVSNGTHWFVTQRNFYEPQIITTDNTFVSGNCDVVIGIVNNTVYDPLQPELDSFKEELDKYFKNHTSPDVDLGDISGINASVVNIQKEIDRLNEVAKNLNESLIDLQELGKYEQYIKGGGSGGGQIYEGKLTAEGLRFGIVASRFNHALVDRLVEGAIDAIVRHGGREEDITLVRVPGSWEIPVAAGELARKEDIDAVIAIGVLIRGATPHFDYIASEVSKGLADLSLELRKPITFGVITADTLEQAIERAGTKHGNKGWEAALSAIEMANLFKSLR

SEQ ID NO: 4610 - protein, 1371 aa, Artificial Sequence
  SARS-CoV-2/Portugal/PT0035/2020__EPI_ISL_418020 spike protein (1-1211)(T874C_S1055C) LumSynth construct
MFVFLVLLPLVSSQCVNLTTRTQLPPAYTNSFTRGVYYPDKVFRSSVLHSTQDLFLPFFSNVTWFHAIHVSGTNGTKRFDNPVLPFNDGVYFASTEKSNIIRGWIFGTTLDSKTQSLLIVNNATNVVIKVCEFQFCNDPFLGVYYHKNNKSWMESEFRVYSSANNCTFEYVSQPFLMDLEGKQGNFKNLREFVFKNIDGYFKIYSKHTPINLVRDLPQGFSALEPLVDLPIGINITRFQTLLALHRSYLTPGDSSSGWTAGAAAYYVGYLQPRTFLLKYNENGTITDAVDCALDPLSETKCTLKSFTVEKGIYQTSNFRVQPTESIVRFPNITNLCPFGEVFNATRFASVYAWNRKRISNCVADYSVLYNSASFSTFKCYGVSPTKLNDLCFTNVYADSFVIRGDEVRQIAPGQTGKIADYNYKLPDDFTGCVIAWNSNNLDSKVGGNYNYLYRLFRKSNLKPFERDISTEIYQAGSTPCNGVEGFNCYFPLQSYGFQPTNGVGYQPYRVVVLSFELLHAPATVCGPKKSTNLVKNKCVNFNFNGLTGTGVLTESNKKFLPFQQFGRDIADTTDAVRDPQTLEILDITPCSFGGVSVITPGTNTSNQVAVLYQDVNCTEVPVAIHADQLTPTWRVYSTGSNVFQTRAGCLIGAEHVNNSYECDIPIGAGICASYQTQTNSPRRARSVASQSIIAYTMSLGAENSVAYSNNSIAIPTNFTISVTTEILPVSMTKTSVDCTMYICGDSTECSNLLLQYGSFCTQLNRALTGIAVEQDKNTQEVFAQVKQIYKTPPIKDFGGFNFSQILPDPSKPSKRSFIEDLLFNKVTLADAGFIKQYGDCLGDISARDLICAQKFNGLTVLPPLLTDEMIAQYCSALLAGTITSGWTFGAGAALQIPFAMQMAYRFNGIGVTQNVLYENQKLIANQFNSAIGKIQDSLSSTASALGKLQDVVNQNAQALNTLVKQLSSNFGAISSVLNDILSRLDKVEAEVQIDRLITGRLQSLQTYVTQQLIRAAEIRASANLAATKMSECVLGQSKRVDFCGKGYHLMSFPQCAPHGVVFLHVTYVPAQEKNFTTAPAICHDGKAHFPREGVFVSNGTHWFVTQRNFYEPQIITTDNTFVSGNCDVVIGIVNNTVYDPLQPELDSFKEELDKYFKNHTSPDVDLGDISGINASVVNIQKEIDRLNEVAKNLNESLIDLQELGKYEQYIKGGGSGGGQIYEGKLTAEGLRFGIVASRFNHALVDRLVEGAIDAIVRHGGREEDITLVRVPGSWEIPVAAGELARKEDIDAVIAIGVLIRGATPHFDYIASEVSKGLADLSLELRKPITFGVITADTLEQAIERAGTKHGNKGWEAALSAIEMANLFKSLR

SEQ ID NO: 4611 - protein, 1371 aa, Artificial Sequence
  SARS-CoV-2/USA/NY-NYUMC7/2020__EPI_ISL_418192 spike protein (1-1211)(T874C_S1055C) LumSynth construct
MFVFLVLLPLVSSQCVNLTTRTQLPPAYTNSFTRGVYYPDKVFRSSVLHSTQDLFLPFFSNVTWFHAIHVSGTNGTKRFDNPVLPFNDGVYFASTEKSNIIRGWIFGTTLDSKTQSLLIVNNATNVVIKVCEFQFCNDPFLGVYHHKNNKSWMESEFRVYSSANNCTFEYVSQPFLMDLEGKQGNFKNLREFVFKNIDGYFKIYSKHTPINLVRDLPQGFSALEPLVDLPIGINITRFQTLLALHRSYLTPGDSSSGWTAGAAAYYVGYLQPRTFLLKYNENGTITDAVDCALDPLSETKCTLKSFTVEKGIYQTSNFRVQPTESIVRFPNITNLCPFGEVFNATRFASVYAWNRKRISNCVADYSVLYNSASFSTFKCYGVSPTKLNDLCFTNVYADSFVIRGDEVRQIAPGQTGKIADYNYKLPDDFTGCVIAWNSNNLDSKVGGNYNYLYRLFRKSNLKPFERDISTEIYQAGSTPCNGVEGFNCYFPLQSYGFQPTNGVGYQPYRVVVLSFELLHAPATVCGPKKSTNLVKNKCVNFNFNGLTGTGVLTESNKKFLPFQQFGRDIADTTDAVRDPQTLEILDITPCSFGGVSVITPGTNTSNQVAVLYQGVNCTEVPVAIHADQLTPTWRVYSTGSNVFQTRAGCLIGAEHVNNSYECDIPIGAGICASYQTQTNSPRRARSVASQSIIAYTMSLGAENSVAYSNNSIAIPTNFTISVTTEILPVSMTKTSVDCTMYICGDSTECSNLLLQYGSFCTQLNRALTGIAVEQDKNTQEVFAQVKQIYKTPPIKDFGGFNFSQILPDPSKPSKRSFIEDLLFNKVTLADAGFIKQYGDCLGDIAARDLICAQKFNGLTVLPPLLTDEMIAQYCSALLAGTITSGWTFGAGAALQIPFAMQMAYRFNGIGVTQNVLYENQKLIANQFNSAIGKIQDSLSSTASALGKLQDVVNQNAQALNTLVKQLSSNFGAISSVLNDILSRLDKVEAEVQIDRLITGRLQSLQTYVTQQLIRAAEIRASANLAATKMSECVLGQSKRVDFCGKGYHLMSFPQCAPHGVVFLHVTYVPAQEKNFTTAPAICHDGKAHFPREGVFVSNGTHWFVTQRNFYEPQIITTDNTFVSGNCDVVIGIVNNTVYDPLQPELDSFKEELDKYFKNHTSPDVDLGDISGINASVVNIQKEIDRLNEVAKNLNESLIDLQELGKYEQYIKGGGSGGGQIYEGKLTAEGLRFGIVASRFNHALVDRLVEGAIDAIVRHGGREEDITLVRVPGSWEIPVAAGELARKEDIDAVIAIGVLIRGATPHFDYIASEVSKGLADLSLELRKPITFGVITADTLEQAIERAGTKHGNKGWEAALSAIEMANLFKSLR

SEQ ID NO: 4612 - protein, 1371 aa, Artificial Sequence
  SARS-CoV-2/Iceland/189/2020__EPI_ISL_417709 spike protein (1-1211)(T874C_S1055C) LumSynth construct
MFVFLVLLPLVSSQCVNLTTRTQLPPAYTNSFTRGVYYPDKVFRSSVLHSTQDLFLPFFSNVTWFHAIHVSGTNGTKRFDNPVLPFNDGVYFASTEKSNIIRGWIFGTTLDSKTQSLLIVNNATNVVIKVCEFQFCNDPFLGVYYHKNNKSWMESEFRVYSSANNCTFEYVSQPFLMDLEGKQGNFKNLREFVFKNIDGYFKIYSKHTPINLVRDLPQGFSALEPLVDLPIGINITRFQTLLALHRSYLTPGDSSSGWTAGAAAYYVGYLQPRTFLLKYNENGTITDAVDCALDPLSETKCTLKSFTVEKGIYQTSNFRVQPTESIVRFPNITNLCPFGEVFNATRFASVYAWNRKRISNCVADYSVLYNSASFSTFKCYGVSPTKLNDLCFTNVYADSFVIRGDEVRQIAPGQTGKIADYNYKLPDDFTGCVIAWNSNNLDSKVGGNYNYLYRLFRKSNLKPFERDISTEIYQAGSTPCNGVEGFNCYFPLQSYGFQPTNGVGYQPYRVVVLSFELLHAPATVCGPKKSTNLVKNKCVNFNFNGLTGTGVLTESNKKFLPFQQFGRDIADTTDAVRDPQTLEILDITPCSFGGVSVITPGTNTSNQVAVLYQGVNCTEVPVAIHADQLTPTWRVYSTGSNVFQTRAGCLIGAEHVNNSYECDIPIGAGICASYQTQTNSPRRARSVASQSIIAYTMSLGAENSVAYSNNSIAIPTNFTISVTTEILPVSMTKTSVDCTMYICGDSTECSNLLLQYGSFCTQLNRALTGIAVEQDKNTQEVFAQVKQIYKTPPIKDFGGFNFSQILPDPSKPSKRSFIEDLLFNKVTLADAGFTKQYGDCLGDIAARDLICAQKFNGLTVLPPLLTDEMIAQYCSALLAGTITSGWTFGAGAALQIPFAMQMAYRFNGIGVTQNVLYENQKLIANQFNSAIGKIQDSLSSTASALGKLQDVVNQNAQALNTLVKQLSSNFGAISSVLNDILSRLDKVEAEVQIDRLITGRLQSLQTYVTQQLIRAAEIRASANLAATKMSECVLGQSKRVDFCGKGYHLMSFPQCAPHGVVFLHVTYVPAQEKNFTTAPAICHDGKAHFPREGVFVSNGTHWFVTQRNFYEPQIITTDNTFVSGNCDVVIGIVNNTVYDPLQPELDSFKEELDKYFKNHTSPDVDLGDISGINASVVNIQKEIDRLNEVAKNLNESLIDLQELGKYEQYIKGGGSGGGQIYEGKLTAEGLRFGIVASRFNHALVDRLVEGAIDAIVRHGGREEDITLVRVPGSWEIPVAAGELARKEDIDAVIAIGVLIRGATPHFDYIASEVSKGLADLSLELRKPITFGVITADTLEQAIERAGTKHGNKGWEAALSAIEMANLFKSLR

SEQ ID NO: 4613 - protein, 1371 aa, Artificial Sequence
  SARS-CoV-2/Australia/NSW56/2020__EPI_ISL_417408 spike protein (1-1211)(T874C_S1055C) LumSynth construct
MFVFLVLLPLVSSQCVNLTTRTQLPPAYTNSFTRGVYYPDKVFRSSVLHSTQDLFLPFFSNVTWFHAIHVSGTNGTKRFDNPVLPFNDGVYFASTEKSNIIRGWIFGTTLDSKTQSLLIVNNATNVVIKVCEFQFCNDPFLGVYYHKNNKSWMESEFRVYSSANNCTFEYVSQPFLMDLEGKQGNFKNLREFVFKNIDGYFKIYSKHTPINLVRDLPQGFSALEPLVDLPIGINITRFQTLLALHRSYLTPGDSSSGWTAGAAAYYVGYLQPRTFLLKYNENGTITDAVDCALDPLSETKCTLKSFTVEKGIYQTSNFRVQPTESIVRFPNITNLCPFGEVFNATRFASVYAWNRKRISNCVADYSVLYNSASFSTFKCYGVSPTKLNDLCFTNVYADSFVIRGDEVRQIAPGQTGKIADYNYKLPDDFTGCVIAWNSNNLDSKVGGNYNYLYRLFRKSNLKPFERDISTEIYQAGSTPCNGVEGFNCYFPLQSYGFQPTNGVGYQPYRVVVLSFELLHAPATVCGPKKSTNLVKNKCVNFNFNGLTGTGVLTESNKKFLPFQQFGRDIADTTDAVRDPQTLEILDITPCSFGGVSVITPGTNTSNQVAVLYQDVNCTEVPVAIHADQLTPTWRVYSTGSNVFQTRAGCLIGAEHVNNSYECDIPIGAGICASYQTQTNSPRRARSVASQSIIAYTMSLGAENSVAYSNNSIAIPTNFTISVTTEILPVSMTKTSVDCTMYICGDSTECSNLLLQYGSFCTQLNRALTGIAVEQDKNTQEVFAQVKQIYKTPPIKDFGGFNFSQILPDSSKPSKRSFIEDLLFNKVTLADAGFIKQYGDCLGDIAARDLICAQKFNGLTVLPPLLTDEMIAQYCSALLAGTITSGWTFGAGAALQIPFAMQMAYRFNGIGVTQNVLYENQKLIANQFNSAIGKIQDSLSSTASALGKLQDVVNQNAQALNTLVKQLSSNFGAISSVLNDILSRLDKVEAEVQIDRLITGRLQSLQTYVTQQLIRAAEIRASANLAATKMSECVLGQSKRVDFCGKGYHLMSFPQCAPHGVVFLHVTYVPAQEKNFTTAPAICHDGKAHFPREGVFVSNGTHWFVTQRNFYEPQIITTDNTFVSGNCDVVIGIVNNTVYDPLQPELDSFKEELDKYFKNHTSPDVDLGDISGINASVVNIQKEIDRLNEVAKNLNESLIDLQELGKYEQYIKGGGSGGGQIYEGKLTAEGLRFGIVASRFNHALVDRLVEGAIDAIVRHGGREEDITLVRVPGSWEIPVAAGELARKEDIDAVIAIGVLIRGATPHFDYIASEVSKGLADLSLELRKPITFGVITADTLEQAIERAGTKHGNKGWEAALSAIEMANLFKSLR

SEQ ID NO: 4614 - protein, 1371 aa, Artificial Sequence
  SARS-CoV-2/Iceland/280/2020__EPI_ISL_417608 spike protein (1-1211)(T874C_S1055C) LumSynth construct
MFVFLVLLPLVSSQCVNLTTRTQLPPAYTNSFTRGVYYPDKVFRSSVLHSTQDLFLPFFSNVTWFHAIHVSGTNGTKRFDNPVLPFNDGVYFASTEKSNIIRGWIFGTTLDSKTQSLLIVNNATNVVIKVCEFQFCNDPFLGVYYHKNNKSWMESEFRVYSSANNCTFEYVSQPFLMDLEGKQGNFKNLREFVFKNIDGYFKIYSKHTPINLVRDLPQGFSALEPLVDLPIGINITRFQTLLALHRSYLTPGDSSSGWTAGAAAYYVGYLQPRTFLLKYNENGTITDAVDCALDPLSETKCTLKSFTVEKGIYQTSNFRVQPTESIVRFPNITNLCPFGEVFNATRFASVYAWNRKRISNCVADYSVLYNSASFSTFKCYGVSPTKLNDLCFTNVYADSFVIRGDEVRQIAPGQTGKIADYNYKLPDDFTGCVIAWNSNNLDSKVGGNYNYLYRLFRKSNLKPFERDISTEIYQAGSTPCNGVEGFNCYFPLQSYGFQPTNGVGYQPYRVVVLSFELLHAPATVCGPKKSTNLVKNKCVNFNFNGLTGTGVLTESNKKFLPFQQFGRDIADTTDAVRDPQTLEILDITPCSFGGVSVITPGTNTSNQVAVLYQGVNCTEVPVAIHADQLTPTWRVYSTGSNVFQTRAGCLIGAEHVNNSYECDIPIGAGICASYHTQTNSPRRARSVASQSIIAYTMSLGAENSVAYSNNSIAIPTNFTISVTTEILPVSMTKTSVDCTMYICGDSTECSNLLLQYGSFCTQLNRALTGIAVEQDKNTQEVFAQVKQIYKTPPIKDFGGFNFSQILPDPSKPSKRSFIEDLLFNKVTLADAGFIKQYGDCLGDIAARDLICAQKFNGLTVLPPLLTDEMIAQYCSALLAGTITSGWTFGAGAALQIPFAMQMAYRFNGIGVTQNVLYENQKLIANQFNSAIGKIQDSLSSTASALGKLQDVVNQNAQALNTLVKQLSSNFGAISSVLNDILSRLDKVEAEVQIDRLITGRLQSLQTYVTQQLIRAAEIRASANLAATKMSECVLGQSKRVDFCGKGYHLMSFPQCAPHGVVFLHVTYVPAQEKNFTTAPAICHDGKAHFPREGVFVSNGTHWFVTQRNFYEPQIITTDNTFVSGNCDVVIGIVNNTVYDPLQPELDSFKEELDKYFKNHTSPDVDLGDISGINASVVNIQKEIDRLNEVAKNLNESLIDLQELGKYEQYIKGGGSGGGQIYEGKLTAEGLRFGIVASRFNHALVDRLVEGAIDAIVRHGGREEDITLVRVPGSWEIPVAAGELARKEDIDAVIAIGVLIRGATPHFDYIASEVSKGLADLSLELRKPITFGVITADTLEQAIERAGTKHGNKGWEAALSAIEMANLFKSLR

SEQ ID NO: 4615 - protein, 1371 aa, Artificial Sequence; identical to SEQ ID NO: 4570
  SARS-CoV-2/Iceland/247/2020__EPI_ISL_417575 spike protein (1-1211)(T874C_S1055C) LumSynth construct

SEQ ID NO: 4616 - protein, 1371 aa, Artificial Sequence
  SARS-CoV-2/Iceland/238/2020__EPI_ISL_417566 spike protein (1-1211)(T874C_S1055C) LumSynth construct
MFVFLVLLPLVSSQCVNLTTRTQLPPAYTNSFTRGVYYPDKVFRSSVLHSTQDLFLPFFSNVTWFHAIHVSGTNGTKRFDNPVLPFNDGVYFASTEKSNIIRGWIFGTTLDSKTQSLLIVNNATNVVIKVCEFQFCNDPFLGVYYHKNNKSWMESEFRVYSSANNCTFEYVSQPFLMDLEGKQGNFKNLREFVFKNIDGYFKIYSKHTPINLVRDLPQGFSALEPLVDLPIGINITRFQTLLALHRSYLTPGDSSSGWTAGAAAYYVGYLQPRTFLLKYNENGTITDAVDCALDPLSETKCTLKSFTVEKGIYQTSNFRVQPTESIVRFPNITNLCPFGEVFNATRFASVYAWNRKRISNCVADYSVLYNSASFSTFKCYGVSPTKLNDLCFTNVYADSFVIRGDEVRQIAPGQTGKIADYNYKLPDDFTGCVIAWNSNNLDSKVGGNYNYLYRLFRKSNLKPFERDISTEIYQAGSTPCNGVEGFNCYFPLQSYGFQPTNGVGYQPYRVVVLSFELLHAPATVCGPKKSTNLVKNKCVNFNFNGLTGTGVLTESNKKFLPFQQFGRDIADTTDAVRDPQTLEILDITPCSFGGVSVITPGTNTSNQVAVLYQGVNCTEVPVAIHADQLTPTWRVYSTGSNVFQTRAGCLIGAEHVNNSYECDIPIGAGICASYQTQTNSPRRARSVASQSIIAYTMSLGAENSVAYSNNSIAIPTNFTISVTTEILPVSMTKTSVDCTMYICGDSTECSNLLLQYGSFCTQLNRALTGIAVEQDKNTQEVFAQVKQIYKTPPIKDFGGFNFSQILPDPSKPSKRSFIEDLLFNKVTLADVGFIKQYGDCLGDIAARDLICAQKFNGLTVLPPLLTDEMIAQYCSALLAGTITSGWTFGAGAALQIPFAMQMAYRFNGIGVTQNVLYENQKLIANQFNSAIGKIQDSLSSTASALGKLQDVVNQNAQALNTLVKQLSSNFGAISSVLNDILSRLDKVEAEVQIDRLITGRLQSLQTYVTQQLIRAAEIRASANLAATKMSECVLGQSKRVDFCGKGYHLMSFPQCAPHGVVFLHVTYVPAQEKNFTTAPAICHDGKAHFPREGVFVSNGTHWFVTQRNFYEPQIITTDNTFVSGNCDVVIGIVNNTVYDPLQPELDSFKEELDKYFKNHTSPDVDLGDISGINASVVNIQKEIDRLNEVAKNLNESLIDLQELGKYEQYIKGGGSGGGQIYEGKLTAEGLRFGIVASRFNHALVDRLVEGAIDAIVRHGGREEDITLVRVPGSWEIPVAAGELARKEDIDAVIAIGVLIRGATPHFDYIASEVSKGLADLSLELRKPITFGVITADTLEQAIERAGTKHGNKGWEAALSAIEMANLFKSLR

SEQ ID NO: 4617 - protein, 1371 aa, Artificial Sequence
  SARS-CoV-2/Greece/16/2020__EPI_ISL_418265 spike protein (1-1211)(T874C_S1055C) LumSynth construct
MFVFLVLLPLVSSQCVNLTTRTQLPPAYTNSFTRGVYYPDKVFRSSVLHSTQDLFLPFFSNVTWFHAIHVSGTNGTKRFDNPVLPFNDGVYFASTEKSNIIRGWIFGTTLDSKTQSLLIVNNATNVVIKVCEFQFCNDPFLGVYYHKNNKSWMESEFRVYSSANNCTFEYVSQPFLMDLEGKQGNFKNLREFVFKNVDGYFKIYSKHTPINLVRDLPQGFSALEPLVDLPIGINITRFQTLLALHRSYLTPGDSSSGWTAGAAAYYVGYLQPRTFLLKYNENGTITDAVDCALDPLSETKCTLKSFTVEKGIYQTSNFRVQPTESIVRFPNITNLCPFGEVFNATRFASVYAWNRKRISNCVADYSVLYNSASFSTFKCYGVSPTKLNDLCFTNVYADSFVIRGDEVRQIAPGQTGKIADYNYKLPDDFTGCVIAWNSNNLDSKVGGNYNYLYRLFRKSNLKPFERDISTEIYQAGSTPCNGVEGFNCYFPLQSYGFQPTNGVGYQPYRVVVLSFELLHAPATVCGPKKSTNLVKNKCVNFNFNGLTGTGVLTESNKKFLPFQQFGRDIADTTDAVRDPQTLEILDITPCSFGGVSVITPGTNTSNQVAVLYQDVNCTEVPVAIHADQLTPTWRVYSTGSNVFQTRAGCLIGAEHVNNSYECDIPIGAGICASYQTQTNSPRRARSVASQSIIAYTMSLGAENSVAYSNNSIAIPTNFTISVTTEILPVSMTKTSVDCTMYICGDSTECSNLLLQYGSFCTQLNRALTGIAVEQDKNTQEVFAQVKQIYKTPPIKDFGGFNFSQILPDPSKPSKRSFIEDLLFNKVTLADAGFIKQYGDCLGDIAARDLICAQKFNGLTVLPPLLTDEMIAQYCSALLAGTITSGWTFGAGAALQIPFAMQMAYRFNGIGVTQNVLYENQKLIANQFNSAIGKIQDSLSSTASALGKLQDVVNQNAQALNTLVKQLSSNFGAISSVLNDILSRLDKVEAEVQIDRLITGRLQSLQTYVTQQLIRAAEIRASANLAATKMSECVLGQSKRVDFCGKGYHLMSFPQCAPHGVVFLHVTYVPAQEKNFTTAPAICHDGKAHFPREGVFVSNGTHWFVTQRNFYEPQIITTDNTFVSGNCDVVIGIVNNTVYDPLQPELDSFKEELDKYFKNHTSPDVDLGDISGINASVVNIQKEIDRLNEVAKNLNESLIDLQELGKYEQYIKGGGSGGGQIYEGKLTAEGLRFGIVASRFNHALVDRLVEGAIDAIVRHGGREEDITLVRVPGSWEIPVAAGELARKEDIDAVIAIGVLIRGATPHFDYIASEVSKGLADLSLELRKPITFGVITADTLEQAIERAGTKHGNKGWEAALSAIEMANLFKSLR

SEQ ID NO: 4618 - protein, 1371 aa, Artificial Sequence
  SARS-CoV-2/Iceland/319/2020__EPI_ISL_417648 spike protein (1-1211)(T874C_S1055C) LumSynth construct
MFVFLVLLPLVSSQCVNLTTRTQLPPAYTNSFTRGVYYPDKVFRSSVLHSTQDLFLPFFSNVTWFHAIHVSGTNGTKRFDNPVLPFNDGVYFASTEKSNIIRGWIFGTTLDSKTQSLLIVNNATNVVIKVCEFQFCNDPFLGVYYHKNNKSWMESEFRVYSSANNCTFEYVSQPFLIDLEGKQGNFKNLREFVFKNIDGYFKIYSKHTPINLVRDLPQGFSALEPLVDLPIGINITRFQTLLALHRSYLTPGDSSSGWTAGAAAYYVGYLQPRTFLLKYNENGTITDAVDCALDPLSETKCTLKSFTVEKGIYQTSNFRVQPTESIVRFPNITNLCPFGEVFNATRFASVYAWNRKRISNCVADYSVLYNSASFSTFKCYGVSPTKLNDLCFTNVYADSFVIRGDEVRQIAPGQTGKIADYNYKLPDDFTGCVIAWNSNNLDSKVGGNYNYLYRLFRKSNLKPFERDISTEIYQAGSTPCNGVEGFNCYFPLQSYGFQPTNGVGYQPYRVVVLSFELLHAPATVCGPKKSTNLVKNKCVNFNFNGLTGTGVLTESNKKFLPFQQFGRDIADTTDAVRDPQTLEILDITPCSFGGVSVITPGTNTSNQVAVLYQGVNCTEVPVAIHADQLTPTWRVYSTGSNVFQTRAGCLIGAEHVNNSYECDIPIGAGICASYQTQTNSPRRARSVASQSIIAYTMSLGAENSVAYSNNSIAIPTNFTISVTTEILPVSMTKTSVDCTMYICGDSTECSNLLLQYGSFCTQLNRALTGIAVEQDKNTQEVFAQVKQIYKTPPIKDFGGFNFSQILPDPSKPSKRSFIEDLLFNKVTLADAGFIKQYGDCLGDIAARDLICAQKFNGLTVLPPLLTDEMIAQYCSALLAGTITSGWTFGAGAALQIPFAMQMAYRFNGIGVTQNVLYENQKLIANQFNSAIGKIQDSLSSTASALGKLQDVVNQNAQALNTLVKQLSSNFGAISSVLNDILSRLDKVEAEVQIDRLITGRLQSLQTYVTQQLIRAAEIRASANLAATKMSECVLGQSKRVDFCGKGYHLMSFPQCAPHGVVFLHVTYVPAQEKNFTTAPAICHDGKAHFPREGVFVSNGTHWFVTQRNFYEPQIITTDNTFVSGNCDVVIGIVNNTVYDPLQPELDSFKEELDKYFKNHTSPDVDLGDISGINASVVNIQKEIDRLNEVAKNLNESLIDLQELGKYEQYIKGGGSGGGQIYEGKLTAEGLRFGIVASRFNHALVDRLVEGAIDAIVRHGGREEDITLVRVPGSWEIPVAAGELARKEDIDAVIAIGVLIRGATPHFDYIASEVSKGLADLSLELRKPITFGVITADTLEQAIERAGTKHGNKGWEAALSAIEMANLFKSLR

SEQ ID NO: 4619 - protein, 1371 aa, Artificial Sequence
  SARS-CoV-2/Congo/94/2020__EPI_ISL_417947 spike protein (1-1211)(T874C_S1055C) LumSynth construct
MFVFLVLLPLVSSQCVNLTTRTQLPPAYTNSFTRGVYYPDKVFRSSVLHSTQDLFLPFFSNVTWFHAIHVSGTNGTKRFDNPVLPFNDGVYFASTEKSNIIRGWIFGTTLDSKTQSLLIVNNATNVVIKVCEFQFCNDPFLGVYYHKNNKSWMESEFRVYSSANNCTFEYVSQPFLMDLEGKQGNFKNLREFVFKNIDGYFKIYSKHTPINLVRDLPQGFSALEPLVDLPIGINITRFQTLLALHRSYLTPGDSSSGWTAGAAAYYVGYLQPRTFLLKYNENGTITDAVDCALDPLSETKCTLKSFTVEKGIYQTSNFRVQPTESIVRFPNITNLCPFGEVFNATRFASVYAWNRKRISNCVADYSVLYNSASFSTFKCYGVSPTKLNDLCFTNVYADSFVIRGDEVRQIAPGQTGKIADYNYKLPDDFTGCVIAWNSNNLDSKVGGNYNYLYRLFRKSNLKPFERDISTEIYQAGSTPCNGVEGFNCYFPLQSYGFQPTNGVGYQPYRVVVLSFELLHAPATVCGPKKSTNLVKNKCVNFNFNGLTGTGVLTESNKKFLPFQQFGRDIADTTDAVRDPQTLEILDITPCSFGGVSVITPGTNTSNQVAVLYQGVNCTEVPVAIHADQLTPTWRVYSTGSNVFQTRAGCLIGAEHVNNSYECDIPIGAGICASYQTQTNSPRRARSVASQSIIAYTMSLGAENSVAYSNNSIAIPTNFTISVTTEILPVSMTKTSVDCTMYICGDSTECSNLLLQYGSFCTQLNRALTGIAVEQDKNTQEVFAQVKQIYKTPPIKDFGGFNFSQILPDPSKPSKRSFIEDILFNKVTLADAGFIKQYGDCLGDIAARDLICAQKFNGLTVLPPLLTDEMIAQYCSALLAGTITSGWTFGAGAALQIPFAMQMAYRFNGIGVTQNVLYENQKLIANQFNSAIGKIQDSLSSTASALGKLQDVVNQNAQALNTLVKQLSSNFGAISSVLNDILSRLDKVEAEVQIDRLITGRLQSLQTYVTQQLIRAAEIRASANLAATKMSECVLGQSKRVDFCGKGYHLMSFPQCAPHGVVFLHVTYVPAQEKNFTTAPAICHDGKAHFPREGVFVSNGTHWFVTQRNFYEPQIITTDNTFVSGNCDVVIGIVNNTVYDPLQPELDSFKEELDKYFKNHTSPDVDLGDISGINASVVNIQKEIDRLNEVAKNLNESLIDLQELGKYEQYIKGGGSGGGQIYEGKLTAEGLRFGIVASRFNHALVDRLVEGAIDAIVRHGGREEDITLVRVPGSWEIPVAAGELARKEDIDAVIAIGVLIRGATPHFDYIASEVSKGLADLSLELRKPITFGVITADTLEQAIERAGTKHGNKGWEAALSAIEMANLFKSLR

SEQ ID NO: 4620 - protein, 1371 aa, Artificial Sequence
  SARS-CoV-2/Congo/158/2020__EPI_ISL_417950 spike protein (1-1211)(T874C_S1055C) LumSynth construct
MFVFLVLLPLVSSQCVNLTTRTQLPPAYTNSFTRGVYYPDKVFRSSVLHSTQDLFLPFFSNVTWFHAIHVSGTNGTKRFDNPVLPFNDGVYFASTEKSNIIRGWIFGTTLDSKTQSLLIVNNATNVVIKVCEFQFCNDPFLGVYYHKNNKSWMESEFRVYSSANNCTFEYVSQPFLMDLEGKQGNFKNLREFVFKNIDGYFKIYSKHTPINLVRDLPQGFSALEPLVDLPIGINITRFQTLLALHRSYLTPGDSSSGWTAGAAAYYVGYLQPRTFLLKYNENGTITDAVDCALDPLSETKCTLKSFTVEKGIYQTSNFRVQPTESIVRFPNITNLCPFGEVFNATRFASVYAWNRKRISNCVADYSVLYNSASFSTFKCYGVSPTKLNDLCFTNVYADSFVIRGDEVRQIAPGQTGKIADYNYKLPDDFTGCVIAWNSNNLDSKVGGNYNYLYRLFRKSNLKPFERDISTEIYQAGSTPCNGVEGFNCYFPLQSYGFQPTNGVGYQPYRVVVLSFELLHAPATVCGPKKSTNLVKNKCVNFNFNGLTGTGVLTESNKKFLPFQQFGRDIADTTDAVRDPQTLEILDITPCSFGGVSVITPGTNTSNQVAVLYQDVNCTEVPVAIHADQLTPTWRVYSTGSNVFQTRAGCLIGAEHVNNSYECDIPIGAGICASYQTQTNSPRRARSVASQSIIAYTMSLGAENSVAYSNNSIAIPTNFTISVTTEILPVSMTKTSVDCTMYICGDSTECSNLLLQYGSFCTQLNRALTGIAVEQDKNTQEVFAQVKQIYKTPPIKDFGGFNFSQILPDPSKPSKRSFIEDLLFNKVTLADAGFIKQYGDCLGDIAARDLICAQKFNGLTVLPPLLTDEMIAQYCSALLAGTITSGWTFGAGAALQIPFAMQMAYRFNGIGVTQNVLYENQKLIANQFNSAIGKIQDSLSSTASALGKLQDVVNQNAQALNTLVKQLSSNFGAISSVLNDILSRLDKVEAEVQIDRLITGRLQSLQTYVTQQLIRAAEIRASANLAATKMSECVLGQSKRVDFCGKGYHLMSFPQCAPHGVVFLHVTYVPAQEKNFTTAPAICHDGKAHFPREGVFVSNGTHWFVTQRNFYEPQIITTDNTFLSGNCDVVIGIVNNTVYDPLQPELDSFKEELDKYFKNHTSPDVDLGDISGINASVVNIQKEIDRLNEVAKNLNESLIDLQELGKYEQYIKGGGSGGGQIYEGKLTAEGLRFGIVASRFNHALVDRLVEGAIDAIVRHGGREEDITLVRVPGSWEIPVAAGELARKEDIDAVIAIGVLIRGATPHFDYIASEVSKGLADLSLELRKPITFGVITADTLEQAIERAGTKHGNKGWEAALSAIEMANLFKSLR

SEQ ID NO: 4621 - protein, 1371 aa, Artificial Sequence
  SARS-CoV-2/USA/UT-00034/2020__EPI_ISL_417977 spike protein (1-1211)(T874C_S1055C) LumSynth construct
MFVFLVLLPLVSSQCVNLTTRTQLPPAYTNSFTRGVYYPDKVFRSSVLHSTQDLFLPFFSNVTWFHAIHVSGTNGTKRFDNPVLPFNDGVYFASTEKSNIIRGWIFGTTLDSKTQSLLIVNNATNVVIKVCEFQFCNDPFLGVYYYKNNKSWMESEFRVYSSANNCTFEYVSQPFLMDLEGKQGNFKNLREFVFKNIDGYFKIYSKHTPINLVRDLPQGFSALEPLVDLPIGINITRFQTLLALHRSYLTPGDSSSGWTAGAAAYYVGYLQPRTFLLKYNENGTITDAVDCALDPLSETKCTLKSFTVEKGIYQTSNFRVQPTESIVRFPNITNLCPFGEVFNATRFASVYAWNRKRISNCVADYSVLYNSASFSTFKCYGVSPTKLNDLCFTNVYADSFVIRGDEVRQIAPGQTGKIADYNYKLPDDFTGCVIAWNSNNLDSKVGGNYNYLYRLFRKSNLKPFERDISTEIYQAGSTPCNGVEGFNCYFPLQSYGFQPTNGVGYQPYRVVVLSFELLHAPATVCGPKKSTNLVKNKCVNFNFNGLTGTGVLTESNKKFLPFQQFGRDIADTTDAVRDPQTLEILDITPCSFGGVSVITPGTNTSNQVAVLYQGVNCTEVPVAIHADQLTPTWRVYSTGSNVFQTRAGCLIGAEHVNNSYECDIPIGAGICASYQTQTNSPRRARSVASQSIIAYTMSLGAENSVAYSNNSIAIPTNFTISVTTEILPVSMTKTSVDCTMYICGDSTECSNLLLQYGSFCTQLNRALTGIAVEQDKNTQEVFAQVKQIYKTPPIKDFGGFNFSQILPDPSKPSKRSFIEDLLFNKVTLADAGFIKQYGDCLGDIAARDLICAQKFNGLTVLPPLLTDEMIAQYCSALLAGTITSGWTFGAGAALQIPFAMQMAYRFNGIGVTQNVLYENQKLIANQFNSAIGKIQDSLSSTASALGKLQDVVNQNAQALNTLVKQLSSNFGAISSVLNDILSRLDKVEAEVQIDRLITGRLQSLQTYVTQQLIRAAEIRASANLAATKMSECVLGQSKRVDFCGKGYHLMSFPQCAPHGVVFLHVTYVPAQEKNFTTAPAICHDGKAHFPREGVFVSNGTHWFVTQRNFYEPQIITTDNTFVSGNCDVVIGIVNNTVYDPLQPELDSFKEELDKYFKNHTSPDVDLGDISGINASVVNIQKEIDRLNEVAKNLNESLIDLQELGKYEQYIKGGGSGGGQIYEGKLTAEGLRFGIVASRFNHALVDRLVEGAIDAIVRHGGREEDITLVRVPGSWEIPVAAGELARKEDIDAVIAIGVLIRGATPHFDYIASEVSKGLADLSLELRKPITFGVITADTLEQAIERAGTKHGNKGWEAALSAIEMANLFKSLR

SEQ ID NO: 4622 - protein, 1371 aa, Artificial Sequence
  SARS-CoV-2/USA/UT-00033/2020__EPI_ISL_417976 spike protein (1-1211)(T874C_S1055C) LumSynth construct
MFVFLVLLPLVSSQCVNLTTRTQLPPAYTNSFTRGVYYPDKVFRSSVLHSTQDLFLPFFSNVTWFHAIHVSGTNGTKRFDNPVLPFNDGVYFASTEKSNIIRGWIFGTTLDSKTQSLLIVNNATNVVIKVCEFQFCNDPFLGVYYHKNNKSWMESEFRVYSSANNCTFEYVSQPFLMDLEGKQGNFKNLREFVFKNIDGYFKIYSKHTPINLVRDLPQGFSALEPLVDLPIGINITRFQTLLALHRSYLTPGDSSSGLTAGAAAYYVGYLQPRTFLLKYNENGTITDAVDCALDPLSETKCTLKSFTVEKGIYQTSNFRVQPTESIVRFPNITNLCPFGEVFNATRFASVYAWNRKRISNCVADYSVLYNSASFSTFKCYGVSPTKLNDLCFTNVYADSFVIRGDEVRQIAPGQTGKIADYNYKLPDDFTGCVIAWNSNNLDSKVGGNYNYLYRLFRKSNLKPFERDISTEIYQAGSTPCNGVEGFNCYFPLQSYGFQPTNGVGYQPYRVVVLSFELLHAPATVCGPKKSTNLVKNKCVNFNFNGLTGTGVLTESNKKFLPFQQFGRDIADTTDAVRDPQTLEILDITPCSFGGVSVITPGTNTSNQVAVLYQGVNCTEVPVAIHADQLTPTWRVYSTGSNVFQTRAGCLIGAEHVNNSYECDIPIGAGICASYQTQTNSPRRARSVASQSIIAYTMSLGAENSVAYSNNSIAIPTNFTISVTTEILPVSMTKTSVDCTMYICGDSTECSNLLLQYGSFCTQLNRALTGIAVEQDKNTQEVFAQVKQIYKTPPIKDFGGFNFSQILPDPSKPSKRSFIEDLLFNKVTLADAGFIKQYGDCLGDIAARDLICAQKFNGLTVLPPLLTDEMIAQYCSALLAGTITSGWTFGAGAALQIPFAMQMAYRFNGIGVTQNVLYENQKLIANQFNSAIGKIQDSLSSTASALGKLQDVVNQNAQALNTLVKQLSSNFGAISSVLNDILSRLDKVEAEVQIDRLITGRLQSLQTYVTQQLIRAAEIRASANLAATKMSECVLGQSKRVDFCGKGYHLMSFPQCAPHGVVFLHVTYVPAQEKNFTTAPAICHDGKAHFPREGVFVSNGTHWFVTQRNFYEPQIITTDNTFVSGNCDVVIGIVNNTVYDPLQPELDSFKEELDKYFKNHTSPDVDLGDISGINASVVNIQKEIDRLNEVAKNLNESLIDLQELGKYEQYIKGGGSGGGQIYEGKLTAEGLRFGIVASRFNHALVDRLVEGAIDAIVRHGGREEDITLVRVPGSWEIPVAAGELARKEDIDAVIAIGVLIRGATPHFDYIASEVSKGLADLSLELRKPITFGVITADTLEQAIERAGTKHGNKGWEAALSAIEMANLFKSLR

SEQ ID NO: 4623 - protein, 1371 aa, Artificial Sequence
  SARS-CoV-2/USA/WI-13/2020__EPI_ISL_417516 spike protein (1-1211)(T874C_S1055C) LumSynth construct
MFVFLVLLPLVSSQCVNLTTRTQLPPAYTNSFTRGVYYPDKVFRSSVLHSTQDLFLPFFSNVTWFHAIHVSGTNGTKRFDNPVLPFNDGVYFASTEKSNIIRGWIFGTTLDSKTQSLLIVNNATNVVIKVCEFQFCNDPFLGVYYHKNNKSWMESEFRVYSSANNCTFEYVSQPFLMDLEGKQGNFKNLREFVFKNIDGYFKIYSKHTPINLVRDLPQGFSALEPLVDLPIGINITRFQTLLALHRSYLTPGDSSSGWTAGAAAYYVGYLQPRTFLLKYNENGTITDAVDCALDPLSETKCTLKSFTVEKGIYQTSNFRVLPTESIVRFPNITNLCPFGEVFNATRFASVYAWNRKRISNCVADYSVLYNSASFSTFKCYGVSPTKLNDLCFTNVYADSFVIRGDEVRQIAPGQTGKIADYNYKLPDDFTGCVIAWNSNNLDSKVGGNYNYLYRLFRKSNLKPFERDISTEIYQAGSTPCNGVEGFNCYFPLQSYGFQPTNGVGYQPYRVVVLSFELLHAPATVCGPKKSTNLVKNKCVNFNFNGLTGTGVLTESNKKFLPFQQFGRDIADTTDAVRDPQTLEILDITPCSFGGVSVITPGTNTSNQVAVLYQGVNCTEVPVAIHADQLTPTWRVYSTGSNVFQTRAGCLIGAEHVNNSYECDIPIGAGICASYQTQTNSPRRARSVASQSIIAYTMSLGAENSVAYSNNSIAIPTNFTISVTTEILPVSMTKTSVDCTMYICGDSTECSNLLLQYGSFCTQLNRALTGIAVEQDKNTQEVFAQVKQIYKTPPIKDFGGFNFSQILPDPSKPSKRSFIEDLLFNKVTLADAGFIKQYGDCLGDIAARDLICAQKFNGLTVLPPLLTDEMIAQYCSALLAGTITSGWTFGAGAALQIPFAMQMAYRFNGIGVTQNVLYENQKLIANQFNSAIGKIQDSLSSTASALGKLQDVVNQNAQALNTLVKQLSSNFGAISSVLNDILSRLDKVEAEVQIDRLITGRLQSLQTYVTQQLIRAAEIRASANLAATKMSECVLGQSKRVDFCGKGYHLMSFPQCAPHGVVFLHVTYVPAQEKNFTTAPAICHDGKAHFPREGVFVSNGTHWFVTQRNFYEPQIITTDNTFVSGNCDVVIGIVNNTVYDPLQPELDSFKEELDKYFKNHTSPDVDLGDISGINASVVNIQKEIDRLNEVAKNLNESLIDLQELGKYEQYIKGGGSGGGQIYEGKLTAEGLRFGIVASRFNHALVDRLVEGAIDAIVRHGGREEDITLVRVPGSWEIPVAAGELARKEDIDAVIAIGVLIRGATPHFDYIASEVSKGLADLSLELRKPITFGVITADTLEQAIERAGTKHGNKGWEAALSAIEMANLFKSLR

SEQ ID NO: 4624 - protein, 1370 aa, Artificial Sequence
  SARS-CoV-2/India/1-27/2020__EPI_ISL_413522 spike protein (1-1210)(T873C_S1054C) LumSynth construct
MFVFLVLLPLVSSQCVNLTTRTQLPPAYTNSFTRGVYYPDKVFRSSVLHSTQDLFLPFFSNVTWFHAIHVSGTNGTKRFDNPVLPFNDGVYFASTEKSNIIRGWIFGTTLDSKTQSLLIVNNATNVVIKVCEFQFCNDPFLGVYHKNNKSWMESEFRVYSSANNCTFEYVSQPFLMDLEGKQGNFKNLREFVFKNIDGYFKIYSKHTPINLVRDLPQGFSALEPLVDLPIGINITRFQTLLALHRSYLTPGDSSSGWTAGAAAYYVGYLQPRTFLLKYNENGTITDAVDCALDPLSETKCTLKSFTVEKGIYQTSNFRVQPTESIVRFPNITNLCPFGEVFNATRFASVYAWNRKRISNCVADYSVLYNSASFSTFKCYGVSPTKLNDLCFTNVYADSFVIRGDEVIQIAPGQTGKIADYNYKLPDDFTGCVIAWNSNNLDSKVGGNYNYLYRLFRKSNLKPFERDISTEIYQAGSTPCNGVEGFNCYFPLQSYGFQPTNGVGYQPYRVVVLSFELLHAPATVCGPKKSTNLVKNKCVNFNFNGLTGTGVLTESNKKFLPFQQFGRDIADTTDAVRDPQTLEILDITPCSFGGVSVITPGTNTSNQVAVLYQDVNCTEVPVAIHADQLTPTWRVYSTGSNVFQTRAGCLIGAEHVNNSYECDIPIGAGICASYQTQTNSPRRARSVASQSIIAYTMSLGAENSVAYSNNSIAIPTNFTISVTTEILPVSMTKTSVDCTMYICGDSTECSNLLLQYGSFCTQLNRALTGIAVEQDKNTQEVFAQVKQIYKTPPIKDFGGFNFSQILPDPSKPSKRSFIEDLLFNKVTLADAGFIKQYGDCLGDIAARDLICAQKFNGLTVLPPLLTDEMIAQYCSALLAGTITSGWTFGAGAALQIPFAMQMAYRFNGIGVTQNVLYENQKLIANQFNSAIGKIQDSLSSTASALGKLQDVVNQNAQALNTLVKQLSSNFGAISSVLNDILSRLDKVEAEVQIDRLITGRLQSLQTYVTQQLIRAAEIRASANLAATKMSECVLGQSKRVDFCGKGYHLMSFPQCAPHGVVFLHVTYVPAQEKNFTTAPAICHDGKAHFPREGVFVSNGTHWFVTQRNFYEPQIITTDNTFVSGNCDVVIGIVNNTVYDPLQPELDSFKEELDKYFKNHTSPDVDLGDISGINASVVNIQKEIDRLNEVAKNLNESLIDLQELGKYEQYIKGGGSGGGQIYEGKLTAEGLRFGIVASRFNHALVDRLVEGAIDAIVRHGGREEDITLVRVPGSWEIPVAAGELARKEDIDAVIAIGVLIRGATPHFDYIASEVSKGLADLSLELRKPITFGVITADTLEQAIERAGTKHGNKGWEAALSAIEMANLFKSLR

SEQ ID NO: 4625 - protein, 1365 aa, Artificial Sequence
  SARS-CoV-2/pangolin/Guangxi/P4L/2017__EPI_ISL_410538 spike protein (1-1205)(T868C_S1049C) LumSynth construct
MFVFLFVLPLVSSQCVNLTTRTGIPPGYTNSSTRGVYYPDKVFRSSILHLTQDLFLPFFSNVTWFNTINYQGGFKKFDNPVLPFNDGVYFASTEKSNIIRGWIFGTTLDARTQSLLIVNNATNVVIKVCEFQFCTDPFLGVYYHNNNKTWVENEFRVYSSANNCTFEYISQPFLMDLEGKQGNFKNLREFVFKNVDGYFKIYSKHTPIDLVRDLPRGFAALEPLVDLPIGINITRFQTLLALHRSYLTPGNLESGWTTGAAAYYVGYLQQRTFLLSYNQNGTITDAVDCSLDPLSETKCTLKSLTVEKGIYQTSNFRVQPTISIVRFPNITNLCPFGEVFNASKFASVYAWNRKRISNCVADYSVLYNSTSFSTFKCYGVSPTKLNDLCFTNVYADSFVVKGDEVRQIAPGQTGVIADYNYKLPDDFTGCVIAWNSVKQDALTGGNYGYLYRLFRKSKLKPFERDISTEIYQAGSTPCNGQVGLNCYYPLERYGFHPTTGVNYQPFRVVVLSFELLNGPATVCGPKLSTTLVKDKCVNFNFNGLTGTGVLTTSKKQFLPFQQFGRDISDTTDAVRDPQTLEILDITPCSFGGVSVITPGTNTSNQVAVLYQDVNCTEVPMAIHAEQLTPAWRVYSAGANVFQTRAGCLVGAEHVNNSYECDIPVGAGICASYHSMSSLRSVNQRSIIAYTMSLGAENSVAYSNNSIAIPTNFTISVTTEILPVSMTKTSVDCTMYICGDSIECSNLLLQYGSFCTQLNRALTGIAVEQDKNTQEVFAQVKQIYKTPPIKDFGGFNFSQILPDPSKPSKRSFIEDLLFNKVTLADAGFIKQYGDCLGDIAARDLICAQKFNGLTVLPPLLTDEMIAQYCSALLAGTITSGWTFGAGAALQIPFAMQMAYRFNGIGVTQNVLYENQKLIANQFNSAIGKIQDSLSSTASALGKLQDVVNQNAQALNTLVKQLSSNFGAISSVLNDILSRLDKVEAEVQIDRLITGRLQSLQTYVTQQLIRAAEIRASANLAATKMSECVLGQSKRVDFCGKGYHLMSFPQCAPHGVVFLHVTYVPAQEKNFTTAPAICHEGKAHFPREGVFVSNGTHWFITQRNFYEPQIITTDNTFVSGSCDVVIGIVNNTVYDPLQPELDSFKEELDKYFKNHTSPDVDLGDISGINASVVNIQKEIDRLNEVAKNLNESPIDLQELGKYEQYIKGGGSGGGQIYEGKLTAEGLRFGIVASRFNHALVDRLVEGAIDAIVRHGGREEDITLVRVPGSWEIPVAAGELARKEDIDAVIAIGVLIRGATPHFDYIASEVSKGLADLSLELRKPITFGVITADTLEQAIERAGTKHGNKGWEAALSAIEMANLFKSLR

SEQ ID NO: 4626 - protein, 1365 aa, Artificial Sequence
  SARS-CoV-2/pangolin/Guangxi/P5L/2017__EPI_ISL_410540 spike protein (1-1205)(T868C_S1049C) LumSynth construct
MFVFLFVLPLVSSQCVNLTTRTGIPPGYTNSSTRGVYYPDKVFRSSILHLTQDLFLPFFSNVTWFNTINYQGGFKKFDNPVLPFNDGVYFASTEKSNIIRGWIFGTTLDARTQSLLIVNNATNVVIKVCEFQFCTDPFLGVYYHNNNKTWVENEFRVYSSANNCTFEYISQPFLMDLEGKQGNFKNLREFVFKNVDGYFKIYSKHTPIDLVRDLPRGFAALEPLVDLPIGINITRFQTLLALHRSYLTPGKLESGWTTGAAAYYVGYLQQRTFLLSYNQNGTITDAVDCSLDPLSETKCTLKSLTVEKGIYQTSNFRVQPTISIVRFPNITNLCPFGEVFNASKFASVYAWNRKRISNCVADYSVLYNSTSFSTFKCYGVSPTKLNDLCFTNVYADSFVVKGDEVRQIAPGQTGVIADYNYKLPDDFTGCVIAWNSVKQDALTGGNYGYLYRLFRKSKLKPFERDISTEIYQAGSTPCNGQVGLNCYYPLERYGFHPTTGVNYQPFRVVVLSFELLNGPATVCGPKLSTTLVKDKCVNFNFNGLTGTGVLTTSKKQFLPFQQFGRDISDTTDAVRDPQTLEILDITPCSFGGVSVITPGTNTSNQVAVLYQDVNCTEVPMAIHAEQLTPAWRVYSAGANVFQTRAGCLVGAEHVNNSYECDIPVGAGICASYHSMSSFRSVNQRSIIAYTMSLGAENSVAYSNNSIAIPTNFTISVTTEILPVSMTKTSVDCTMYICGDSIECSNLLLQYGSFCTQLNRALTGIAVEQDKNTQEVFAQVKQIYKTPPIKDFGGFNFSQILPDPSKPSKRSFIEDLLFNKVTLADAGFIKQYGDCLGDIAARDLICAQKFNGLTVLPPLLTDEMIAQYCSALLAGTITSGWTFGAGAALQIPFAMQMAYRFNGIGVTQNVLYENQKLIANQFNSAIGKIQDSLSSTASALGKLQDVVNQNAQALNTLVKQLSSNFGAISSVLNDILSRLDKVEAEVQIDRLITGRLQSLQTYVTQQLIRAAEIRASANLAATKMSECVLGQSKRVDFCGKGYHLMSFPQCAPHGVVFLHVTYVPAQEKNFTTAPAICHEGKAHFPREGVFVSNGTHWFITQRNFYEPQIITTDNTFVSGSCDVVIGIVNNTVYDPLQPELDSFKEELDKYFKNHTSPDVDLGDISGINASVVNIQKEIDRLNEVAKNLNESLIDLQELGKYEQYIKGGGSGGGQIYEGKLTAEGLRFGIVASRFNHALVDRLVEGAIDAIVRHGGREEDITLVRVPGSWEIPVAAGELARKEDIDAVIAIGVLIRGATPHFDYIASEVSKGLADLSLELRKPITFGVITADTLEQAIERAGTKHGNKGWEAALSAIEMANLFKSLR

SEQ ID NO: 4627 - protein, 1365 aa, Artificial Sequence
  SARS-CoV-2/pangolin/Guangxi/P5E/2017__EPI_ISL_410541 spike protein (1-1205)(T868C_S1049C) LumSynth construct
MFVFLFVLPLVSSQCVNLTTRTGIPPGYTNSSTRGVYYPDKVFRSSILHLTQDLFLPFFSNVTWFNTITYQGGSKKFDNPVLPFNDGVYFASTEKSNIIRGWIFGTTLDARTQSLLIVNNATNVVIKVCEFQFCTDPFLGVYYHNNNKTWVENEFRVYSSANNCTFEYISQPFLMDLEGKQGNFKNLREFVFKNVDGYFKIYSKHTPIDLVRDLPRGFAALEPLVDLPIGINITRFQTLLALHRSYLTPGKLESGWTTGAAAYYVGYLQQRTFLLSYNQNGTITDAVDCSLDPLSETKCTLKSLTVEKGIYQTSNFRVQPTISIVRFPNITNLCPFGEVFNASKFASVYAWNRKRISNCVADYSVLYNSTSFSTFKCYGVSPTKLNDLCFTNVYADSFVVKGDEVRQIAPGQTGVIADYNYKLPDDFTGCVIAWNSVKQDALTGDNYGYLYRLFRKSKLKPFERDISTEIYQAGSTPCNGQVGLNCYYPLERYGFHPTTGVNYQPFRVVVLSFELLNGPATVCGPKLSTTLVKDKCVNFNFNGLTGTGVLTTSKKQFLPFQQFGRDISDTTDAVRDPQTLEILDITPCSFGGVSVITPGTNTSNQVAVLYQDVNCTEVPMAIHAEQLTPAWRVYSAGANVFQTRAGCLVGAEHVNNSYECDIPVGAGICASYHSMSSFRSVNQRSIIAYTMSLGAENSVAYSNNSIAIPTNFTISVTTEILPVSMTKTSVDCTMYICGDSIECSNLLLQYGSFCTQLNRALTGIAVEQDKNTQEVFAQVKQIYKTPPIKDFGGFNFSQILPDPSKPSKRSFIEDLLFNKVTLADAGFIKQYGDCLGDIAARDLICAQKFNGLTVLPPLLTDEMIAQYCSALLAGTITSGWTFGAGAALQIPFAMQMAYRFNGIGVTQNVLYENQKLIANQFNSAIGKIQDSLSSTASALGKLQDVVNQNAQALNTLVKQLSSNFGAISSVLNDILSRLDKVEAEVQIDRLITGRLQSLQTYVTQQLIRAAEIRASANLAATKMSECVLGQSKRVDFCGKGYHLMSFPQCAPHGVVFLHVTYVPAQEKNFTTAPAICHEGKAHFPREGVFVSNGTHWFITQRNFYEPQIITTDNTFVSGSCDVVIGIVNNTVYDPLQPELDSFKEELDKYFKNHTSPDVDLGDISGINASVVNIQKEIDRLNEVAKNLNESLIDLQELGKYEQYIKGGGSGGGQIYEGKLTAEGLRFGIVASRFNHALVDRLVEGAIDAIVRHGGREEDITLVRVPGSWEIPVAAGELARKEDIDAVIAIGVLIRGATPHFDYIASEVSKGLADLSLELRKPITFGVITADTLEQAIERAGTKHGNKGWEAALSAIEMANLFKSLR

SEQ ID NO: 4628 - protein, 1363 aa, Artificial Sequence
  SARS-CoV-2/pangolin/Guangxi/P1E/2017__EPI_ISL_410539 spike protein (1-1203)(T866C_S1047C) LumSynth construct
MFVFLFVLPLVSSQCVNLTTRTGIQPGYTNSSTRGVYYPDKVFRSSILHLTQDLFLPFFSNVTWFNTINYQGGFKKFDNPVLPFNDGVYFASTEKSNIIRGWIFGTTLDARTQSLLIVNNATNVVIKVCEFQFCTDPFLGVYYHNNNKTWVENEFRVYSSANNCTFEYISQPFLMDLEGKQGNFKNLREFVFKNVDGYFKIYSKHTPIDLVRDLPRGFAALEPLVDLPIGINITRFQTLLALHRSYLTPGKLESGWTTGAAAYYVGYLQQRTFLLSYNQNGTITDAVDCSLDPLSETKCTLKSLTVEKGIYQTSNFRVQPTISIVRFPNITNLCPFGEVFNASKFASVYAWNRKRISNCVADYSVLYNSTSFSTFKCYGVSPTKLNDLCFTNVYADSFVVKGDEVRQIAPGQTGVIADYNYKLPDDFTGCVIAWNSVKQDALTGGNYLYRLFRKSKLKPFERDISTEIYQAGSTPCNGQVGLNCYYPLERYGFHPTTGVNYQPFRVVVLSFELLNGPATVCGPKLSTTLVKDKCVNFNFNGLTGTGVLTTSKKQFLPFQQFGRDISDTTDAVRDPQTLEILDITPCSFGGVSVITPGTNTSNQVAVLYQDVNCTEVPMAIHAEQLTPAWRVYSAGANVFQTRAGCLVGAEHVNNSYECDIPVGAGICASYHSMSSLRSVNQRSIIAYTMSLGAENSVAYSNNSIAIPTNFTISVTTEILPVSMTKTSVDCTMYICGDSIECSNLLLQYGSFCTQLNRALTGIAVEQDKNTQEVFAQVKQIYKTPPIKDFGGFNFSQILPDPSKPSKRSFIEDLLFNKVTLADAGFIKQYGDCLGDIAARDLICAQKFNGLTVLPPLLTDEMIAQYCSALLAGTITSGWTFGAGAALQIPFAMQMAYRFNGIGVTQNVLYENQKLIANQFNSAIGKIQDSLSSTASALGKLQDVVNQNAQALNTLVKQLSSNFGAISSVLNDILSRLDKVEAEVQIDRLITGRLQSLQTYVTQQLIRAAEIRASANLAATKMSECVLGQSKRVDFCGKGYHLMSFPQCAPHGVVFLHVTYVPAQEKNFTTAPAICHEGKAHFPREGVFVSNGTHWFITQRNFYEPQIITTDNTFVSGSCDVVIGIVNNTVYDPLQPELDSFKEELDKYFKNHTSPDVDLGDISGINASVVNIQKEIDRLNEVAKNLNESLIDLQELGKYEQYIKGGGSGGGQIYEGKLTAEGLRFGIVASRFNHALVDRLVEGAIDAIVRHGGREEDITLVRVPGSWEIPVAAGELARKEDIDAVIAIGVLIRGATPHFDYIASEVSKGLADLSLELRKPITFGVITADTLEQAIERAGTKHGNKGWEAALSAIEMANLFKSLR

SEQ ID NO: 4629 - protein, 1379 aa, Artificial Sequence
  SARS-CoV-2/Wuhan/WIV05/2019__EPI_ISL_402128 spike protein (1-1211) Ferritin construct
MFVFLVLLPLVSSQCVNLTTRTQLPPAYTNSFTRGVYYPDKVFRSSVLHSTQDLFLPFFSNVTWFHAIHVSGTNGTKRFDNPVLPFNDGVYFASTEKSNIIRGWIFGTTLDSKTQSLLIVNNATNVVIKVCEFQFCNDPFLGVYYHKNNKSWMESEFRVYSSANNCTFEYVSQPFLMDLEGKQGNFKNLREFVFKNIDGYFKIYSKHTPINLVRDLPQGFSALEPLVDLPIGINITRFQTLLALHRSYLTPGDSSSGWTAGAAAYYVGYLQPRTFLLKYNENGTITDAVDCALDPLSETKCTLKSFTVEKGIYQTSNFRVQPTESIVRFPNITNLCPFGEVFNATRFASVYAWNRKRISNCVADYSVLYNSASFSTFKCYGVSPTKLNDLCFTNVYADSFVIRGDEVRQIAPGQTGKIADYNYKLPDDFTGCVIAWNSNNLDSKVGGNYNYLYRLFRKSNLKPFERDISTEIYQAGSTPCNGVEGFNCYFPLQSYGFQPTNGVGYQPYRVVVLSFELLHAPATVCGPKKSTNLVKNKCVNFNFNGLTGTGVLTESNKKFLPFQQFGRDIADTTDAVRDPQTLEILDITPCSFGGVSVITPGTNTSNQVAVLYQDVNCTEVPVAIHADQLTPTWRVYSTGSNVFQTRAGCLIGAEHVNNSYECDIPIGAGICASYQTQTNSPRRARSVASQSIIAYTMSLGAENSVAYSNNSIAIPTNFTISVTTEILPVSMTKTSVDCTMYICGDSTECSNLLLQYGSFCTQLNRALTGIAVEQDKNTQEVFAQVKQIYKTPPIKDFGGFNFSQILPDPSKPSKRSFIEDLLFNKVTLADAGFIKQYGDCLGDIAARDLICAQKFNGLTVLPPLLTDEMIAQYTSALLAGTITSGWTFGAGAALQIPFAMQMAYRFNGIGVTQNVLYENQKLIANQFNSAIGKIQDSLSSTASALGKLQDVVNQNAQALNTLVKQLSSNFGAISSVLNDILSRLDKVEAEVQIDRLITGRLQSLQTYVTQQLIRAAEIRASANLAATKMSECVLGQSKRVDFCGKGYHLMSFPQSAPHGVVFLHVTYVPAQEKNFTTAPAICHDGKAHFPREGVFVSNGTHWFVTQRNFYEPQIITTDNTFVSGNCDVVIGIVNNTVYDPLQPELDSFKEELDKYFKNHTSPDVDLGDISGINASVVNIQKEIDRLNEVAKNLNESLIDLQELGKYEQYIKGGGGSDIIKLLNEQVNKEMQSSNLYMSMSSWCYTHSLDGAGLFLFDHAAEEYEHAKKLIIFLNENNVPVQLTSISAPEHKFEGLTQIFQKAYEHEQHISESINNIVDHAIKSKDHATFNFLQWYVAEQHEEEVLFKDILDKIELIGNENHGLYLADQYVKGIAKSRKS

SEQ ID NO: 4630 - protein, 1375 aa, Artificial Sequence
  SARS-CoV-2/bat/Yunnan/RaTG13/2013__EPI_ISL_402131 spike protein (1-1207) Ferritin construct
MFVFLVLLPLVSSQCVNLTTRTQLPPAYTNSSTRGVYYPDKVFRSSVLHLTQDLFLPFFSNVTWFHAIHVSGTNGIKRFDNPVLPFNDGVYFASTEKSNIIRGWIFGTTLDSKTQSLLIVNNATNVVIKVCEFQFCNDPFLGVYYHKNNKSWMESEFRVYSSANNCTFEYVSQPFLMDLEGKQGNFKNLREFVFKNIDGYFKIYSKHTPINLVRDLPPGFSALEPLVDLPIGINITRFQTLLALHRSYLTPGDSSSGWTAGAAAYYVGYLQPRTFLLKYNENGTITDAVDCALDPLSETKCTLKSFTVEKGIYQTSNFRVQPTDSIVRFPNITNLCPFGEVFNATTFASVYAWNRKRISNCVADYSVLYNSTSFSTFKCYGVSPTKLNDLCFTNVYADSFVITGDEVRQIAPGQTGKIADYNYKLPDDFTGCVIAWNSKHIDAKEGGNFNYLYRLFRKANLKPFERDISTEIYQAGSKPCNGQTGLNCYYPLYRYGFYPTDGVGHQPYRVVVLSFELLNAPATVCGPKKSTNLVKNKCVNFNFNGLTGTGVLTESNKKFLPFQQFGRDIADTTDAVRDPQTLEILDITPCSFGGVSVITPGTNASNQVAVLYQDVNCTEVPVAIHADQLTPTWRVYSTGSNVFQTRAGCLIGAEHVNNSYECDIPIGAGICASYQTQTNSRSVASQSIIAYTMSLGAENSVAYSNNSIAIPTNFTISVTTEILPVSMTKTSVDCTMYICGDSTECSNLLLQYGSFCTQLNRALTGIAVEQDKNTQEVFAQVKQIYKTPPIKDFGGFNFSQILPDPSKPSKRSFIEDLLFNKVTLADAGFIKQYGDCLGDIAARDLICAQKFNGLTVLPPLLTDEMIAQYTSALLAGTITSGWTFGAGAALQIPFAMQMAYRFNGIGVTQNVLYENQKLIANQFNSAIGKIQDSLSSTASALGKLQDVVNQNAQALNTLVKQLSSNFGAISSVLNDILSRLDKVEAEVQIDRLITGRLQSLQTYVTQQLIRAAEIRASANLAATKMSECVLGQSKRVDFCGKGYHLMSFPQSAPHGVVFLHVTYVPAQEKNFTTAPAICHDGKAHFPREGVFVSNGTHWFVTQRNFYEPQIITTDNTFVSGSCDVVIGIVNNTVYDPLQPELDSFKEELDKYFKNHTSPDVDLGDISGINASVVNIQKEIDRLNEVAKNLNESLIDLQELGKYEQYIKGGGGSDIIKLLNEQVNKEMQSSNLYMSMSSWCYTHSLDGAGLFLFDHAAEEYEHAKKLIIFLNENNVPVQLTSISAPEHKFEGLTQIFQKAYEHEQHISESINNIVDHAIKSKDHATFNFLQWYVAEQHEEEVLFKDILDKIELIGNENHGLYLADQYVKGIAKSRKS

SEQ ID NO: 4631 - protein, 1379 aa, Artificial Sequence
  SARS-CoV-2/Wuhan/HBCDC-HB-01/2019__EPI_ISL_402132 spike protein (1-1211) Ferritin construct
MFVFLVLLPLVSSQCVNLTTRTQLPPAYTNSITRGVYYPDKVFRSSVLHSTQDLFLPFFSNVTWFHAIHVSGTNGTKRFDNPVLPFNDGVYFASTEKSNIIRGWIFGTTLDSKTQSLLIVNNATNVVIKVCEFQFCNDPFLGVYYHKNNKSWMESEFRVYSSANNCTFEYVSQPFLMDLEGKQGNFKNLREFVFKNIDGYFKIYSKHTPINLVRDLPQGFSALEPLVDLPIGINITRFQTLLALHRSYLTPGDSSSGWTAGAAAYYVGYLQPRTFLLKYNENGTITDAVDCALDPLSETKCTLKSFTVEKGIYQTSNFRVQPTESIVRFPNITNLCPFGEVFNATRFASVYAWNRKRISNCVADYSVLYNSASFSTFKCYGVSPTKLNDLCFTNVYADSFVIRGDEVRQIAPGQTGKIADYNYKLPDDFTGCVIAWNSNNLDSKVGGNYNYLYRLFRKSNLKPFERDISTEIYQAGSTPCNGVEGFNCYFPLQSYGFQPTNGVGYQPYRVVVLSFELLHAPATVCGPKKSTNLVKNKCVNFNFNGLTGTGVLTESNKKFLPFQQFGRDIADTTDAVRDPQTLEILDITPCSFGGVSVITPGTNTSNQVAVLYQDVNCTEVPVAIHADQLTPTWRVYSTGSNVFQTRAGCLIGAEHVNNSYECDIPIGAGICASYQTQTNSPRRARSVASQSIIAYTMSLGAENSVAYSNNSIAIPTNFTISVTTEILPVSMTKTSVDCTMYICGDSTECSNLLLQYGSFCTQLNRALTGIAVEQDKNTQEVFAQVKQIYKTPPIKDFGGFNFSQILPDPSKPSKRSFIEDLLFNKVTLADAGFIKQYGDCLGDIAARDLICAQKFNGLTVLPPLLTDEMIAQYTSALLAGTITSGWTFGAGAALQIPFAMQMAYRFNGIGVTQNVLYENQKLIANQFNSAIGKIQDSLSSTASALGKLQDVVNQNAQALNTLVKQLSSNFGAISSVLNDILSRLDKVEAEVQIDRLITGRLQSLQTYVTQQLIRAAEIRASANLAATKMSECVLGQSKRVDFCGKGYHLMSFPQSAPHGVVFLHVTYVPAQEKNFTTAPAICHDGKAHFPREGVFVSNGTHWFVTQRNFYEPQIITTDNTFVSGNCDVVIGIVNNTVYDPLQPELDSFKEELDKYFKNHTSPDVDLGDISGINASVVNIQKEIDRLNEVAKNLNESLIDLQELGKYEQYIKGGGGSDIIKLLNEQVNKEMQSSNLYMSMSSWCYTHSLDGAGLFLFDHAAEEYEHAKKLIIFLNENNVPVQLTSISAPEHKFEGLTQIFQKAYEHEQHISESINNIVDHAIKSKDHATFNFLQWYVAEQHEEEVLFKDILDKIELIGNENHGLYLADQYVKGIAKSRKS

SEQ ID NO: 4632 - protein, 1379 aa, Artificial Sequence
  SARS-CoV-2/Guangdong/20SF028/2020__EPI_ISL_403936 spike protein (1-1211) Ferritin construct
MFVFLVLLPLVSSQCVNLTTRTQLPPAYTNSFTRGVYYPDKVFRSSVLYSTQDLFLPFFSNVTWFHAIHVSGTNGTKRFDNPVLPFNDGVYFASTEKSNIIRGWIFGTTLDSKTQSLLIVNNATNVVIKVCEFQFCNDPFLGVYYHKNNKSWMESEFRVYSSANNCTFEYVSQPFLMDLEGKQGNFKNLREFVFKNIDGYFKIYSKHTPINLVRDLPQGFSALEPLVDLPIGINITRFQTLLALHRSYLTPGDSSSGWTAGAAAYYVGYLQPRTFLLKYNENGTITDAVDCALDPLSETKCTLKSFTVEKGIYQTSNFRVQPTESIVRFPNITNLCPFGEVFNATRFASVYAWNRKRISNCVADYSVLYNSASFSTFKCYGVSPTKLNDLCFTNVYADSFVIRGDEVRQIAPGQTGKIADYNYKLPDDFTGCVIAWNSNNLDSKVGGNYNYLYRLFRKSNLKPFERDISTEIYQAGSTPCNGVEGFNCYFPLQSYGFQPTNGVGYQPYRVVVLSFELLHAPATVCGPKKSTNLVKNKCVNFNFNGLTGTGVLTESNKKFLPFQQFGRDIADTTDAVRDPQTLEILDITPCSFGGVSVITPGTNTSNQVAVLYQDVNCTEVPVAIHADQLTPTWRVYSTGSNVFQTRAGCLIGAEHVNNSYECDIPIGAGICASYQTQTNSPRRARSVASQSIIAYTMSLGAENSVAYSNNSIAIPTNFTISVTTEILPVSMTKTSVDCTMYICGDSTECSNLLLQYGSFCTQLNRALTGIAVEQDKNTQEVFAQVKQIYKTPPIKDFGGFNFSQILPDPSKPSKRSFIEDLLFNKVTLADAGFIKQYGDCLGDIAARDLICAQKFNGLTVLPPLLTDEMIAQYTSALLAGTITSGWTFGAGAALQIPFAMQMAYRFNGIGVTQNVLYENQKLIANQFNSAIGKIQDSLSSTASALGKLQDVVNQNAQALNTLVKQLSSNFGAISSVLNDILSRLDKVEAEVQIDRLITGRLQSLQTYVTQQLIRAAEIRASANLAATKMSECVLGQSKRVDFCGKGYHLMSFPQSAPHGVVFLHVTYVPAQEKNFTTAPAICHDGKAHFPREGVFVSNGTHWFVTQRNFYEPQIITTDNTFVSGNCDVVIGIVNNTVYDPLQPELDSFKEELDKYFKNHTSPDVDLGDISGINASVVNIQKEIDRLNEVAKNLNESLIDLQELGKYEQYIKGGGGSDIIKLLNEQVNKEMQSSNLYMSMSSWCYTHSLDGAGLFLFDHAAEEYEHAKKLIIFLNENNVPVQLTSISAPEHKFEGLTQIFQKAYEHEQHISESINNIVDHAIKSKDHATFNFLQWYVAEQHEEEVLFKDILDKIELIGNENHGLYLADQYVKGIAKSRKS

SEQ ID NO: 4633 - protein, 1379 aa, Artificial Sequence
  SARS-CoV-2/Shenzhen/SZTH-001/2020__EPI_ISL_406592 spike protein (1-1211) Ferritin construct
MFVFLVLLPLVSSQCVNLTTRTQLPPAYTNSFTRGVYYPDKVFRSSVLHSTQDLFLPFFSNVTWFHAIHVSGTNGTKRFDNPVLPFNDGVYFASTEKSNIIRGWIFGTTLDSKTQSLLIVNNATNVVIKVCEFQFCNDPFLGVYYHKNNKSWMESEFRVYSSANNCTFEYVSQPFLMDLEGKQGNFKNLREFVFKNIDGYFKIYSKHTPINLVRDLPQGFSALEPLVDLPIGINITRFQTLLALHRSYLTPGDSSSGWTAGAAAYYVGYLQPRTFLLKYNENGTITDAVDCALDPLSETKCTLKSFTVEKGIYQTSNFRVQPTESIVRFPNITNLCPFGEVFNATRFASVYAWNRKRISNCVADYSVLYNSASFSTFKCYGVSPTKLNDLCFTNVYADSFVIRGDEVRQIAPGQTGKIADYNYKLPDDFTGCVIAWNSNNLDSKVGGNYNYLYRLFRKSNLKPFERDISTEIYQAGSTPCNGVEGFNCYFPLQSYGFQPTNGVGYQPYRVVVLSFELLHAPATVCGPKKSTNLVKNKCVNFNFNGLTGTGVLTESNKKFLPFQQFGRDIADTTDAVRDPQTLEILDITPCSFGGVSVITPGTNTSNQVAVLYQDVNCTEVPVAIHADQLTPTWRVYSTGSNVFQTRAGCLIGAEHVNNSYECDIPIGAGICASYQTQTNSPRRARSVASQSIIAYTMSLGAENSVAYSNNSIAIPTNFTISVTTEILPVSMTKTSVDCTMYICGDSTECSNLLLQYGSFCTQLNRALTGIAVEQDKNTQEVFAQVKQIYKTPPIKDFGGFNFSQILPDPSKPSKRSFIEDLLFNKVTLADAGFIKQYGDCLGDIAARDLICAQKFNGLTVLPPLLTDEMIAQYTSALLAGTITSGWTFGAGAALQIPFAMQMAYRFNGIGVTQNVLYENQKLIANQFNSAIGKIQDSLSSTASALGKLQDVVNQNAQALNTLVKQLSSNFGAISSVLNDILSRLDKVEAEVQIDRLITGRLQSLQTYVTQQLIRAAEIRASANLAATKMSECVLGQSKRVDFCGKGYHLMSFPQSAPHGVVFLHVTYVPAQEKNFTTAPAICHDGKAHFPREGVFVSNGTHWFVTQRNFYEPQIITTDNTFVSGNCDVLIGIVNNTVYDPLQPELDSFKEELDKYFKNHTSPDVDLGDISGINASVVNIQKEIDRLNEVAKNLNESLIDLQELGKYEQYIKGGGGSDIIKLLNEQVNKEMQSSNLYMSMSSWCYTHSLDGAGLFLFDHAAEEYEHAKKLIIFLNENNVPVQLTSISAPEHKFEGLTQIFQKAYEHEQHISESINNIVDHAIKSKDHATFNFLQWYVAEQHEEEVLFKDILDKIELIGNENHGLYLADQYVKGIAKSRKS

SEQ ID NO: 4634 - protein, 1379 aa, Artificial Sequence
  SARS-CoV-2/Shenzhen/SZTH-004/2020__EPI_ISL_406595 spike protein (1-1211) Ferritin construct
MFVFLVLLPLVSSQCVNLTTRTQLPPAYTNSFTRGVYYPDKVFRSSVLHSTQDLFLPFFSNVTWFHAIHVSGTNGTKRFDNPVLPFNDGVYFASTEKSNIIRGWIFGTTLDSKTQSLLIVNNATNVVIKVCEFQFCNDPFLGVYYHKNNKSWMESEFRVYSSANNCTFEYVSQPFLMDLEGKQGNFKNLREFVFKNIDGYFKIYSKHTPINLVRDLPQGFSALEPLVDLPIGINITRFQTLLALHRSYLTPGDSSSGWTAGAAAYYVGYLQPRTFLLKYNENGTITDAVDCALDPLSETKCTLKSFTVEKGIYQTSNFRVQPTESIVRFPNITNLCPFGEVFNATRFASVYAWDRKRISNCVAYYSVLYNSASFSTFKCYGVSPTKLNDLCFTNVYADSFVIRGDEVRQIAPGQTGKIADYNYKLPDDFTGCVIAWNSNNLDSKVGGNYNYLYRLFRKSNLKPFERDISTEIYQAGSTPCNGVEGFNCYFPLQSYGFQPTNGVGYQPYRVVVLSFELLHAPATVCGPKKSTNLVKNKCVNFNFNGLTGTGVLTESNKKFLPFQQFGRDIADTTDAVRDPQTLEILDITPCSFGGVSVITPGTNTSNQVAVLYQDVNCTEVPVAIHADQLTPTWRVYSTGSNVFQTRAGCLIGAEHVNNSYECDIPIGAGICASYQTQTNSPRRARSVASQSIIAYTMSLGAENSVAYSNNSIAIPTNFTISVTTEILPVSMTKTSVDCTMYICGDSTECSNLLLQYGSFCTQLNRALTGIAVEQDKNTQEVFAQVKQIYKTPPIKDFGGFNFSQILPDPSKPSKRSFIEDLLFNKVTLADAGFIKQYGDCLGDIAARDLICAQKFNGLTVLPPLLTDEMIAQYTSALLAGTITSGWTFGAGAALQIPFAMQMAYRFNGIGVTQNVLYENQKLIANQFNSAIGKIQDSLSSTASALGKLQDVVNQNAQALNTLVKQLSSNFGAISSVLNDILSRLDKVEAEVQIDRLITGRLQSLQTYVTQQLIRAAEIRASANLAATKMSECVLGQSKRVDFCGKGYHLMSFPQSAPHGVVFLHVTYVPAQEKNFTTAPAICHDGKAHFPREGVFVSNGTHWFVTQRNFYEPQIITTDNTFVSGNCDVVIGIVNNTVYDPLQPELDSFKEELDKYFKNHTSPDVDLGDISGINASVVNIQKEIDRLNEVAKNLNESLIDLQELGKYEQYIKGGGGSDIIKLLNEQVNKEMQSSNLYMSMSSWCYTHSLDGAGLFLFDHAAEEYEHAKKLIIFLNENNVPVQLTSISAPEHKFEGLTQIFQKAYEHEQHISESINNIVDHAIKSKDHATFNFLQWYVAEQHEEEVLFKDILDKIELIGNENHGLYLADQYVKGIAKSRKS

SEQ ID NO: 4635 - protein, 1379 aa, Artificial Sequence
  SARS-CoV-2/France/IDF0372/2020__EPI_ISL_406596 spike protein (1-1211) Ferritin construct
MFVFLVLLPLVSSQCVNLTTRTQLPPAYTNSFTRGVYYPDKVFRSSVLHSTQDLFLPFFSNVTWFHAIHVSGTNGTKRFDNPVLPFNDGVYFASTEKSNIIRGWIFGTTLDSKTQSLLIVNNATNVVIKVCEFQFCNDPFLGVYYHKNNKSWMESEFRVYSSANNCTFEYVSQPFLMDLEGKQGNFKNLREFVFKNIDGYFKIYSKHTPINLVRDLPQGFSALEPLVDLPIGINITRFQTLLALHRSYLTPGDSSSGWTAGAAAYYVGYLQPRTFLLKYNENGTITDAVDCALDPLSETKCTLKSFTVEKGIYQTSNFRVQPTESIVRFPNITNLCPFGEVFNATRFASVYAWNRKRISNCVADYSFLYNSASFSTFKCYGVSPTKLNDLCFTNVYADSFVIRGDEVRQIAPGQTGKIADYNYKLPDDFTGCVIAWNSNNLDSKVGGNYNYLYRLFRKSNLKPFERDISTEIYQAGSTPCNGVEGFNCYFPLQSYGFQPTNGVGYQPYRVVVLSFELLHAPATVCGPKKSTNLVKNKCVNFNFNGLTGTGVLTESNKKFLPFQQFGRDIADTTDAVRDPQTLEILDITPCSFGGVSVITPGTNTSNQVAVLYQDVNCTEVPVAIHADQLTPTWRVYSTGSNVFQTRAGCLIGAEHVNNSYECDIPIGAGICASYQTQTNSPRRARSVASQSIIAYTMSLGAENSVAYSNNSIAIPTNFTISVTTEILPVSMTKTSVDCTMYICGDSTECSNLLLQYGSFCTQLNRALTGIAVEQDKNTQEVFAQVKQIYKTPPIKDFGGFNFSQILPDPSKPSKRSFIEDLLFNKVTLADAGFIKQYGDCLGDIAARDLICAQKFNGLTVLPPLLTDEMIAQYTSALLAGTITSGWTFGAGAALQIPFAMQMAYRFNGIGVTQNVLYENQKLIANQFNSAIGKIQDSLSSTASALGKLQDVVNQNAQALNTLVKQLSSNFGAISSVLNDILSRLDKVEAEVQIDRLITGRLQSLQTYVTQQLIRAAEIRASANLAATKMSECVLGQSKRVDFCGKGYHLMSFPQSAPHGVVFLHVTYVPAQEKNFTTAPAICHDGKAHFPREGVFVSNGTHWFVTQRNFYEPQIITTDNTFVSGNCDVVIGIVNNTVYDPLQPELDSFKEELDKYFKNHTSPDVDLGDISGINASVVNIQKEIDRLNEVAKNLNESLIDLQELGKYEQYIKGGGGSDIIKLLNEQVNKEMQSSNLYMSMSSWCYTHSLDGAGLFLFDHAAEEYEHAKKLIIFLNENNVPVQLTSISAPEHKFEGLTQIFQKAYEHEQHISESINNIVDHAIKSKDHATFNFLQWYVAEQHEEEVLFKDILDKIELIGNENHGLYLADQYVKGIAKSRKS

SEQ ID NO: 4636 - protein, 1379 aa, Artificial Sequence
  SARS-CoV-2/Australia/VIC01/2020__EPI_ISL_406844 spike protein (1-1211) Ferritin construct
MFVFLVLLPLVSSQCVNLTTRTQLPPAYTNSFTRGVYYPDKVFRSSVLHSTQDLFLPFFSNVTWFHAIHVSGTNGTKRFDNPVLPFNDGVYFASTEKSNIIRGWIFGTTLDSKTQSLLIVNNATNVVIKVCEFQFCNDPFLGVYYHKNNKSWMESEFRVYSSANNCTFEYVSQPFLMDLEGKQGNFKNLREFVFKNIDGYFKIYSKHTPINLVRDLPQGFSALEPLVDLPIGINITRFQTLLALHRRYLTPGDSSSGWTAGAAAYYVGYLQPRTFLLKYNENGTITDAVDCALDPLSETKCTLKSFTVEKGIYQTSNFRVQPTESIVRFPNITNLCPFGEVFNATRFASVYAWNRKRISNCVADYSVLYNSASFSTFKCYGVSPTKLNDLCFTNVYADSFVIRGDEVRQIAPGQTGKIADYNYKLPDDFTGCVIAWNSNNLDSKVGGNYNYLYRLFRKSNLKPFERDISTEIYQAGSTPCNGVEGFNCYFPLQSYGFQPTNGVGYQPYRVVVLSFELLHAPATVCGPKKSTNLVKNKCVNFNFNGLTGTGVLTESNKKFLPFQQFGRDIADTTDAVRDPQTLEILDITPCSFGGVSVITPGTNTSNQVAVLYQDVNCTEVPVAIHADQLTPTWRVYSTGSNVFQTRAGCLIGAEHVNNSYECDIPIGAGICASYQTQTNSPRRARSVASQSIIAYTMSLGAENSVAYSNNSIAIPTNFTISVTTEILPVSMTKTSVDCTMYICGDSTECSNLLLQYGSFCTQLNRALTGIAVEQDKNTQEVFAQVKQIYKTPPIKDFGGFNFSQILPDPSKPSKRSFIEDLLFNKVTLADAGFIKQYGDCLGDIAARDLICAQKFNGLTVLPPLLTDEMIAQYTSALLAGTITSGWTFGAGAALQIPFAMQMAYRFNGIGVTQNVLYENQKLIANQFNSAIGKIQDSLSSTASALGKLQDVVNQNAQALNTLVKQLSSNFGAISSVLNDILSRLDKVEAEVQIDRLITGRLQSLQTYVTQQLIRAAEIRASANLAATKMSECVLGQSKRVDFCGKGYHLMSFPQSAPHGVVFLHVTYVPAQEKNFTTAPAICHDGKAHFPREGVFVSNGTHWFVTQRNFYEPQIITTDNTFVSGNCDVVIGIVNNTVYDPLQPELDSFKEELDKYFKNHTSPDVDLGDISGINASVVNIQKEIDRLNEVAKNLNESLIDLQELGKYEQYIKGGGGSDIIKLLNEQVNKEMQSSNLYMSMSSWCYTHSLDGAGLFLFDHAAEEYEHAKKLIIFLNENNVPVQLTSISAPEHKFEGLTQIFQKAYEHEQHISESINNIVDHAIKSKDHATFNFLQWYVAEQHEEEVLFKDILDKIELIGNENHGLYLADQYVKGIAKSRKS

SEQ ID NO: 4637 - protein, 1379 aa, Artificial Sequence
  SARS-CoV-2/Germany/BavPat1/2020__EPI_ISL_406862 spike protein (1-1211) Ferritin construct
MFVFLVLLPLVSSQCVNLTTRTQLPPAYTNSFTRGVYYPDKVFRSSVLHSTQDLFLPFFSNVTWFHAIHVSGTNGTKRFDNPVLPFNDGVYFASTEKSNIIRGWIFGTTLDSKTQSLLIVNNATNVVIKVCEFQFCNDPFLGVYYHKNNKSWMESEFRVYSSANNCTFEYVSQPFLMDLEGKQGNFKNLREFVFKNIDGYFKIYSKHTPINLVRDLPQGFSALEPLVDLPIGINITRFQTLLALHRSYLTPGDSSSGWTAGAAAYYVGYLQPRTFLLKYNENGTITDAVDCALDPLSETKCTLKSFTVEKGIYQTSNFRVQPTESIVRFPNITNLCPFGEVFNATRFASVYAWNRKRISNCVADYSVLYNSASFSTFKCYGVSPTKLNDLCFTNVYADSFVIRGDEVRQIAPGQTGKIADYNYKLPDDFTGCVIAWNSNNLDSKVGGNYNYLYRLFRKSNLKPFERDISTEIYQAGSTPCNGVEGFNCYFPLQSYGFQPTNGVGYQPYRVVVLSFELLHAPATVCGPKKSTNLVKNKCVNFNFNGLTGTGVLTESNKKFLPFQQFGRDIADTTDAVRDPQTLEILDITPCSFGGVSVITPGTNTSNQVAVLYQGVNCTEVPVAIHADQLTPTWRVYSTGSNVFQTRAGCLIGAEHVNNSYECDIPIGAGICASYQTQTNSPRRARSVASQSIIAYTMSLGAENSVAYSNNSIAIPTNFTISVTTEILPVSMTKTSVDCTMYICGDSTECSNLLLQYGSFCTQLNRALTGIAVEQDKNTQEVFAQVKQIYKTPPIKDFGGFNFSQILPDPSKPSKRSFIEDLLFNKVTLADAGFIKQYGDCLGDIAARDLICAQKFNGLTVLPPLLTDEMIAQYTSALLAGTITSGWTFGAGAALQIPFAMQMAYRFNGIGVTQNVLYENQKLIANQFNSAIGKIQDSLSSTASALGKLQDVVNQNAQALNTLVKQLSSNFGAISSVLNDILSRLDKVEAEVQIDRLITGRLQSLQTYVTQQLIRAAEIRASANLAATKMSECVLGQSKRVDFCGKGYHLMSFPQSAPHGVVFLHVTYVPAQEKNFTTAPAICHDGKAHFPREGVFVSNGTHWFVTQRNFYEPQIITTDNTFVSGNCDVVIGIVNNTVYDPLQPELDSFKEELDKYFKNHTSPDVDLGDISGINASVVNIQKEIDRLNEVAKNLNESLIDLQELGKYEQYIKGGGGSDIIKLLNEQVNKEMQSSNLYMSMSSWCYTHSLDGAGLFLFDHAAEEYEHAKKLIIFLNENNVPVQLTSISAPEHKFEGLTQIFQKAYEHEQHISESINNIVDHAIKSKDHATFNFLQWYVAEQHEEEVLFKDILDKIELIGNENHGLYLADQYVKGIAKSRKS

SEQ ID NO: 4638 - protein, 1379 aa, Artificial Sequence
  SARS-CoV-2/Wuhan/HBCDC-HB-02/2020__EPI_ISL_412978 spike protein (1-1211) Ferritin construct
MFVFLVLLPLVSSQCVNLTTRTQLPPAYTNSFTRGVYYPDKVFRSSVLHSTQDLFLPFFSNVTWFHAIHVSGTNGTKRFDNPVLPFNDGVYFASTEKSNIIRGWIFGTTLDSKTQSLLIVNNATNVVIKVCEFQFCNDPFLGVYYHKNNKSWMESEFRVYSSANNCTFEYVSQPFLMDLEGKQGNFKNLREFVFKNIDGYFKIYSKHTPINLVRDLPQGFSALEPLVDLPIGINITRFQTLLALHRSYLTPGDSSSGWTAGAAAYYVGYLQPRTFLLKYNENGTITDAVDCALDPLSETKCTLKSFTVEKGIYQTSNFRVQPTESIVRFPNITNLCPFGEVFNATRFASVYAWNRKRISNCVADYSVLYNSASFSTFKCYGVSPTKLNDLCFTNVYADSFVIRGDEVRQIAPGQTGKIADYNYKLPDDFTGCVIAWNSNNLDSKVGGNYNYLYRLFRKSNLKPFERDISTEIYQAGSTPCNGVEGFNCYFPLQSYGFQPTNGVGYQPYRVVVLSFELLHAPATVCGPKKSTNLVKNKCVNFNFNGLTGTGVLTESNKKFLPFQQFGRDIADTTDAVRDPQTLEILDITPCSFGGVSVITPGTNTSNQVAVLYQDVNCTEVPVAIHADQLTPTWRVYSTGSNVFQTRAGCLIGAEHVNNSYECDIPIGAGICASYQTQTNSPRRARSVASQSIIAYTMSLGAENSVAYSNNSIAIPTNFTISVTTEILPVSMTKTSVDCTMYICGDSTECSNFLLQYGSFCTQLNRALTGIAVEQDKNTQEVFAQVKQIYKTPPIKDFGGFNFSQILPDPSKPSKRSFIEDLLFNKVTLADAGFIKQYGDCLGDIAARDLICAQKFNGLTVLPPLLTDEMIAQYTSALLAGTITSGWTFGAGAALQIPFAMQMAYRFNGIGVTQNVLYENQKLIANQFNSAIGKIQDSLSSTASALGKLQDVVNQNAQALNTLVKQLSSNFGAISSVLNDILSRLDKVEAEVQIDRLITGRLQSLQTYVTQQLIRAAEIRASANLAATKMSECVLGQSKRVDFCGKGYHLMSFPQSAPHGVVFLHVTYVPAQEKNFTTAPAICHDGKAHFPREGVFVSNGTHWFVTQRNFYEPQIITTDNTFVSGNCDVVIGIVNNTVYDPLQPELDSFKEELDKYFKNHTSPDVDLGDISGINASVVNIQKEIDRLNEVAKNLNESLIDLQELGKYEQYIKGGGGSDIIKLLNEQVNKEMQSSNLYMSMSSWCYTHSLDGAGLFLFDHAAEEYEHAKKLIIFLNENNVPVQLTSISAPEHKFEGLTQIFQKAYEHEQHISESINNIVDHAIKSKDHATFNFLQWYVAEQHEEEVLFKDILDKIELIGNENHGLYLADQYVKGIAKSRKS

SEQ ID NO: 4639 - protein, 1379 aa, Artificial Sequence
  SARS-CoV-2/Australia/QLD02/2020__EPI_ISL_407896 spike protein (1-1211) Ferritin construct
MFVFLVLLPLVSSQCVNLTTRTQLPPAYTNSFTRGVYYPDKVFRSSVLHSTQDLFLPFFSNVTWFHAIHVSGTNGTKRFDNPVLPFNDGVYFASTEKSNIIRGWIFGTTLDSKTQSLLIVNNATNVVIKVCEFQFCNDPFLGVYYHKNNKSWMESEFRVYSSANNCTFEYVSQPFLMDLEGKQGNFKNLREFVFKNIDGYFKIYSKHTPINLVRDLPQGFSALEPLVDLPIGINITRFQTLLALHRSYLTPGDSSSGWTAGAAAYYVGYLQPRTFLLKYNENGTITDAVDCALDPLSETKCTLKSFTVEKGIYQTSNFRVQPTESIVRFPNITNLCPFGEVFNATRFASVYAWNRKRISNCVADYSVLYNSASFSTFKCYGVSPTKLNDLCFTNVYADSFVIRGDEVRQIAPGQTGKIADYNYKLPDDFTGCVIAWNSNNLDSKVGGNYNYLYRLFRKSNLKPFERDISTEIYQAGSTPCNGVEGFNCYFPLQSYGFQPTNGVGYQPYRVVVLSFELLHAPATVCGPKKSTNLVKNKCVNFNFNGLTGTGVLTESNKKFLPFQQFGRDIADTTDAVRDPQTLEILDITPCSFGGVSVITPGTNTSNQVAVLYQDVNCTEVPVAIHADQLTPTWRVYSTGSNVFQTRAGCLIGAEHVNNSYECDIPIGAGICASYQTQTNSPRRARSVASQSIIAYTMSLGAENSVAYSNNSIAIPTNFTISVTTEILPVSMTKTSVDCTMYICGDSTECSNLLLQYGSFCTQLNRALTGIAVEQDKNTQEVFAQVKQIYKTPPIKDFGGFNFSQILPDPSKPSKRSFIEDLLFNKVTLADAGFIKQYGDCLGDIAARDLICAQKFNGLTVLPPLLTDEMIAQYTSALLAGTITSGWTFGAGAALQIPFAMQMAYRFNGIGVTQNVLYENQKLIANQFNSAIGKIQDSLSSTASALGKLQDVVNQNAQALNTLVKQLSSNFGAISSVLNDILSRLDKVEAEVQIDRLITGRLQSLQTYVTQQLIRAAEIRASANLAATKMSECVLGQSKRVDFCGKGYHLMSFPQSAPHGVVFLHVTYVPAQEKNFTTAPAICHDGKAHFPREGVFVSNGTHWFVTQRNFYEPQIITTDNTFVSGNCDVVIGIVNNTVYDPLQLELDSFKEELDKYFKNHTSPDVDLGDISGINASVVNIQKEIDRLNEVAKNLNESLIDLQELGKYEQYIKGGGGSDIIKLLNEQVNKEMQSSNLYMSMSSWCYTHSLDGAGLFLFDHAAEEYEHAKKLIIFLNENNVPVQLTSISAPEHKFEGLTQIFQKAYEHEQHISESINNIVDHAIKSKDHATFNFLQWYVAEQHEEEVLFKDILDKIELIGNENHGLYLADQYVKGIAKSRKS

SEQ ID NO: 4640 - protein, 1379 aa, Artificial Sequence
  SARS-CoV-2/India/1-31/2020__EPI_ISL_413523 spike protein (1-1211) Ferritin construct
MFVFLVLLPLVSSQCVNLTTRTQLPPAYTNSFTRGVYYPDKVFRSSVLHSTQDLFLPFFSNVTWFHAIHVSGTNGTKRFDNPVLPFNDGVYFASTEKSNIIRGWIFGTTLDSKTQSLLIVNNATNVVIKVCEFQFCNDPFLGVYYHKNNKSWMESEFRVYSSANNCTFEYVSQPFLMDLEGKQGNFKNLREFVFKNIDGYFKIYSKHTPINLVRDLPQGFSALEPLVDLPIGINITRFQTLLALHRSYLTPGDSSSGWTAGAAAYYVGYLQPRTFLLKYNENGTITDAVDCALDPLSETKCTLKSFTVEKGIYQTSNFRVQPTESIVRFPNITNLCPFGEVFNATRFASVYAWNRKRISNCVADYSVLYNSASFSTFKCYGVSPTKLNDLCFTNVYADSFVIRGDEVRQIAPGQTGKIADYNYKLPDDFTGCVIAWNSNNLDSKVGGNYNYLYRLFRKSNLKPFERDISTEIYQAGSTPCNGVEGFNCYFPLQSYGFQPTNGVGYQPYRVVVLSFELLHAPATVCGPKKSTNLVKNKCVNFNFNGLTGTGVLTESNKKFLPFQQFGRDIADTTDAVRDPQTLEILDITPCSFGGVSVITPGTNTSNQVAVLYQDVNCTEVPVAIHADQLTPTWRVYSTGSNVFQTRAGCLIGAEHVNNSYECDIPIGAGICASYQTQTNSPRRARSVASQSIIAYTMSLGAENSVAYSNNSIAIPTNFTISVTTEILPVSMTKTSVDCTMYICGDSTECSNLLLQYGSFCTQLNRALTGIAVEQDKNTQEVFAQVKQIYKTPPIKDFGGFNFSQILPDPSKPSKRSFIEDLLFNKVTLADAGFIKQYGDCLGDIAARDLICAQKFNGLTVLPPLLTDEMIAQYTSALLAGTITSGWTFGAGAALQIPFAMQMAYRFNGIGVTQNVLYENQKLIANQFNSVIGKIQDSLSSTASALGKLQDVVNQNAQALNTLVKQLSSNFGAISSVLNDILSRLDKVEAEVQIDRLITGRLQSLQTYVTQQLIRAAEIRASANLAATKMSECVLGQSKRVDFCGKGYHLMSFPQSAPHGVVFLHVTYVPAQEKNFTTAPAICHDGKAHFPREGVFVSNGTHWFVTQRNFYEPQIITTDNTFVSGNCDVVIGIVNNTVYDPLQPELDSFKEELDKYFKNHTSPDVDLGDISGINASVVNIQKEIDRLNEVAKNLNESLIDLQELGKYEQYIKGGGGSDIIKLLNEQVNKEMQSSNLYMSMSSWCYTHSLDGAGLFLFDHAAEEYEHAKKLIIFLNENNVPVQLTSISAPEHKFEGLTQIFQKAYEHEQHISESINNIVDHAIKSKDHATFNFLQWYVAEQHEEEVLFKDILDKIELIGNENHGLYLADQYVKGIAKSRKS

SEQ ID NO: 4641 - protein, 1379 aa, Artificial Sequence
  SARS-CoV-2/Guangdong/GD2020087-P0008/2020__EPI_ISL_413863 spike protein (1-1211) Ferritin construct
MFVFLVLLPLVSSQCVNLTTRTQLPPAYTNSFTRGVYYPDKVFRSSVLHSTQDLFLPFFSNVTWFHAIHVSGTNGTKRFDNPVLPFNDGVYFASTEKSNIIRGWIFGTTLDSKTQSLLIVNNATNVVIKVCEFQFCNDPFLGVYYHKNNKSWMESEFRVYSSANNCTFEYVSQPFLMDLEGKQGNFKNLREFVFKNIDGYFKIYSKHTPINLVRDLPQGFSALEPLVDLPIGINITRFQTLLALHRSYLTPGDSSSGWTAGAAAYYVGYLQPRTFLLKYNENGTITDAVDCALDPLSETKCTLKSFTVEKGIYQTSNFRVQPTESIVRFPNITNLCPFGEVFNATRFASVYAWNRKRISNCVADYSVLYNSASFSTFKCYGVSPTKLNDLCFTNVYADSFVIRGDEVREIAPGQTGKIADYNYKLPDDFTGCVIAWNSNNLDSKVGGNYNYLYRLFRKSNLKPFERDISTEIYQAGSTPCNGVEGFNCYFPLQSYGFQPTNGVGYQPYRVVVLSFELLHAPATVCGPKKSTNLVKNKCVNFNFNGLTGTGVLTESNKKFLPFQQFGRDIADTTDAVRDPQTLEILDITPCSFGGVSVITPGTNTSNQVAVLYQDVNCTEVPVAIHADQLTPTWRVYSTGSNVFQTRAGCLIGAEHVNNSYECDIPIGAGICASYQTQTNSPRRARSVASQSIIAYTMSLGAENSVAYSNNSIAIPTNFTISVTTEILPVSMTKTSVDCTMYICGDSTECSNLLLQYGSFCTQLNRALTGIAVEQDKNTQEVFAQVKQIYKTPPIKDFGGFNFSQILPDPSKPSKRSFIEDLLFNKVTLADAGFIKQYGDCLGDIAARDLICAQKFNGLTVLPPLLTDEMIAQYTSALLAGTITSGWTFGAGAALQIPFAMQMAYRFNGIGVTQNVLYENQKLIANQFNSAIGKIQDSLSSTASALGKLQDVVNQNAQALNTLVKQLSSNFGAISSVLNDILSRLDKVEAEVQIDRLITGRLQSLQTYVTQQLIRAAEIRASANLAATKMSECVLGQSKRVDFCGKGYHLMSFPQSAPHGVVFLHVTYVPAQEKNFTTAPAICHDGKAHFPREGVFVSNGTHWFVTQRNFYEPQIITTDNTFVSGNCDVVIGIVNNTVYDPLQPELDSFKEELDKYFKNHTSPDVDLGDISGINASVVNIQKEIDRLNEVAKNLNESLIDLQELGKYEQYIKGGGGSDIIKLLNEQVNKEMQSSNLYMSMSSWCYTHSLDGAGLFLFDHAAEEYEHAKKLIIFLNENNVPVQLTSISAPEHKFEGLTQIFQKAYEHEQHISESINNIVDHAIKSKDHATFNFLQWYVAEQHEEEVLFKDILDKIELIGNENHGLYLADQYVKGIAKSRKS

SEQ ID NO: 4642 - protein, 1379 aa, Artificial Sequence
  SARS-CoV-2/Sweden/01/2020__EPI_ISL_411951 spike protein (1-1211) Ferritin construct
MFVFLVLLPLVSSQCVNLTTRTQLPPAYTNSFTRGVYYPDKVFRSSVLHSTQDLFLPFFSNVTWFHAIHVSGTNGTKRFDNPVLPFNDGVYFASTEKSNIIRGWIFGTTLDSKTQSLLIVNNATNVVIKVCEFQFCNDPFLGVYYHKNNKSWMESEFRVYSSANNCTFEYVSQPFLMDLEGKQGNFKNLREFVFKNIDGYFKIYSKHTPINLVRDLPQGFSALEPLVDLPIGINITRFQTLLALHRSYLTPGDSSSGWTAGAAAYYVGYLQPRTFLLKYNENGTITDAVDCALDPLSETKCTLKSFTVEKGIYQTSNFRVQPTESIVRFPNITNLCPFGEVFNATRFASVYAWNRKRISNCVADYSVLYNSASFSTFKCYGVSPTKLNDLCFTNVYADSFVIRGDEVRQIAPGQTGKIADYNYKLPDDFTGCVIAWNSNNLDSKVGGNYNYLYRLFRKSNLKPFERDISTEIYQAGSTPCNGVEGFNCYFPLQSYGFQPTNGVGYQPYRVVVLSFELLHAPATVCGPKKSTNLVKNKCVNFNFNGLTGTGVLTESNKKFLPFQQFGRDIADTTDAVRDPQTLEILDITPCSFGGVSVITPGTNTSNQVAVLYQDVNCTEVPVAIHADQLTPTWRVYSTGSNVFQTRAGCLIGAEHVNNSYECDIPIGAGICASYQTQTNSPRRARSVASQSIIAYTMSLGAENSVAYSNNSIAIPTNFTISVTTEILPVSMTKTSVDCTMYICGDSTECSNLLLQYGSFCTQLNRALTGIAVEQDKNTQEVFAQVKQIYKTPPIKDCGGFNFSQILPDPSKPSKRSFIEDLLFNKVTLADAGFIKQYGDCLGDIAARDLICAQKFNGLTVLPPLLTDEMIAQYTSALLAGTITSGWTFGAGAALQIPFAMQMAYRFNGIGVTQNVLYENQKLIANQFNSAIGKIQDSLSSTASALGKLQDVVNQNAQALNTLVKQLSSNFGAISSVLNDILSRLDKVEAEVQIDRLITGRLQSLQTYVTQQLIRAAEIRASANLAATKMSECVLGQSKRVDFCGKGYHLMSFPQSAPHGVVFLHVTYVPAQEKNFTTAPAICHDGKAHFPREGVFVSNGTHWFVTQRNFYEPQIITTDNTFVSGNCDVVIGIVNNTVYDPLQPELDSFKEELDKYFKNHTSPDVDLGDISGINASVVNIQKEIDRLNEVAKNLNESLIDLQELGKYEQYIKGGGGSDIIKLLNEQVNKEMQSSNLYMSMSSWCYTHSLDGAGLFLFDHAAEEYEHAKKLIIFLNENNVPVQLTSISAPEHKFEGLTQIFQKAYEHEQHISESINNIVDHAIKSKDHATFNFLQWYVAEQHEEEVLFKDILDKIELIGNENHGLYLADQYVKGIAKSRKS

SEQ ID NO: 4643 - protein, 1379 aa, Artificial Sequence
  SARS-CoV-2/Tianmen/HBCDC-HB-07/2020__EPI_ISL_412983 spike protein (1-1211) Ferritin construct
MFVFLVLLPLVSSQCVNLTTRTQLPPAYTNSFTRGVYYPDKVFRSSVLHSTQDLFLPFFSNVTWFHAIHVSGTNGTKRFDNPVLPFNDGVYFASTEKSNIIRGWIFGTTLDSKTQSLLIVNNATNVVIKVCEFQFCNDPFLGVYYHKNNKSWMESEFRVYSSANNCTFEYVSQPFLMDLEGKQGNFKNLREFVFKNIDGYFKIYSKHTPINLVRDLPQGFSALEPLVDLPIGINITRFQTLLALHRSYLTPGDSSSGWTAGAAAYYVGYLQPRTFLLKYNENGTITDAVDCALDPLSETKCTLKSFTVEKGIYQTSNFRVQPTESIVRFPNITNLCPFGEVFNATRFASVYAWNRKRISNCVADYSVLYNSASFSTFKCYGVSPTKLNDLCFTNVYADSFVIRGDEVRQIAPGQTGKIADYNYKLPDDFTGCVIAWNSNNLDSKVGGNYNYLYRLFRKSNLKPFERDISTEIYQAGSTPCNGVEGFNCYFPLQSYGFQPTNGVGYQPYRVVVLSFELLHAPATVCGPKKSTNLVKNKCVNFNFNGLTGTGVLTESNKKFLPFQQFGRDIADTTDAVRDPQTLEILDITPCSFGGVSVITPGTNTSNQVAVLYQDLNCTEVPVAIHADQLTPTWRVYSTGSNVFQTRAGCLIGAEHVNNSYECDIPIGAGICASYQTQTNSPRRARSVASQSIIAYTMSLGAENSVAYSNNSIAIPTNFTISVTTEILPVSMTKTSVDCTMYICGDSTECSNLLLQYGSFCTQLNRALTGIAVEQDKNTQEVFAQVKQIYKTPPIKDFGGFNFSQILPDPSKPSKRSFIEDLLFNKVTLADAGFIKQYGDCLGDIAARDLICAQKFNGLTVLPPLLTDEMIAQYTSALLAGTITSGWTFGAGAALQIPFAMQMAYRFNGIGVTQNVLYENQKLIANQFNSAIGKIQDSLSSTASALGKLQDVVNQNAQALNTLVKQLSSNFGAISSVLNDILSRLDKVEAEVQIDRLITGRLQSLQTYVTQQLIRAAEIRASANLAATKMSECVLGQSKRVDFCGKGYHLMSFPQSAPHGVVFLHVTYVPAQEKNFTTAPAICHDGKAHFPREGVFVSNGTHWFVTQRNFYEPQIITTDNTFVSGNCDVVIGIVNNTVYDPLQPELDSFKEELDKYFKNHTSPDVDLGDISGINASVVNIQKEIDRLNEVAKNLNESLIDLQELGKYEQYIKGGGGSDIIKLLNEQVNKEMQSSNLYMSMSSWCYTHSLDGAGLFLFDHAAEEYEHAKKLIIFLNENNVPVQLTSISAPEHKFEGLTQIFQKAYEHEQHISESINNIVDHAIKSKDHATFNFLQWYVAEQHEEEVLFKDILDKIELIGNENHGLYLADQYVKGIAKSRKS

SEQ ID NO: 4644 - protein, 1379 aa, Artificial Sequence
  SARS-CoV-2/Hong Kong/case42_VM20002493/2020__EPI_ISL_414527 spike protein (1-1211) Ferritin construct
MFVFLVLLPLVSSQCVNLTTRTQLPPAYTNSFTRGVYYPDKVFRSSVLHSTQDLFLPFFSNVTWFHAIHVSGTNGTKRFDNPVLPFNDGVYFASTEKSNIIRGWIFGTTLDSKTQSLLIVNNATNVVIKVCEFQFCNDPFLGVYYHKNNKSWMESEFRVYSSANNCTFEYVSQPFLMDLEGKQGNFKNLREFVFKNIDGYFKIYSKHTPINLVRDLPQGFSALEPLVDLPIGINITRFQTLLALHRSYLTPGDSSSGWTAGAAAYYVGYLQPRTFLLKYNENGTITDAVDCALDPLSETKCTLKSFTVEKGIYQTSNFRVQPTESIVRFPNITNLCPFGEVFNATRFASVYAWNRKRISNCVADYSVLYNSASFSTFKCYGVSPTKLNDLCFTNVYADSFVIRGDEVRQIAPGQTGKIADYNYKLPDDFTGCVIAWNSNNLDSKVGGNYNYLYRLFRKSNLKPFERDISTEIYQAGSTPCNGVEGFNCYFPLQSYGFQPTNGVGYQPYRVVVLSFELLHAPATVCGPKKSTNLVKNKCVNFNFNGLTGTGVLTESNKKFLPFQQFGRDIADTTDAVRDPQTLEILDITPCSFGGVSVITPGTNTSNQVAVLYQDVNCTEVPVAIHADQLTPTWRVYSTGSNVFQTRAGCLIGAEHVNNSYECDIPIGAGICASYQTQTNSPRRARSVASQSIIAYTMSLGAENSVAYSNNSIAIPTNFAISVTTEILPVSMTKTSVDCTMYICGDSTECSNLLLQYGSFCTQLNRALTGIAVEQDKNTQEVFAQVKQIYKTPPIKDFGGFNFSQILPDPSKPSKRSFIEDLLFNKVTLADAGFIKQYGDCLGDIAARDLICAQKFNGLTVLPPLLTDEMIAQYTSALLAGTITSGWTFGAGAALQIPFAMQMAYRFNGIGVTQNVLYENQKLIANQFNSAIGKIQDSLSSTASALGKLQDVVNQNAQALNTLVKQLSSNFGAISSVLNDILSRLDKVEAEVQIDRLITGRLQSLQTYVTQQLIRAAEIRASANLAATKMSECVLGQSKRVDFCGKGYHLMSFPQSAPHGVVFLHVTYVPAQEKNFTTAPAICHDGKAHFPREGVFVSNGTHWFVTQRNFYEPQIITTDNTFVSGNCDVVIGIVNNTVYDPLQPELDSFKEELDKYFKNHTSPDVDLGDISGINASVVNIQKEIDRLNEVAKNLNESLIDLQELGKYEQYIKGGGGSDIIKLLNEQVNKEMQSSNLYMSMSSWCYTHSLDGAGLFLFDHAAEEYEHAKKLIIFLNENNVPVQLTSISAPEHKFEGLTQIFQKAYEHEQHISESINNIVDHAIKSKDHATFNFLQWYVAEQHEEEVLFKDILDKIELIGNENHGLYLADQYVKGIAKSRKS

SEQ ID NO: 4645 - protein, 1379 aa, Artificial Sequence
  SARS-CoV-2/USA/CruiseA-23/2020__EPI_ISL_414482 spike protein (1-1211) Ferritin construct
MFVFLVLLPLVSSQCVNLTTRTQLPPAYTNSFTRGVYYPDKVFRSSVLHSTQDLFLPFFSNVTWFHAIHVSGTNGTKRFDNPVLPFNDGVYFASTEKSNIIRGWIFGTTLDSKTQSLLIVNNATNVVIKVCEFQFCNDPFLGVYYHKNNKSWMESEFRVYSSANNCTFEYVSQPFLMDLEVKQGNFKNLREFVFKNIDGYFKIYSKHTPINLVRDLPQGFSALEPLVDLPIGINITRFQTLLALHRSYLTPGDSSSGWTAGAAAYYVGYLQPRTFLLKYNENGTITDAVDCALDPLSETKCTLKSFTVEKGIYQTSNFRVQPTESIVRFPNITNLCPFGEVFNATRFASVYAWNRKRISNCVADYSVLYNSASFSTFKCYGVSPTKLNDLCFTNVYADSFVIRGDEVRQIAPGQTGKIADYNYKLPDDFTGCVIAWNSNNLDSKVGGNYNYLYRLFRKSNLKPFERDISTEIYQAGSTPCNGVEGFNCYFPLQSYGFQPTNGVGYQPYRVVVLSFELLHAPATVCGPKKSTNLVKNKCVNFNFNGLTGTGVLTESNKKFLPFQQFGRDIADTTDAVRDPQTLEILDITPCSFGGVSVITPGTNTSNQVAVLYQDVNCTEVPVAIHADQLTPTWRVYSTGSNVFQTRAGCLIGAEHVNNSYECDIPIGAGICASYQTQTNSPRRARSVASQSIIAYTMSLGAENSVAYSNNSIAIPTNFTISVTTEILPVSMTKTSVDCTMYICGDSTECSNLLLQYGSFCTQLNRALTGIAVEQDKNTQEVFAQVKQIYKTPPIKDFGGFNFSQILPDPSKPSKRSFIEDLLFNKVTLADAGFIKQYGDCLGDIAARDLICAQKFNGLTVLPPLLTDEMIAQYTSALLAGTITSGWTFGAGAALQIPFAMQMAYRFNGIGVTQNVLYENQKLIANQFNSAIGKIQDSLSSTASALGKLQDVVNQNAQALNTLVKQLSSNFGAISSVLNDILSRLDKVEAEVQIDRLITGRLQSLQTYVTQQLIRAAEIRASANLAATKMSECVLGQSKRVDFCGKGYHLMSFPQSAPHGVVFLHVTYVPAQEKNFTTAPAICHDGKAHFPREGVFVSNGTHWFVTQRNFYEPQIITTDNTFVSGNCDVVIGIVNNTVYDPLQPELDSFKEELDKYFKNHTSPDVDLGDISGINASVVNIQKEIDRLNEVAKNLNESLIDLQELGKYEQYIKGGGGSDIIKLLNEQVNKEMQSSNLYMSMSSWCYTHSLDGAGLFLFDHAAEEYEHAKKLIIFLNENNVPVQLTSISAPEHKFEGLTQIFQKAYEHEQHISESINNIVDHAIKSKDHATFNFLQWYVAEQHEEEVLFKDILDKIELIGNENHGLYLADQYVKGIAKSRKS

SEQ ID NO: 4646 - protein, 1379 aa, Artificial Sequence
  SARS-CoV-2/Hong Kong/case85_VM20002868/2020__EPI_ISL_414519 spike protein (1-1211) Ferritin construct
MFVFLVLVPLVSSQCVNLTTRTQLPPAYTNSFTRGVYYPDKVFRSSVLHSTQDLFLPFFSNVTWFHAIHVSGTNGTKRFDNPVLPFNDGVYFASTEKSNIIRGWIFGTTLDSKTQSLLIVNNATNVVIKVCEFQFCNDPFLGVYYHKNNKSWMESEFRVYSSANNCTFEYVSQPFLMDLEGKQGNFKNLREFVFKNIDGYFKIYSKHTPINLVRDLPQGFSALEPLVDLPIGINITRFQTLLALHRSYLTPGDSSSGWTAGAAAYYVGYLQPRTFLLKYNENGTITDAVDCALDPLSETKCTLKSFTVEKGIYQTSNFRVQPTESIVRFPNITNLCPFGEVFNATRFASVYAWNRKRISNCVADYSVLYNSASFSTFKCYGVSPTKLNDLCFTNVYADSFVIRGDEVRQIAPGQTGKIADYNYKLPDDFTGCVIAWNSNNLDSKVGGNYNYLYRLFRKSNLKPFERDISTEIYQAGSTPCNGVEGFNCYFPLQSYGFQPTNGVGYQPYRVVVLSFELLHAPATVCGPKKSTNLVKNKCVNFNFNGLTGTGVLTESNKKFLPFQQFGRDIADTTDAVRDPQTLEILDITPCSFGGVSVITPGTNTSNQVAVLYQDVNCTEVPVAIHADQLTPTWRVYSTGSNVFQTRAGCLIGAEHVNNSYECDIPIGAGICASYQTQTNSPRRARSVASQSIIAYTMSLGAENSVAYSNNSIAIPTNFTISVTTEILPVSMTKTSVDCTMYICGDSTECSNLLLQYGSFCTQLNRALTGIAVEQDKNTQEVFAQVKQIYKTPPIKDFGGFNFSQILPDPSKPSKRSFIEDLLFNKVTLADAGFIKQYGDCLGDIAARDLICAQKFNGLTVLPPLLTDEMIAQYTSALLAGTITSGWTFGAGAALQIPFAMQMAYRFNGIGVTQNVLYENQKLIANQFNSAIGKIQDSLSSTASALGKLQDVVNQNAQALNTLVKQLSSNFGAISSVLNDILSRLDKVEAEVQIDRLITGRLQSLQTYVTQQLIRAAEIRASANLAATKMSECVLGQSKRVDFCGKGYHLMSFPQSAPHGVVFLHVTYVPAQEKNFTTAPAICHDGKAHFPREGVFVSNGTHWFVTQRNFYEPQIITTDNTFVSGNCDVVIGIVNNTVYDPLQPELDSFKEELDKYFKNHTSPDVDLGDISGINASVVNIQKEIDRLNEVAKNLNESLIDLQELGKYEQYIKGGGGSDIIKLLNEQVNKEMQSSNLYMSMSSWCYTHSLDGAGLFLFDHAAEEYEHAKKLIIFLNENNVPVQLTSISAPEHKFEGLTQIFQKAYEHEQHISESINNIVDHAIKSKDHATFNFLQWYVAEQHEEEVLFKDILDKIELIGNENHGLYLADQYVKGIAKSRKS

SEQ ID NO: 4647 - protein, 1379 aa, Artificial Sequence; identical to SEQ ID NO: 4637
  SARS-CoV-2/England/200990660/2020__EPI_ISL_414523 spike protein (1-1211) Ferritin construct

SEQ ID NO: 4648 - protein, 1379 aa, Artificial Sequence
  SARS-CoV-2/Australia/NSW09/2020__EPI_ISL_413595 spike protein (1-1211) Ferritin construct
MFVFLVLLPLVSSQCVNLTTRTQLPPAYTNSFTRGVYYPDKVFRSSVLHSTQDLFLPFFSNVTWFHAIHVSGTNGTKRFDNPVLPFNDGVYFASTEKSNIIRGWIFGTTLDSKTQSLLIVNNATNVVIKVCEFQFCNDPFLGVYYHKNNKSWMESEFRVYSSANNCTFEYVSQPFLMDLEGKQGNFKNLREFVFKNIDGYFKIYSKHTPINLVRDLPQGFSALEPLVDLPIGINITRFQTLLALHRSYLTPGDSSSGWTAGAAAYYVGYLQPRTFLLKYNENGTITDAVDCALDPLSETKCTLKSFTVEKGIYQTSNFRVQPTESIVRFPNITNLCPFGEVFNATRFASVYAWNRKRISNCVADYSVLYNSASFSTFKCYGVSPTKLNDLCFTNVYADSFVIRGDEVRQIAPGQTGKIADYNYKLPDDFTGCVIAWNSNNLDSKVGGNYNYLYRLFRKSNLKPFERDISTEIYQAGSTPCNGVEGFNCYFPLQSYGFQPTNGVGYQPYRVVVLSFELLHAPATVCGPKKSTNLVKNKCVNFNFNGLTGTGVLTESNKKFLPFQQFGRDIADTTDAVRDPQTLEILDITPCSFGGVSVITPGTNTSNQVAVLYQDVNCTEVPVAIHADQLTPTWRVYSTGSNVFQTRAGCLIGAEHVNNSYECDIPIGAGICASYQTQTNSPRRARSVASQSIIAYTMSLGAENSVAYSNNSIAIPTNFTISVTTEILPVSMTKTSVDCTMYICGDSTECSNLLLQYGSFCTQLNRALTGIAVEQDKNTQEVFAQVKQIYKTPPIKDFGGFNFSQILPDPSKPSKRSFIEDLLFNKVTLADAGFIKQYGDCLGDIAARDLICAQKFNGLTVLPPLLTDEMIAQYTSALLAGTITSGWTFGAGAALQIPFAMQMAYRFNGIGVTQNVLYENQKLIANQFNSAIGKIQDSLSFTASALGKLQDVVNQNAQALNTLVKQLSSNFGAISSVLNDILSRLDKVEAEVQIDRLITGRLQSLQTYVTQQLIRAAEIRASANLAATKMSECVLGQSKRVDFCGKGYHLMSFPQSAPHGVVFLHVTYVPAQEKNFTTAPAICHDGKAHFPREGVFVSNGTHWFVTQRNFYEPQIITTDNTFVSGNCDVVIGIVNNTVYDPLQPELDSFKEELDKYFKNHTSPDVDLGDISGINASVVNIQKEIDRLNEVAKNLNESLIDLQELGKYEQYIKGGGGSDIIKLLNEQVNKEMQSSNLYMSMSSWCYTHSLDGAGLFLFDHAAEEYEHAKKLIIFLNENNVPVQLTSISAPEHKFEGLTQIFQKAYEHEQHISESINNIVDHAIKSKDHATFNFLQWYVAEQHEEEVLFKDILDKIELIGNENHGLYLADQYVKGIAKSRKS

SEQ ID NO: 4649 - protein, 1379 aa, Artificial Sequence; identical to SEQ ID NO: 4629
  SARS-CoV-2/Australia/NSW10/2020__EPI_ISL_413596 spike protein (1-1211) Ferritin construct

SEQ ID NO: 4650 - protein, 1379 aa, Artificial Sequence
  SARS-CoV-2/Switzerland/1000477797/2020__EPI_ISL_413023 spike protein (1-1211) Ferritin construct
MFVFLVLLPLVSSQCVNLTTRTQLPPAYTNSFTRGVYYPDKVFRSSVLHSTQDLFLPFFSNVTWFHAIHVSGTNGTKRFDNPVLPFNDGVYFASTEKSNIIRGWIFGTTLDSKTQSLLIVNNATNVVIKVCEFQFCNDPFLGVYYHKNNKSWMESEFRVYSSANNCTFEYVSQPFLMDLEGKQGNFKNLREFVFKNIDGYFNIYSKHTPINLVRDLPQGFSALEPLVDLPIGINITRFQTLLALHRSYLTPGDSSSGWTAGAAAYYVGYLQPRTFLLKYNENGTITDAVDCALDPLSETKCTLKSFTVEKGIYQTSNFRVQPTESIVRFPNITNLCPFGEVFNATRFASVYAWNRKRISNCVADYSVLYNSASFSTFKCYGVSPTKLNDLCFTNVYADSFVIRGDEVRQIAPGQTGKIADYNYKLPDDFTGCVIAWNSNNLDSKVGGNYNYLYRLFRKSNLKPFERDISTEIYQAGSTPCNGVEGFNCYFPLQSYGFQPTNGVGYQPYRVVVLSFELLHAPATVCGPKKSTNLVKNKCVNFNFNGLTGTGVLTESNKKFLPFQQFGRDIADTTDAVRDPQTLEILDITPCSFGGVSVITPGTNTSNQVAVLYQGVNCTEVPVAIHADQLTPTWRVYSTGSNVFQTRAGCLIGAEHVNNSYECDIPIGAGICASYQTQTNSPRRARSVASQSIIAYTMSLGAENSVAYSNNSIAIPTNFTISVTTEILPVSMTKTSVDCTMYICGDSTECSNLLLQYGSFCTQLNRALTGIAVEQDKNTQEVFAQVKQIYKTPPIKDFGGFNFSQILPDPSKPSKRSFIEDLLFNKVTLADAGFIKQYGDCLGDIAARDLICAQKFNGLTVLPPLLTDEMIAQYTSALLAGTITSGWTFGAGAALQIPFAMQMAYRFNGIGVTQNVLYENQKLIANQFNSAIGKIQDSLSSTASALGKLQDVVNQNAQALNTLVKQLSSNFGAISSVLNDILSRLDKVEAEVQIDRLITGRLQSLQTYVTQQLIRAAEIRASANLAATKMSECVLGQSKRVDFCGKGYHLMSFPQSAPHGVVFLHVTYVPAQEKNFTTAPAICHDGKAHFPREGVFVSNGTHWFVTQRNFYEPQIITTDNTFVSGNCDVVIGIVNNTVYDPLQPELDSFKEELDKYFKNHTSPDVDLGDISGINASVVNIQKEIDRLNEVAKNLNESLIDLQELGKYEQYIKGGGGSDIIKLLNEQVNKEMQSSNLYMSMSSWCYTHSLDGAGLFLFDHAAEEYEHAKKLIIFLNENNVPVQLTSISAPEHKFEGLTQIFQKAYEHEQHISESINNIVDHAIKSKDHATFNFLQWYVAEQHEEEVLFKDILDKIELIGNENHGLYLADQYVKGIAKSRKS

SEQ ID NO: 4651 - protein, 1379 aa, Artificial Sequence
  SARS-CoV-2/Belgium/BA-02291/2020__EPI_ISL_415159 spike protein (1-1211) Ferritin construct
MFVFLVLLPLVSSQCVNLTTRTQLPPAYTNSFTRGVYYPDKVFRSSVLHSTQDLFLPFFSNVTWFHAIHVSGTNGTKRFDNPVLPFNDGVYFASTEKSNIIRGWIFGTTLDSKTQSLLIVNNATNVVIKVCEFQFCNDPFLGVYYHKNNKSWMESEFRVYSSANNCTFEYVSQPFLMDLEGKQGNFKNLREFVFKNIDGYFKIYSKHTPINLVRDLPQGFSALEPLVDLPIGINITRFQTLLALHRSYLTPGDSSSGWTAGAAAYYVGYLQPRTFLLKYNENGTITDAVDCALDPLSETKCTLKSFTVEKGIYQTSNFRVQPTESIVRFPNITNLCPFGEVFNATRFASVYAWNRKRISNCVADYSVLYNSASFSTFKCYGVSPTKLNDLCFTNVYADSFVIRGDEVRQIAPGQTGKIADYNYKLPDDFTGCVIAWNSNNLDSKVGGNYNYLYRLFRRSNLKPFERDISTEIYQAGSTPCNGVEGFNCYFPLQSYGFQPTNGVGYQPYRVVVLSFELLPAPATVCGPKKSTNLVKNKCVNFNFNGLTGTGVLTESNKKFLPFQQFGRDIADTTDAVRDPQTLEILDITPCSFGGVSVITPGTNTSNQVAVLYQGVNCTEVPVAIHADQLTPTWRVYSTGSNVFQTRAGCLIGAEHVNNSYECDIPIGAGICASYQTQTNSPRRARSVASQSIIAYTMSLGAENSVAYSNNSIAIPTNFTISVTTEILPVSMTKTSVDCTMYICGDSTECSNLLLQYGSFCTQLNRALTGIAVEQDKNTQEVFAQVKQIYKTPPIKDFGGFNFSQILPDPSKPSKRSFIEDLLFNKVTLADAGFIKQYGDCLGDIAARDLICAQKFNGLTVLPPLLTDEMIAQYTSALLAGTITSGWTFGAGAALQIPFAMQMAYRFNGIGVTQNVLYENQKLIANQFNSAIGKIQDSLSSAAPALGKLQDVVNQNAQALNTLVKQLSSNFGAISSVLNDILSRLDKVEAEVQIDRLITGRLQSLQTYVTQQLIRAAEIRASANLAATKMSECVLGQSKRVDFCGKGYHLMSFPQSAPHGVVFLHVTYVPAQEKNFTTAPAICHDGKAHFPREGVFVSNGTHWFVTQRNFYEPQIITTDNTFVSGNCDVVIGIVNNTVYDPLQPELDSFKEELDKYFKNHTSPDVDLGDISGINASVVNIQKEIDRLNEVAKNLNESLIDLQELGKYEQYIKGGGGSDIIKLLNEQVNKEMQSSNLYMSMSSWCYTHSLDGAGLFLFDHAAEEYEHAKKLIIFLNENNVPVQLTSISAPEHKFEGLTQIFQKAYEHEQHISESINNIVDHAIKSKDHATFNFLQWYVAEQHEEEVLFKDILDKIELIGNENHGLYLADQYVKGIAKSRKS

SEQ ID NO: 4652 - protein, 1379 aa, Artificial Sequence
  SARS-CoV-2/USA/WA8-UW5/2020__EPI_ISL_413486 spike protein (1-1211) Ferritin construct
MFVFLVLLPLVSSQCVNLTTRTQLPPAYTNSFTRGVYYPDKVFRSSVLHSTQDLFLPFFSNVTWFHAIHVSGTNGTKRFDNPVLPFNDGVYFASTEKSNIIRGWIFGTTLDSKTQSLLIVNNATNVVIKVCEFQFCNDPFLGVYYHKNNKSWMESEFRVYSSANNCTFEYVSQPFLMDLEGKQGNFKNLREFVFKNIDGYFKIYSKHTPINLVRDLPQGFSALEPLVDLPIGINITRFQTLLALHRSYLTPGDSSSGWTAGAAAYYVGYLQPRTFLLKYNENGTITDAVDCALDPLSETKCTLKSFTVEKGIYQTSNFRVQPTESIVRFPNITNLCPFGEVFNATRFASVYAWNRKRISNCVADYSVLYNSASFSTFKCYGVSPTKLNDLCFTNVYADSFVIRGDEVRQIAPGQTGKIADYNYKLPDDFTGCVIAWNSNNLDSKVGGNYNYLYRLFRKSNLKPFERDISTEIYQAGSTPCNGVEGFNCYFPLQSYGFQPTNGVGYQPYRVVVLSFELLHAPATVCGPKKSTNLVKNKCVNFNFNGLTGTGVLTESNKKFLPFQQFGRDIADTTDAVRDPQTLEILDITPCSFGGVSVITPGTNTSNQVAVLYQDVNCTEVPVAIHADQLTPTWRVYSTGSNVFQTRAGCLIGAEYVNNSYECDIPIGAGICASYQTQTNSPRRARSVASQSIIAYTMSLGAENSVAYSNNSIAIPTNFTISVTTEILPVSMTKTSVDCTMYICGDSTECSNLLLQYGSFCTQLNRALTGIAVEQDKNTQEVFAQVKQIYKTPPIKDFGGFNFSQILPDPSKPSKRSFIEDLLFNKVTLADAGFIKQYGDCLGDIAARDLICAQKFNGLTVLPPLLTDEMIAQYTSALLAGTITSGWTFGAGAALQIPFAMQMAYRFNGIGVTQNVLYENQKLIANQFNSAIGKIQDSLSSTASALGKLQDVVNQNAQALNTLVKQLSSNFGAISSVLNDILSRLDKVEAEVQIDRLITGRLQSLQTYVTQQLIRAAEIRASANLAATKMSECVLGQSKRVDFCGKGYHLMSFPQSAPHGVVFLHVTYVPAQEKNFTTAPAICHDGKAHFPREGVFVSNGTHWFVTQRNFYEPQIITTDNTFVSGNCDVVIGIVNNTVYDPLQPELDSFKEELDKYFKNHTSPDVDLGDISGINASVVNIQKEIDRLNEVAKNLNESLIDLQELGKYEQYIKGGGGSDIIKLLNEQVNKEMQSSNLYMSMSSWCYTHSLDGAGLFLFDHAAEEYEHAKKLIIFLNENNVPVQLTSISAPEHKFEGLTQIFQKAYEHEQHISESINNIVDHAIKSKDHATFNFLQWYVAEQHEEEVLFKDILDKIELIGNENHGLYLADQYVKGIAKSRKS

SEQ ID NO: 4653 - protein, 1379 aa, Artificial Sequence
  SARS-CoV-2/England/20102000506/2020__EPI_ISL_415147 spike protein (1-1211) Ferritin construct
MFVFLVLLPLVSSQCVNLTTRTQLPPAYTNSFTRGVYYPDKVFRSSVLHSTQDLFLPFFSNVTWFHAIHVSGTNGTKRFDNPVLPFNDGVYFASTEKSNIIRGWIFGTTLDSKTQSLLIVNNATNVVIKVCEFQFCNDPFLGVYYHKNNKSWMESEFRVYSSANNCTFEYVSQPFLMDLEGKQGNFKNLREFVFKNIDGYFKIYSKHTPINLVRDLPQGFSALEPLVDLPIGINITRFQTLLALHRSYLTPGDSSSGWTAGAAAYYVGYLQPRTFLLKYNENGTITDAVDCALDPLSETKCTLKSFTVEKGIYQTSNFRVQPTESIVRFPNITNLCPFGEVFNATRFASVYAWNRKRISNCVADYSVLYNSASFSTFKCYGVSPTKLNDLCFTNVYADSFVIRGDEVRQIAPGQTGKIADYNYKLPDDFTGCVIAWNSNNLDSKVGGNYNYLYRLFRKSNLKPFERDISTEIYQAGSTPCNGVEGFNCYFPLQSYGFQPTNGVGYQPYRVVVLSFELLHAPATVCGPKKSTNLVKNKCVNFNFNGLTGTGVLTESNKKFLPFQQFGRDIADTTDAVRDPQTLEILDITPCSFGGVSVITPGTNTSNQVAVLYQGVNCTEVPVAIHADQLTPTWRVYSTGSNVFQTRAGCLIGAEHVNNSYECDIPIGAGICASYQTQTNSPRRARSVASQSIIAYTMSLGAENSVAYSNNSIAIPTNFTISVTTEILPVSMTKTSVDCTMYICGDSTECSNLLLQYGSFCTQLNRALTGIAVEQDKNTQEVFAQVKQIYKTPPIKDFGGFNFSQILPDPSKPSKRSFIEDLLFNKVTLADAGFIKQYGYCLGDIAARDLICAQKFNGLTVLPPLLTDEMIAQYTSALLAGTITSGWTFGAGAALQIPFAMQMAYRFNGIGVTQNVLYENQKLIANQFNSAIGKIQDSLSSTASALGKLQDVVNQNAQALNTLVKQLSSNFGAISSVLNDILSRLDKVEAEVQIDRLITGRLQSLQTYVTQQLIRAAEIRASANLAATKMSECVLGQSKRVDFCGKGYHLMSFPQSAPHGVVFLHVTYVPAQEKNFTTAPAICHDGKAHFPREGVFVSNGTHWFVTQRNFYEPQIITTDNTFVSGNCDVVIGIVNNTVYDPLQPELDSFKEELDKYFKNHTSPDVDLGDISGINASVVNIQKEIDRLNEVAKNLNESLIDLQELGKYEQYIKGGGGSDIIKLLNEQVNKEMQSSNLYMSMSSWCYTHSLDGAGLFLFDHAAEEYEHAKKLIIFLNENNVPVQLTSISAPEHKFEGLTQIFQKAYEHEQHISESINNIVDHAIKSKDHATFNFLQWYVAEQHEEEVLFKDILDKIELIGNENHGLYLADQYVKGIAKSRKS

SEQ ID NO: 4654 - protein, 1379 aa, Artificial Sequence
  SARS-CoV-2/Belgium/VAG-03013/2020__EPI_ISL_415155 spike protein (1-1211) Ferritin construct
MFVFLVLLPLVSSQCVNLTTRTQLPPAYTNSFTRGVYYPDKVFRSSVLHSTQDLFLPFFSNVTWFHAIHVSGTNGTKRFDNPVLPFNDGVYFASTEKSNIIRGWIFGTTLDSKTQSLLIVNNATNVVIKVCEFQFCNDPFLGVYYHKNNKSWMESEFRVYSSANNCTFEYVSQPFLMDLEGKQGNFKNLREFVFKNIDGYFKIYSKHTPINLVRDLPQGFSALEPLVDLPIGINITRFQTLLALHRSYLTPGDSSSGWTAGAAAYYVGYLQPRTFLLKYNENGTITDAVDCALDPLSETKCTLKSFTVEKGIYQTSNFRVQPTESIVRFPNITNLCPFGEVFNATRFASVYAWNRKRISNCVADYSVLYNSASFSTFKCYGVSPTKLNDLCFTNVYADSFVIRGDEVRQIAPGQTGKIADYNYKLPDDFTGCVIAWNSNNLDSKVGGNYNYLYRLFRKSNLKPFERDISTEIYQAGSTPCNGVEGFNCYFPLQSYGFQPTNGVGYQPYRVVVLSFELLHAPATVCGPKKSTNLVKNKCVNFNFNGLTGTGVLTESNKKFLPFQQFGRDIADTTDAVRDPQTLEILDITPCSFGGVSVITPGTNTSNQVAVLYQGVNCTEVPVAIHADQLTPTWRVYSTGSNVFQTRAGCLIGAEHVNNSYECDIPIGAGICASYQTQTNSPRRARSVASQSIIAYTMSLGAENSVAYSNNSIAIPTNFTISVTTEILPVSMTKTSVDCTMYICGDSTECSNLLLQYGSFCTQLNRALTGIAVEQDKNTQEVFAQVKQIYKTPPIKDFGGFNFSQILPDPSKPSKRSFIEDLLFNKVTLADAGFIKQYGDCLGDIAARDLICAQKFNGLTVLPPLLTDEMIAQYTSALLAGTITSGWTFGAGAALQIPFAMQMAYRFNGIGVTQNVLYENQKLIANQFNSAIGKIQDSLSSTATALGKLQDVVNQNAQALNTLVKQLSSNFGAISSVLNDILSRLDKVEAEVQIDRLITGRLQSLQTYVTQQLIRAAEIRASANLAATKMSECVLGQSKRVDFCGKGYHLMSFPQSAPHGVVFLHVTYVPAQEKNFTTAPAICHDGKAHFPREGVFVSNGTHWFVTQRNFYEPQIITTDNTFVSGNCDVVIGIVNNTVYDPLQPELDSFKEELDKYFKNHTSPDVDLGDISGINASVVNIQKEIDRLNEVAKNLNESLIDLQELGKYEQYIKGGGGSDIIKLLNEQVNKEMQSSNLYMSMSSWCYTHSLDGAGLFLFDHAAEEYEHAKKLIIFLNENNVPVQLTSISAPEHKFEGLTQIFQKAYEHEQHISESINNIVDHAIKSKDHATFNFLQWYVAEQHEEEVLFKDILDKIELIGNENHGLYLADQYVKGIAKSRKS

SEQ ID NO: 4655 - protein, 1379 aa, Artificial Sequence
  SARS-CoV-2/Belgium/BC-03016/2020__EPI_ISL_415157 spike protein (1-1211) Ferritin construct
MFVFLVLLPLVSSQCVNLTTRTQLPPAYTNSFTRGVYYPDKVFRSSVLHSTQDLFLPFFSNVTWFHAIHVSGTNGTKRFDNPVLPFNDGVYFASTEKSNIIRGWIFGTTLDSKTQSLLIVNNATNVVIKVCEFQFCNDPFLGVYYHKNNKSWMESEFRVYSSANNCTFEYVSQPFLMDLEGKQGNFKNLREFVFKNIDGYFKIYSKHTPINLVRDLPQGFSALEPLVDLPIGINITRFQTLLALHRSYLTPGDSSSGWTAGAAAYYVGYLQPRTFLLKYNENGTITDAVDCALDPLSETKCTLKSFTVEKGIYQTSNFRVQPTESIVRFPNITNLCPFGEVFNATRFASVYAWNRKRISNCVADYSVLYNSASFSTFKCYGVSPTKLNDLCFTNVYADSFVIRGDEVRQIAPGQTGKIADYNYKLPDDFTGCVIAWNSNNLDSKVGGNYNYLYRLFRKSNLKPFERDISTEIYQAGSTPCNGVEGFNCYFPLQSYGFQPTNGVGYQPYRVVVLSFELLHAPATVCGPKKSTNLVKNKCVNFNFNGLTGTGVLTESNKKFLPFQQFGRDIADTTDAVRDPQTLEILDITPCSFGGVSVITPGTNTSNQVAVLYQGVNCTEVPVAIHADQLTPTWRVYSTGSNVFQTRAGCLIGAEHVNNSYECDIPIGAGICASYQTQTNSPRRARSVASQSIIAYTMSLGAENSVAYSNNSIAIPTNFTISVTTEILPVSMTKTSVDCTMYICGDSTECSNLLLQYGSFCTQLNRALTGIAVEQDKNTQEVFAQVKQIYKTPPIKDFGGFNFSQILPDPSKPSKRSFIEDLLFNKVTLADAGFIKQYGDCLGDIAARDLICAQKFNGLTVLPPLLTDEMIAQYTSALLAGTITSGWTFGAGAALQIPFAMQMAYRFNGIGVTQNVLYENQKLIANQFNSAIGKIQDSLSSTAPALGKLQDVVNQNAQALNTLVKQLSSNFGAISSVLNDILSRLDKVEAEVQIDRLITGRLQSLQTYVTQQLIRAAEIRASANLAATKMSECVLGQSKRVDFCGKGYHLMSFPQSAPHGVVFLHVTYVPAQEKNFTTAPAICHDGKAHFPREGVFVSNGTHWFVTQRNFYEPQIITTDNTFVSGNCDVVIGIVNNTVYDPLQPELDSFKEELDKYFKNHTSPDVDLGDISGINASVVNIQKEIDRLNEVAKNLNESLIDLQELGKYEQYIKGGGGSDIIKLLNEQVNKEMQSSNLYMSMSSWCYTHSLDGAGLFLFDHAAEEYEHAKKLIIFLNENNVPVQLTSISAPEHKFEGLTQIFQKAYEHEQHISESINNIVDHAIKSKDHATFNFLQWYVAEQHEEEVLFKDILDKIELIGNENHGLYLADQYVKGIAKSRKS

SEQ ID NO: 4656 - protein, 1379 aa, Artificial Sequence
  SARS-CoV-2/Germany/BavPat3/2020__EPI_ISL_414521 spike protein (1-1211) Ferritin construct
MFVFLVLLPLVSSQCVNLTTRTQLPPAYTNSFTRGVYYPDKVFRSSVLHSTQDLFLPFFSNVTWFHAIHVSGTNGTKRFDNPVLPFNDGVYFASTEKSNIIRGWIFGTTLDSKTQSLLIVNNATNVVIKVCEFQFCNDPFLGVYYHKNNKSWMESEFRVYSSANNCTFEYVSQPFLMDLEGKQGNFKNLREFVFKNIDGYFKIYSKHTPINLVRDLPQGFSALEPLVDLPIGINITRFQTLLALHRSYLTPGDSSSGWTAGAAAYYVGYLQPRTFLLKYNENGTITDAVDCALDPLSETKCTLKSFTVEKGIYQTSNFRVQPTESIVRFPNITNLCPFGEVFNATRFASVYAWNRKRISNCVADYSVLYNSASFSTFKCYGVSPTKLNDLCFTNVYADSFVIRGDEVRQIAPGQTGKIADYNYKLPDDFTGCVIAWNSNNLDSKVGGNYNYLYRLFRKSNLKPFERDISTEIYQAGSTPCNGVEGFNCYFPLQSYGFQPTNGVGYQPYRVVVLSFELLHAPATVCGPKKSTNLVKNKCVNFNFNGLTGTGVLTESNKKFLPFQQFGRDIADTTDAVRDPQTLEILDITPCSFGGVSVITPGTNTSNQVAVLYQDVNCTEVPVAIHADQLTPTWRVYSTGSNVFQTRAGCLIGAEHVNNSYECDIPIGAGICASYQTQTNSPRRARSVASQSIIAYTMSLGAENSVAYSNNSIAIPTNFTISVTTEILPVSMTKTSVDCTMYICGDSTECSNLLLQYGSFCTQLNRALTGIAVEQDKNTQQVFAQVKQIYKTPPIKDFGGFNFSQILPDPSKPSKRSFIEDLLFNKVTLADAGFIKQYGDCLGDIAARDLICAQKFNGLTVLPPLLTDEMIAQYTSALLAGTITSGWTFGAGAALQIPFAMQMAYRFNGIGVTQNVLYENQKLIANQFNSAIGKIQDSLSSTASALGKLQDVVNQNAQALNTLVKQLSSNFGAISSVLNDILSRLDKVEAEVQIDRLITGRLQSLQTYVTQQLIRAAEIRASANLAATKMSECVLGQSKRVDFCGKGYHLMSFPQSAPHGVVFLHVTYVPAQEKNFTTAPAICHDGKAHFPREGVFVSNGTHWFVTQRNFYEPQIITTDNTFVSGNCDVVIGIVNNTVYDPLQPELDSFKEELDKYFKNHTSPDVDLGDISGINASVVNIQKEIDRLNEVAKNLNESLIDLQELGKYEQYIKGGGGSDIIKLLNEQVNKEMQSSNLYMSMSSWCYTHSLDGAGLFLFDHAAEEYEHAKKLIIFLNENNVPVQLTSISAPEHKFEGLTQIFQKAYEHEQHISESINNIVDHAIKSKDHATFNFLQWYVAEQHEEEVLFKDILDKIELIGNENHGLYLADQYVKGIAKSRKS

SEQ ID NO: 4657 - protein, 1379 aa, Artificial Sequence
  SARS-CoV-2/France/HF1805/2020__EPI_ISL_414628 spike protein (1-1211) Ferritin construct
MFVFLVLLPLVSSQCVNLTTRTQLPPAYTNSFTRGVYYPDKVFRSSVLHSTQDLFLPFFSNVTWFHAIHVSGTNGTKRFDNPVLPFNDGVYFASTEKSNIIRGWIFGTTLDSKTQSLLIVNNATNVVIKVCEFQFCNDPFLGVYYHKNNKSWMESEFRVYSSANNCTFEYVSQPFLMDLEGKQGNFKNLREFVFKNIDGYFKIYSKHTPINLVRDLPQGFSALEPLVDLPIGINITRFQTLLALHRSYLTPGDSSSGWTAGAAAYYVGYLQPRTFLLKYNENGTITDAVDCALDPLSETKCTLKSFTVEKGIYQTSNFRVQPTESIVRFPNITNLCPFGEVFNATRFASVYAWNRKRISNCVADYSVLYNSASFSTFKCYGVSPTKLNDLCFTNVYADSFVIRGDEVRQIAPGQTGKIADYNYKLPDDFTGCVIAWNSNNLDSKVGGNYNYLYRLFRKSNLKPFERDISTEIYQAGSTPCNGVEGFNCYFPLQSYGFQPTNGVGYQPYRVVVLSFELLHAPATVCGPKKSTNLVKNKCVNFNFNGLTGTGVLTESNKKFLPFQQFGRDIADTTDAVRDPQTLEILDITPCSFGGVSVITPGTNTSNQVAVLYQGVNCTEVPVAIHADQLTPTWRVYSTGSNVFQTRAGCLIGAEHVNNSYECDIPIGAGICASYQTQTNSPRRARSVASQSIIAYTMSLGAENSVAYSNNSIAIPTNFTISVTTEILPVSMTKTSVDCTMYICGDSTECSNLLLQYGSFCTQLNRALTGIAVEQDKNTQEVFAQVKQIYKTPPIKDFGGFNFSQILPDPSKPSKRSFIEDLLFNKVTLADAGFIKQYGDCLGDIAARDLICAQKFNGLTVLPPLLTDEMIAQYTSALLAGTITSGWTFGAGAALQIPFAMQMAYRFNGIGVTQNVLYENQKLIANQFNSAIGKIQDSLSSTASALGKLQDVVNQNAQALNTLVKQLSSNFGAISSVLNDILSRLDKVEAEVQIDRLITGRLQSLQTYVTQQLIRAAEIRASANLAATKMSECVLGQSKRVDFCGKGYHLMSFPQSAPHGVVFLHVTYVPAQEKNFTTAPAICHDGKAHFPREGVFVSNGTHWFVTQRNFYEPQIITTDNTFVSGNCDVVIGVVNNTVYDPLQPELDSFKEELDKYFKNHTSPDVDLGDISGINASVVNIQKEIDRLNEVAKNLNESLIDLQELGKYEQYIKGGGGSDIIKLLNEQVNKEMQSSNLYMSMSSWCYTHSLDGAGLFLFDHAAEEYEHAKKLIIFLNENNVPVQLTSISAPEHKFEGLTQIFQKAYEHEQHISESINNIVDHAIKSKDHATFNFLQWYVAEQHEEEVLFKDILDKIELIGNENHGLYLADQYVKGIAKSRKS

SEQ ID NO: 4658 - protein, 1379 aa, Artificial Sequence
  SARS-CoV-2/Netherlands/ZuidHolland_9/2020__EPI_ISL_414445 spike protein (1-1211) Ferritin construct
MFVFLVLLPLVSSQCVNLTTRTQLPPAYTNSFTRGVYYPDKVFRSSVLHSTQDLFLPFFSNVTWFHAIHVSGTNGTKRFDNPVLPFNDGVYFASTEKSNIIRGWIFGTTLDSKTQSLLIVNNATNVVIKVCEFQFCNDPFLGVYYHKNNKSWMESEFRVYSSANNCTFEYVSQPFLMDLEGKQGNFKNLREFVFKNIDGYFKIYSKHTPINLVRDLPQGFSALEPLVDLPIGINITRFQTLLALHRSYLTPGDSSSGWTAGAAAYYVGYLQPRTFLLKYNENGTITDAVDCALDPLSETKCTLKSFTVEKGIYQTSNFRVQPTESIVRFPNITNLCPFGEVFNATRFASVYAWNRKRISNCVADYSVLYNSASFSTFKCYGVSPTKLNDLCFTNVYADSFVIRGDEVRQIAPGQTGKIADYNYKLPDDFTGCVIAWNSNNLDSKVGGNYNYLYRLFRKSNLKPFERDISTEIYQAGSTPCNGVEGFNCYFPLQSYGFQPTNGVGYQPYRVVVLSFELLHAPATVCGPKKSTNLVKNKCVNFNFNGLTGTGVLTESNKKFLPFQQFGRDIADTTDAVRDPQTLEILDITPCSFGGVSVITPGTNTSNQVAVLYQGVNCTEVPVAIHADQLTPTWRVYSTGSNVFQTRAGCLIGAEHVNNSYECDIPIGAGICASYQTQTNSPRRARSVASQSIIAYTMSLGAENSVAYSNNSIAIPTNFTISVTTEILPVSMTKTSVDCTMYICGDSTECSNLLLQYGSFCTQLNRALTGIAVEQDKNTQEVFAQVKQIYKTPPIKDFGGFNFSQILPDPSKPSKRSFIEDLLFNKVTLADAGFIKQYGDCLGDIAARDLICVQKFNGLTVLPPLLTDEMIAQYTSALLAGTITSGWTFGAGAALQIPFAMQMAYRFNGIGVTQNVLYENQKLIANQFNSAIGKIQDSLSSTASALGKLQDVVNQNAQALNTLVKQLSSNFGAISSVLNDILSRLDKVEAEVQIDRLITGRLQSLQTYVTQQLIRAAEIRASANLAATKMSECVLGQSKRVDFCGKGYHLMSFPQSAPHGVVFLHVTYVPAQEKNFTTAPAICHDGKAHFPREGVFVSNGTHWFVTQRNFYEPQIITTDNTFVSGNCDVVIGIVNNTVYDPLQPELDSFKEELDKYFKNHTSPDVDLGDISGINASVVNIQKEIDRLNEVAKNLNESLIDLQELGKYEQYIKGGGGSDIIKLLNEQVNKEMQSSNLYMSMSSWCYTHSLDGAGLFLFDHAAEEYEHAKKLIIFLNENNVPVQLTSISAPEHKFEGLTQIFQKAYEHEQHISESINNIVDHAIKSKDHATFNFLQWYVAEQHEEEVLFKDILDKIELIGNENHGLYLADQYVKGIAKSRKS

SEQ ID NO: 4659 - protein, 1379 aa, Artificial Sequence
  SARS-CoV-2/Finland/FIN03032020A/2020__EPI_ISL_413602 spike protein (1-1211) Ferritin construct
MFVFLVLLPLVSSQCVNLTTRTQLPPAYTNSFTRGVYYPDKVFRSSVLHSTQDLFLPFFSNVTWFHAIHVSGTNGTKRFDNPVLPFNDGVYFASTEKSNIIRGWIFGTTLDSKTQSLLIVNNATNVVIKVCEFQFCNDPFLGVYYHKNNKSWMESEFRVYSSANNCTFEYVSQPFLMDLEGKQGNFKNLREFVFKNIDGYFKIYSKHTPINLVRDLPQGFSALEPLVDLPIGINITRFQTLLALHRSYLTPGDSSSGWTAGAAAYYVGYLQPRTFLLKYNENGTITDAVDCALDPLSETKCTLKSFTVEKGIYQTSNFRVQPTESIVRFPNITNLCPFGEVFNATRFASVYAWNRKRISNCVADYSVLYNSASFSTFKCYGVSPTKLNDLCFTNVYADSFVIRGDEVRQIAPGQTGKIADYNYKLPDDFTGCVISWNSNNLDSKVGGNYNYLYRLFRKSNLKPFERDISTEIYQAGSTPCNGVEGFNCYFPLQSYGFQPTNGVGYQPYRVVVLSFELLHAPATVCGPKKSTNLVKNKCVNFNFNGLTGTGVLTESNKKFLPFQQFGRDIADTTDAVRDPQTLEILDITPCSFGGVSVITPGTNTSNQVAVLYQGVNCTEVPVAIHADQLTPTWRVYSTGSNVFQTRAGCLIGAEHVNNSYECDIPIGAGICASYQTQTNSPRRARSVASQSIIAYTMSLGAENSVAYSNNSIAIPTNFTISVTTEILPVSMTKTSVDCTMYICGDSTECSNLLLQYGSFCTQLNRALTGIAVEQDKNTQEVFAQVKQIYKTPPIKDFGGFNFSQILPDPSKPSKRSFIEDLLFNKVTLADAGFIKQYGDCLGDIAARDLICAQKFNGLTVLPPLLTDEMIAQYTSALLAGTITSGWTFGAGAALQIPFAMQMAYRFNGIGVTQNVLYENQKLIANQFNSAIGKIQDSLSSTASALGKLQDVVNQNAQALNTLVKQLSSNFGAISSVLNDILSRLDKVEAEVQIDRLITGRLQSLQTYVTQQLIRAAEIRASANLAATKMSECVLGQSKRVDFCGKGYHLMSFPQSAPHGVVFLHVTYVPAQEKNFTTAPAICHDGKAHFPREGVFVSNGTHWFVTQRNFYEPQIITTDNTFVSGNCDVVIGIVNNTVYDPLQPELDSFKEELDKYFKNHTSPDVDLGDISGINASVVNIQKEIDRLNEVAKNLNESLIDLQELGKYEQYIKGGGGSDIIKLLNEQVNKEMQSSNLYMSMSSWCYTHSLDGAGLFLFDHAAEEYEHAKKLIIFLNENNVPVQLTSISAPEHKFEGLTQIFQKAYEHEQHISESINNIVDHAIKSKDHATFNFLQWYVAEQHEEEVLFKDILDKIELIGNENHGLYLADQYVKGIAKSRKS

SEQ ID NO: 4660 - protein, 1379 aa, Artificial Sequence
  SARS-CoV-2/France/GE1977/2020__EPI_ISL_414632 spike protein (1-1211) Ferritin construct
MFVFLVLLPLVSSQCVNLTTRTQLPPAYTNSFTRGVYYPDKVFRSSVLHSTQDLFLPFFSNVTWFHAIHVSGTNGTKRFDNPVLPFNDGVYFASTEKSNIIRGWIFGTTLDSKTQSLLIVNNATNVVIKVCEFQFCNDPFLGVYYHKNNKSWMESEFRVYSSANNCTFEYVSQPFLMDLEGKQGNFKNLREFVFKNIDGYFKIYSKHTPINLVRDLPQGFSALEPLVDLPIGINITRFQTLLALHRSYLTPGDSSSGWTAGAAAYYVGYLQPRTFLLKYNENGTITDAVDCALDPLSETKCTLKSFTVEKGIYQTSNFRVQPTESIVRFPNITNLCPFGEVFNATRFASVYAWNRKRISNCVADYSVLYNSASFSTFKCYGVSPTKLNDLCFTNVYADSFVIRGDEVRQIAPGQTGKIADYNYKLPDDFTGCVIAWNSNNLDSKVGGNYNYLYRLFRKSNLKPFERDISTEIYQAGSTPCNGVEGFNCYFPLQSYGFQPTNGVGYQPYRVVVLSFELLHAPATVCGPKKSTNLVKNKCVNFNFNGLTGTGVLTESNKKFLPFQQFGRDIADTTDAVRDPQTLEILDITPCSFGGVSVITPGTNTSNQVAVLYQGVNCTEVPVAIHADQLTPTWRVYSTGSNVFQTRAGCLIGAEHVNNSYECDIPIGAGICASYQTQTNSPRRARSVASQSIIAYTMSLGAENSVAYSNNSIAIPTNFTISVTTEILPVSMTKTSVDCTMYICGDSTECSNLLLQYGSFCTQLNRALTGIAVEQDKNTQEVFAQVKQIYKTPPIKDFGGFNFSQILPDPSKPSKRSFIEDLLFNKVTLADAGFIKQYGDCLGDIAARDLICAQKFNGLTVLPPLLTDEMIAQYTSALLAGTITSGWTFGAGAALQIPFAMQMAYRFNGIGVTQNVLYENQKLIANQFNSAIGKIQDSLFSTASALGKLQDVVNQNAQALNTLVKQLSSNFGAISSVLNDILSRLDKVEAEVQIDRLITGRLQSLQTYVTQQLIRAAEIRASANLAATKMSECVLGQSKRVDFCGKGYHLMSFPQSAPHGVVFLHVTYVPAQEKNFTTAPAICHDGKAHFPREGVFVSNGTHWFVTQRNFYEPQIITTDNTFVSGNCDVVIGIVNNTVYDPLQPELDSFKEELDKYFKNHTSPDVDLGDISGINASVVNIQKEIDRLNEVAKNLNESLIDLQELGKYEQYIKGGGGSDIIKLLNEQVNKEMQSSNLYMSMSSWCYTHSLDGAGLFLFDHAAEEYEHAKKLIIFLNENNVPVQLTSISAPEHKFEGLTQIFQKAYEHEQHISESINNIVDHAIKSKDHATFNFLQWYVAEQHEEEVLFKDILDKIELIGNENHGLYLADQYVKGIAKSRKS

SEQ ID NO: 4661 - protein, 1379 aa, Artificial Sequence
  SARS-CoV-2/Finland/FIN-313/2020__EPI_ISL_414641 spike protein (1-1211) Ferritin construct
MFVFLVLLPLVSSQCVNLTTRTQLPPAYTNSFTRGVYYPDKVFRSSVLHSTQDLFLPFFSNVTWFHAIHVSGTNGTKRFDNPVLPFNDGVYFASTEKSNIIRGWIFGTTLDSKTQSLLIVNNATNVVIKVCEFQFCNDPFLGVYYHKNNKSWMESEFRVYSSANNCTFEYVSQPFLMDLEGKQGNFKNLREFVFKNIDGYFKIYSKHTPINLVRDLPQGFSALEPLVDLPIGINITRFKTLLALHRSYLTPGDSSSGWTAGAAAYYVGYLQPRTFLLKYNENGTITDAVDCALDPLSETKCTLKSFTVEKGIYQTSNFRVQPTESIVRFPNITNLCPFGEVFNATRFASVYAWNRKRISNCVADYSVLYNSASFSTFKCYGVSPTKLNDLCFTNVYADSFVIRGDEVRQIAPGQTGKIADYNYKLPDDFTGCVIAWNSNNLDSKVGGNYNYLYRLFRKSNLKPFERDISTEIYQAGSTPCNGVEGFNCYFPLQSYGFQPTNGVGYQPYRVVVLSFELLHAPATVCGPKKSTNLVKNKCVNFNFNGLTGTGVLTESNKKFLPFQQFGRDIADTTDAVRDPQTLEILDITPCSFGGVSVITPGTNTSNQVAVLYQGVNCTEVPVAIHADQLTPTWRVYSTGSNVFQTRAGCLIGAEHVNNSYECDIPIGAGICASYQTQTNSPRRARSVASQSIIAYTMSLGAENSVAYSNNSIAIPTNFTISVTTEILPVSMTKTSVDCTMYICGDSTECSNLLLQYGSFCTQLNRALTGIAVEQDKNTQEVFAQVKQIYKTPPIKDFGGFNFSQILPDPSKPSKRSFIEDLLFNKVTLADAGFIKQYGDCLGDIAARDLICAQKFNGLTVLPPLLTDEMIAQYTSALLAGTITSGWTFGAGAALQIPFAMQMAYRFNGIGVTQNVLYENQKLIANQFNSAIGKIQDSLSSTASALGKLQDVVNQNAQALNTLVKQLSSNFGAISSVLNDILSRLDKVEAEVQIDRLITGRLQSLQTYVTQQLIRAAEIRASANLAATKMSECVLGQSKRVDFCGKGYHLMSFPQSAPHGVVFLHVTYVPAQEKNFTTAPAICHDGKAHFPREGVFVSNGTHWFVTQRNFYEPQIITTDNTFVSGNCDVVIGIVNNTVYDPLQPELDSFKEELDKYFKNHTSPDVDLGDISGINASVVNIQKEIDRLNEVAKNLNESLIDLQELGKYEQYIKGGGGSDIIKLLNEQVNKEMQSSNLYMSMSSWCYTHSLDGAGLFLFDHAAEEYEHAKKLIIFLNENNVPVQLTSISAPEHKFEGLTQIFQKAYEHEQHISESINNIVDHAIKSKDHATFNFLQWYVAEQHEEEVLFKDILDKIELIGNENHGLYLADQYVKGIAKSRKS

SEQ ID NO: 4662 - protein, 1379 aa, Artificial Sequence
  SARS-CoV-2/Netherlands/ZuidHolland_2/2020__EPI_ISL_414556 spike protein (1-1211) Ferritin construct
MFVFLVLLPLVSSQCVNLTTRTQLPPAYTNSFTRGVYYPDKVFRSSVLHSTQDLFLPFFSNVTWFHAIHVSGTNGTKRFDNPVLPFNDGVYFASTEKSNIIRGWIFGTTLDSKTQSLLIVNNATNVVIKVCEFQFCNDPFLGVYYHKNNKSWMESEFRVYSSANNCTFEYVSQPFLMDLEGKQGNFKNLREFVFKNIDGYFKIYSKHTPINLVRDLPQGFSALEPLVDLPIGINITRFQTLLALHRSYLTPGDSSSGWTAGAAAYYVGYLQPRTFLLKYNENGTITDAVDCALDPLSETKCTLKSFTVEKGIYQTSNFRVQPTESIVRFPNITNLCPFGEVFNATRFASVYAWNRKRISNCVADYSVLYNSASFSTFKCYGVSPTKLNDLCFTNVYADSFVIRGDEVRQIAPGQTGKIADYNYKLPDDFTGCVIAWNSNNLDSKVGGNYNYLYRLFRKSNLKPFERDISTEIYQAGSTPCNGVEGFNCYFPLQSYGFQPTNGVGYQPYRVVVLSFELLHAPATVCGPKKSTNLVKNKCVNFNFNGLTGTGVLTESNKKFLPFQQFGRDIADTTDAVRDPQTLEILDITPCSFGGVSVITPGTNTSNQVAVLYQGVNCTEVPVAIHADQLTPTWRVYSTGSNVFQTRAGCLIGAEHVNNSYECDIPIGAGICASYQTQTNSPRRARSVASQSIIAYTMSLGAENSVAYSNNSIAIPTNFTISVTTEILPVSMTKTSVDCTMYICGDSTECSNLLLQYGSFCTQLNRALTGIALEQDKNTQEVFAQVKQIYKTPPIKDFGGFNFSQILPDPSKPSKRSFIEDLLFNKVTLADAGFIKQYGDCLGDIAARDLICAQKFNGLTVLPPLLTDEMIAQYTSALLAGTITSGWTFGAGAALQIPFAMQMAYRFNGIGVTQNVLYENQKLIANQFNSAIGKIQDSLSSTASALGKLQDVVNQNAQALNTLVKQLSSNFGAISSVLNDILSRLDKVEAEVQIDRLITGRLQSLQTYVTQQLIRAAEIRASANLAATKMSECVLGQSKRVDFCGKGYHLMSFPQSAPHGVVFLHVTYVPAQEKNFTTAPAICHDGKAHFPREGVFVSNGTHWFVTQRNFYEPQIITTDNTFVSGNCDVVIGIVNNTVYDPLQPELDSFKEELDKYFKNHTSPDVDLGDISGINASVVNIQKEIDRLNEVAKNLNESLIDLQELGKYEQYIKGGGGSDIIKLLNEQVNKEMQSSNLYMSMSSWCYTHSLDGAGLFLFDHAAEEYEHAKKLIIFLNENNVPVQLTSISAPEHKFEGLTQIFQKAYEHEQHISESINNIVDHAIKSKDHATFNFLQWYVAEQHEEEVLFKDILDKIELIGNENHGLYLADQYVKGIAKSRKS

SEQ ID NO: 4663 - protein, 1379 aa, Artificial Sequence
  SARS-CoV-2/USA/WA-UW31/2020__EPI_ISL_414618 spike protein (1-1211) Ferritin construct
MFVFLVLLPLVSSQCVNLTTRTQLPPAYTNSFTRGVYYPDKVFRSSVLHSTQDLFLPFFSNVTWFHAIHVSGTNGTKRFDNPVLPFNDGVYFASTEKSNIIRGWIFGTTLDSKTQSLLIVNNATNVVIKVCEFQFCNDPFLGVYYHKNNKSWMESEFRVYSSANNCTFEYVSQPFLMDLEGKQGNFKNLREFVFKNIDGYFKIYSKHTPINLVRDLPQGFSALEPLVDLPIGINITRFQTLLALHRSYLTPGDSSSGWTAGAAAYYVGYLQPRTFLLKYNENGTITDAVDCALDPLSETKCTLKSFTVEKGIYQTSNFRVQPTESIVRFPNITNLCPFGEVFNATRFASVYAWNRKRISNCVADYSVLYNSASFSTFKCYGVSPTKLNDLCFTNVYADSFVIRGDEVRQIAPGQTGKIADYNYKLPDDFTGCVIAWNSNNLDSKVGGNYNYLYRLFRKSNLKPFERDISTEIYQAGSTPCNGAEGFNCYFPLQSYGFQPTNGVGYQPYRVVVLSFELLHAPATVCGPKKSTNLVKNKCVNFNFNGLTGTGVLTESNKKFLPFQQFGRDIADTTDAVRDPQTLEILDITPCSFGGVSVITPGTNTSNQVAVLYQDVNCTEVPVAIHADQLTPTWRVYSTGSNVFQTRAGCLIGAEHVNNSYECDIPIGAGICASYQTQTNSPRRARSVASQSIIAYTMSLGAENSVAYSNNSIAIPTNFTISVTTEILPVSMTKTSVDCTMYICGDSTECSNLLLQYGSFCTQLNRALTGIAVEQDKNTQEVFAQVKQIYKTPPIKDFGGFNFSQILPDPSKPSKRSFIEDLLFNKVTLADAGFIKQYGDCLGDIAARDLICAQKFNGLTVLPPLLTDEMIAQYTSALLAGTITSGWTFGAGAALQIPFAMQMAYRFNGIGVTQNVLYENQKLIANQFNSAIGKIQDSLSSTASALGKLQDVVNQNAQALNTLVKQLSSNFGAISSVLNDILSRLDKVEAEVQIDRLITGRLQSLQTYVTQQLIRAAEIRASANLAATKMSECVLGQSKRVDFCGKGYHLMSFPQSAPHGVVFLHVTYVPAQEKNFTTAPAICHDGKAHFPREGVFVSNGTHWFVTQRNFYEPQIITTDNTFVSGNCDVVIGIVNNTVYDPLQPELDSFKEELDKYFKNHTSPDVDLGDISGINASVVNIQKEIDRLNEVAKNLNESLIDLQELGKYEQYIKGGGGSDIIKLLNEQVNKEMQSSNLYMSMSSWCYTHSLDGAGLFLFDHAAEEYEHAKKLIIFLNENNVPVQLTSISAPEHKFEGLTQIFQKAYEHEQHISESINNIVDHAIKSKDHATFNFLQWYVAEQHEEEVLFKDILDKIELIGNENHGLYLADQYVKGIAKSRKS

SEQ ID NO: 4664 - protein, 1379 aa, Artificial Sequence
  SARS-CoV-2/South Korea/SNU01/2020__EPI_ISL_411929 spike protein (1-1211) Ferritin construct
MFVFLVLLPLVSSQCVNLTTRTQLPPAYTNSFTRGVYYPDKVFRSSVLHSTQDLFLPFFSNVTWFHAIHVSGTNGTKRFDNPVLPFNDGVYFASTEKSNIIRGWIFGTTLDSKTQSLLIVNNATNVVIKVCEFQFCNDPFLGVYYHKNNKSWMESEFRVYSSANNCTFEYVSQPFLMDLEGKQGNFKNLREFVFKNIDGYFKIYSKHTPINLVRDLPQGFWALEPLVDLPIGINITRFQTLLALHRSYLTPGDSSSGWTAGAAAYYVGYLQPRTFLLKYNENGTITDAVDCALDPLSETKCTLKSFTVEKGIYQTSNFRVQPTESIVRFPNITNLCPFGEVFNATRFASVYAWNRKRISNCVADYSVLYNSASFSTFKCYGVSPTKLNDLCFTNVYADSFVIRGDEVRQIAPGQTGKIADYNYKLPDDFTGCVIAWNSNNLDSKVGGNYNYLYRLFRKSNLKPFERDISTEIYQAGSTPCNGVEGFNCYFPLQSYGFQPTNGVGYQPYRVVVLSFELLHAPATVCGPKKSTNLVKNKCVNFNFNGLTGTGVLTESNKKFLPFQQFGRDIADTTDAVRDPQTLEILDITPCSFGGVSVITPGTNTSNQVAVLYQDVNCTEVPVAIHADQLTPTWRVYSTGSNVFQTRAGCLIGAEHVNNSYECDIPIGAGICASYQTQTNSPRRARSVASQSIIAYTMSLGAENSVAYSNNSIAIPTNFTISVTTEILPVSMTKTSVDCTMYICGDSTECSNLLLQYGSFCTQLNRALTGIAVEQDKNTQEVFAQVKQIYKTPPIKDFGGFNFSQILPDPSKPSKRSFIEDLLFNKVTLADAGFIKQYGDCLGDIAARDLICAQKFNGLTVLPPLLTDEMIAQYTSALLAGTITSGWTFGAGAALQIPFAMQMAYRFNGIGVTQNVLYENQKLIANQFNSAIGKIQDSLSSTASALGKLQDVVNQNAQALNTLVKQLSSNFGAISSVLNDILSRLDKVEAEVQIDRLITGRLQSLQTYVTQQLIRAAEIRASANLAATKMSECVLGQSKRVDFCGKGYHLMSFPQSAPHGVVFLHVTYVPAQEKNFTTAPAICHDGKAHFPREGVFVSNGTHWFVTQRNFYEPQIITTDNTFVSGNCDVVIGIVNNTVYDPLQPELDSFKEELDKYFKNHTSPDVDLGDISGINASVVNIQKEIDRLNEVAKNLNESLIDLQELGKYEQYIKGGGGSDIIKLLNEQVNKEMQSSNLYMSMSSWCYTHSLDGAGLFLFDHAAEEYEHAKKLIIFLNENNVPVQLTSISAPEHKFEGLTQIFQKAYEHEQHISESINNIVDHAIKSKDHATFNFLQWYVAEQHEEEVLFKDILDKIELIGNENHGLYLADQYVKGIAKSRKS

SEQ ID NO: 4665 - protein, 1379 aa, Artificial Sequence
  SARS-CoV-2/China/WF0004/2020__EPI_ISL_413694 spike protein (1-1211) Ferritin construct
MFVFLVLLPLVSSQCVNLTTRTQLPPAYTNSFTRGVYYPDKVFRSSVLHSTQDLFLPFFSNVTWFHAIHVSGTNGTKRFDNPVLPFNDGVYFASTEKSNIIRGWIFGTTLDSKTQSLLIVNNATNVVIKVCEFQFCNDPFLGVYYHKNNKSWTESEFRVYSSANNCTFEYVSQPFLMDLEGKQGNFKNLREFVFKNIDGYFKIYSKHTPINLVRDLPQGFSALEPLVDLPIGINITRFQTLLALHRSYLTPGDSSSGWTAGAAAYYVGYLQPRTFLLKYNENGTITDAVDCALDPLSETKCTLKSFTVEKGIYQTSNFRVQPTESIVRFPNITNLCPFGEVFNATRFASVYAWNRKRISNCVADYSVLYNSASFSTFKCYGVSPTKLNDLCFTNVYADSFVIRGDEVRQIAPGQTGKIADYNYKLPDDFTGCVIAWNSNNLDSKVGGNYNYLYRLFRKSNLKPFERDISTEIYQAGSTPCNGVEGFNCYFPLQSYGFQPTNGVGYQPYRVVVLSFELLHAPATVCGPKKSTNLVKNKCVNFNFNGLTGTGVLTESNKKFLPFQQFGRDIADTTDAVRDPQTLEILDITPCSFGGVSVITPGTNTSNQVAVLYQDVNCTEVPVAIHADQLTPTWRVYSTGSNVFQTRAGCLIGAEHVNNSYECDIPIGAGICASYQTQTNSPRRARSVASQSIIAYTMSLGAENSVAYSNNSIAIPTNFTISVTTEILPVSMTKTSVDCTMYICGDSTECSNLLLQYGSFCTQLNRALTGIAVEQDKNTQEVFAQVKQIYKTPPIKDFGGFNFSQILPDPSKPSKRSFIEDLLFNKVTLADAGFIKQYGDCLGDIAARDLICAQKFNGLTVLPPLLTDEMIAQYTSALLAGTITSGWTFGAGAALQIPFAMQMAYRFNGIGVTQNVLYENQKLIANQFNSAIGKIQDSLSSTASALGKLQDVVNQNAQALNTLVKQLSSNFGAISSVLNDILSRLDKVEAEVQIDRLITGRLQSLQTYVTQQLIRAAEIRASANLAATKMSECVLGQSKRFDFCGKGYHLMSFPQSAPHGVVFLHVTYVPAQEKNFTTAPAICHDGKAHFPREGVFVSNGTHWFVTQRNFYEPQIITTDNTFVSGNCDVVIGIVNNTVYDPLQPELDSFKEELDKYFKNHTSPDVDLGDISGINASVVNIQKEIDRLNEVAKNLNESLIDLQELGKYEQYIKGGGGSDIIKLLNEQVNKEMQSSNLYMSMSSWCYTHSLDGAGLFLFDHAAEEYEHAKKLIIFLNENNVPVQLTSISAPEHKFEGLTQIFQKAYEHEQHISESINNIVDHAIKSKDHATFNFLQWYVAEQHEEEVLFKDILDKIELIGNENHGLYLADQYVKGIAKSRKS

SEQ ID NO: 4666 - protein, 1379 aa, Artificial Sequence
  SARS-CoV-2/China/WF0028/2020__EPI_ISL_413791 spike protein (1-1211) Ferritin construct
MFVFLVLLPLVSSQCVNLTTRTQLPPAYTNSFTRGVYYPDKVFRSSVLHSTQDLFLPFFSNVTWFHAIHVSGTNGTKRFDNPVLPFNDGVYFASTEKSNIIRGWIFGTTLDSKTQSLLIVNNATNVVIKVCEFQFCNDPFLGVYYHKNNKSWMESEFRVYSSANNCTFEYVSQPFLMDLEGKQGNFKNLREFVFKNIDGYFKIYSKHTPINLVRDLPQGFSALEPLVDLPIGINITRFQTLLALHRSYLTPGDSSSGWTAGAAAYYVGYLQPRTFLLKYNENGTITDAVDCALDPLSETKCTLKSFTVEKGIYQTSNFRVQPTESIVRFPNITNLCPFGEVFNATRFASVYAWNRKRISNCVADYSVLYNSASFSTFKCYGVSPTKLNDLCFTNVYADSFVIRGDEVRQIAPGQTGKIADYNYKLPDDFTGCVIAWNSNNLDSKVGGNYNYLYRLFRKSNLKPFERDISTEIYQAGSTPCNGVEGFNCYFPLQSYGFQPTNGVGYQPYRVVVLSFELLHAPATVCGPKKSTNLVKNKCVNFNFNGLTGTGVLTESNKKFLPFQQFGRDIADTTDAVRDPQTLEILDITPCSFGGVSVITPGTNTSNQVAVLYQDVNCTEVPVAIHADQLTPTWRVYSTGSNVFQTRAGCLIGAEHVNNSYECDIPIGAGICASYQTQTNSPRRARSVASQSIIAYTMSLGAENSVAYSNNSIAIPTNFTISVTTEILPVSMTKTSVDCTMYICGDSTECSNLLLQYGSFCTQLNRALTGIAVEQDKNTQEVFAQVKQIYKTPPIKDFGGFNFSQILPDPSKPSKRSFIEDLLFNKVTLADAGFIKQYGDCLGDIAARDLICAQKFNGLTVLPPLLTDEMIAQYTSALLAGTITSGWTFGAGAALQIPFAMQMAYRFNGIGVTQNVLYENQKLIANQFNSAIGKIQDSLSSTASALGKLQDVVNQNAQALNTLVKQLSSNFGAISSVLNDILSRLDKVEAEVQIDRLITGRLQSLQTYVTQQLIRAAEIRASANLAATKMSECVLGQSKRVDFCGKGYHLMSFPQSAPHGVVFLHVTYVPAQEKNFTTAPAICHDGKAHFPREGVFVSNGTHWFVTQRNFYEPQIITTDNTFVSGNCDVVIGIVNNTVYDPLQPELESFKEELDKYFKNHTSPDVDLGDISGINASVVNIQKEIDRLNEVAKNLNESLIDLQELGKYEQYIKGGGGSDIIKLLNEQVNKEMQSSNLYMSMSSWCYTHSLDGAGLFLFDHAAEEYEHAKKLIIFLNENNVPVQLTSISAPEHKFEGLTQIFQKAYEHEQHISESINNIVDHAIKSKDHATFNFLQWYVAEQHEEEVLFKDILDKIELIGNENHGLYLADQYVKGIAKSRKS

SEQ ID NO: 4667 - protein, 1379 aa, Artificial Sequence
  SARS-CoV-2/2019-nCoV/USA-CruiseA-18/2020__MT159716.1 spike protein (1-1211) Ferritin construct
MFVFLVLLPLVSSQCVNLTTRTQLPPAYTNSFTRGVYYPDKVFRSSVLHSTQDLFLPFFSNVTWFHAIHVSGTNGTKRFDNPVLPFNDGVYFASTEKSNIIRGWIFGTTLDSKTQSLLIVNNATNVVIKVCEFQFCNDPFLGVYYHKNNKSWMESELRVYSSANNCTFEYVSQPFLMDLEGKQGNFKNLREFVFKNIDGYFKIYSKHTPINLVRDLPQGFSALEPLVDLPIGINITRFQTLLALHRSYLTPGDSSSGWTAGAAAYYVGYLQPRTFLLKYNENGTITDAVDCALDPLSETKCTLKSFTVEKGIYQTSNFRVQPTESIVRFPNITNLCPFGEVFNATRFASVYAWNRKRISNCVADYSVLYNSASFSTFKCYGVSPTKLNDLCFTNVYADSFVIRGDEVRQIAPGQTGKIADYNYKLPDDFTGCVIAWNSNNLDSKVGGNYNYLYRLFRKSNLKPFERDISTEIYQAGSTPCNGVEGFNCYFPLQSYGFQPTNGVGYQPYRVVVLSFELLHAPATVCGPKKSTNLVKNKCVNFNFNGLTGTGVLTESNKKFLPFQQFGRDIADTTDAVRDPQTLEILDITPCSFGGVSVITPGTNTSNQVAVLYQDVNCTEVPVAIHADQLTPTWRVYSTGSNVFQTRAGCLIGAEHVNNSYECDIPIGAGICASYQTQTNSPRRARSVASQSIIAYTMSLGAENSVAYSNNSIAIPTNFTISVTTEILPVSMTKTSVDCTMYICGDSTECSNLLLQYGSFCTQLNRALTGIAVEQDKNTQEVFAQVKQIYKTPPIKDFGGFNFSQILPDPSKPSKRSFIEDLLFNKVTLADAGFIKQYGDCLGDIAARDLICAQKFNGLTVLPPLLTDEMIAQYTSALLAGTITSGWTFGAGAALQIPFAMQMAYRFNGIGVTQNVLYENQKLIANQFNSAIGKIQDSLSSTASALGKLQDVVNQNAQALNTLVKQLSSNFGAISSVLNDILSRLDKVEAEVQIDRLITGRLQSLQTYVTQQLIRAAEIRASANLAATKMSECVLGQSKRVDFCGKGYHLMSFPQSAPHGVVFLHVTYVPAQEKNFTTAPAICHDGKAHFPREGVFVSNGTHWFVTQRNFYEPQIITTDNTFVSGNCDVVIGIVNNTVYDPLQPELDSFKEELDKYFKNHTSPDVDLGDISGINASVVNIQKEIDRLNEVAKNLNESLIDLQELGKYEQYIKGGGGSDIIKLLNEQVNKEMQSSNLYMSMSSWCYTHSLDGAGLFLFDHAAEEYEHAKKLIIFLNENNVPVQLTSISAPEHKFEGLTQIFQKAYEHEQHISESINNIVDHAIKSKDHATFNFLQWYVAEQHEEEVLFKDILDKIELIGNENHGLYLADQYVKGIAKSRKS

SEQ ID NO: 4668 - protein, 1379 aa, Artificial Sequence
  SARS-CoV-2/SARS-CoV-2/Yunnan-01/human/2020/CHN__MT049951.1 spike protein (1-1211) Ferritin construct
MFVFLVLLPLVSSQCVNLTTRTQLPPANTNSFTRGVYYPDKVFRSSVLHSTQDLFLPFFSNVTWFHAIHVSGTNGTKRFDNPVLPFNDGVYFASTEKSNIIRGWIFGTTLDSKTQSLLIVNNATNVVIKVCEFQFCNDPFLGVYYHKNNKSWMESEFRVYSSANNCTFEYVSQPFLMDLEGKQGNFKNLREFVFKNIDGYFKIYSKHTPINLVRDLPQGFSALEPLVDLPIGINITRFQTLLALHRSYLTPGDSSSGWTAGAAAYYVGYLQPRTFLLKYNENGTITDAVDCALDPLSETKCTLKSFTVEKGIYQTSNFRVQPTESIVRFPNITNLCPFGEVFNATRFASVYAWNRKRISNCVADYSVLYNSASFSTFKCYGVSPTKLNDLCFTNVYADSFVIRGDEVRQIAPGQTGKIADYNYKLPDDFTGCVIAWNSNNLDSKVGGNYNYLYRLFRKSNLKPFERDISTEIYQAGSTPCNGVEGFNCYFPLQSYGFQPTNGVGYQPYRVVVLSFELLHAPATVCGPKKSTNLVKNKCVNFNFNGLTGTGVLTESNKKFLPFQQFGRDIADTTDAVRDPQTLEILDITPCSFGGVSVITPGTNTSNQVAVLYQDVNCTEVPVAIHADQLTPTWRVYSTGSNVFQTRAGCLIGAEHVNNSYECDIPIGAGICASYQTQTNSPRRARSVASQSIIAYTMSLGAENSVAYSNNSIAIPTNFTISVTTEILPVSMTKTSVDCTMYICGDSTECSNLLLQYGSFCTQLNRALTGIAVEQDKNTQEVFAQVKQIYKTPPIKDFGGFNFSQILPDPSKPSKRSFIEDLLFNKVTLADAGFIKQYGDCLGDIAARDLICAQKFNGLTVLPPLLTDEMIAQYTSALLAGTITSGWTFGAGAALQIPFAMQMAYRFNGIGVTQNVLYENQKLIANQFNSAIGKIQDSLSSTASALGKLQDVVNQNAQALNTLVKQLSSNFGAISSVLNDILSRLDKVEAEVQIDRLITGRLQSLQTYVTQQLIRAAEIRASANLAATKMSECVLGQSKRVDFCGKGYHLMSFPQSAPHGVVFLHVTYVPAQEKNFTTAPAICHDGKAHFPREGVFVSNGTHWFVTQRNFYEPQIITTDNTFVSGNCDVVIGIVNNTVYDPLQPELDSFKEELDKYFKNHTSPDVDLGDISGINASVVNIQKEIDRLNEVAKNLNESLIDLQELGKYEQYIKGGGGSDIIKLLNEQVNKEMQSSNLYMSMSSWCYTHSLDGAGLFLFDHAAEEYEHAKKLIIFLNENNVPVQLTSISAPEHKFEGLTQIFQKAYEHEQHISESINNIVDHAIKSKDHATFNFLQWYVAEQHEEEVLFKDILDKIELIGNENHGLYLADQYVKGIAKSRKS

SEQ ID NO: 4669 - protein, 1379 aa, Artificial Sequence
  SARS-CoV-2/USA/WA-UW292/2020__EPI_ISL_418077 spike protein (1-1211) Ferritin construct
MFVFLVLLPLVSSQCVNLTTRTQLPPAYTNSFTRGVYYPDKVFRSSVLHSTQDLFLPFFSNVTWFHAIHVSGTNGTKRFDNPVLPFNDGVYFASTEKSNIIRGWIFGTTLDSKTQSLLIVNNATNVVIKVCEFQFCNDPFLGVYYHKNNKSWMESEFRVYSSANNCTFEYVSQPFLMDLEGKQGNFKNLREFVFKNIDGYFKIYSKHTPINLVRDLPQGFSALEPLVDLPIGINITRFQTLLALHRSYLTPGDSSSGWTAGAAAYYVGYLQPRTFLLKYNENGTITDAVDCALDPLSETKCTLKSFTVEKGIYQTSNFRVQPTESIVRFPNITNLCPFGEVFNATRFASVYAWNRKRISNCVADYSVLYNSASFSTFKCYGVSPTKLNDLCFTNVYADSFVIRGDEVRQIAPGQTGKIADYNYKLPDDFTGCVIAWNSNNLDSKVGGNYNYLYRLFRKSNLKPFERDISTEIYQASSTPCNGVEGFNCYFPLQSYGFQPTNGVGYQPYRVVVLSFELLHAPATVCGPKKSTNLVKNKCVNFNFNGLTGTGVLTESNKKFLPFQQFGRDIADTTDAVRDPQTLEILDITPCSFGGVSVITPGTNTSNQVAVLYQDVNCTEVPVAIHADQLTPTWRVYSTGSNVFQTRAGCLIGAEHVNNSYECDIPIGAGICASYQTQTNSPRRARSVASQSIIAYTMSLGAENSVAYSNNSIAIPTNFTISVTTEILPVSMTKTSVDCTMYICGDSTECSNLLLQYGSFCTQLNRALTGIAVEQDKNTQEVFAQVKQIYKTPPIKDFGGFNFSQILPDPSKPSKRSFIEDLLFNKVTLADAGFIKQYGDCLGDIAARDLICAQKFNGLTVLPPLLTDEMIAQYTSALLAGTITSGWTFGAGAALQIPFAMQMAYRFNGIGVTQNVLYENQKLIANQFNSAIGKIQDSLSSTASALGKLQDVVNQNAQALNTLVKQLSSNFGAISSVLNDILSRLDKVEAEVQIDRLITGRLQSLQTYVTQQLIRAAEIRASANLAATKMSECVLGQSKRVDFCGKGYHLMSFPQSAPHGVVFLHVTYVPAQEKNFTTAPAICHDGKAHFPREGVFVSNGTHWFVTQRNFYEPQIITTDNTFVSGNCDVVIGIVNNTVYDPLQPELDSFKEELDKYFKNHTSPDVDLGDISGINASVVNIQKEIDRLNEVAKNLNESLIDLQELGKYEQYIKGGGGSDIIKLLNEQVNKEMQSSNLYMSMSSWCYTHSLDGAGLFLFDHAAEEYEHAKKLIIFLNENNVPVQLTSISAPEHKFEGLTQIFQKAYEHEQHISESINNIVDHAIKSKDHATFNFLQWYVAEQHEEEVLFKDILDKIELIGNENHGLYLADQYVKGIAKSRKS

SEQ ID NO: 4670 - protein, 1379 aa, Artificial Sequence
  SARS-CoV-2/Iceland/192/2020__EPI_ISL_417819 spike protein (1-1211) Ferritin construct
MFVFFVLLPLVSSQCVNLTTRTQLPPAYTNSFTRGVYYPDKVFRSSVLHSTQDLFLPFFSNVTWFHAIHVSGTNGTKRFDNPVLPFNDGVYFASTEKSNIIRGWIFGTTLDSKTQSLLIVNNATNVVIKVCEFQFCNDPFLGVYYHKNNKSWMESEFRVYSSANNCTFEYVSQPFLMDLEGKQGNFKNLREFVFKNIDGYFKIYSKHTPINLVRDLPQGFSALEPLVDLPIGINITRFQTLLALHRSYLTPGDSSSGWTAGAAAYYVGYLQPRTFLLKYNENGTITDAVDCALDPLSETKCTLKSFTVEKGIYQTSNFRVQPTESIVRFPNITNLCPFGEVFNATRFASVYAWNRKRISNCVADYSVLYNSASFSTFKCYGVSPTKLNDLCFTNVYADSFVIRGDEVRQIAPGQTGKIADYNYKLPDDFTGCVIAWNSNNLDSKVGGNYNYLYRLFRKSNLKPFERDISTEIYQAGSTPCNGVEGFNCYFPLQSYGFQPTNGVGYQPYRVVVLSFELLHAPATVCGPKKSTNLVKNKCVNFNFNGLTGTGVLTESNKKFLPFQQFGRDIADTTDAVRDPQTLEILDITPCSFGGVSVITPGTNTSNQVAVLYQGVNCTEVPVAIHADQLTPTWRVYSTGSNVFQTRAGCLIGAEHVNNSYECDIPIGAGICASYQTQTNSPRRARSVASQSIIAYTMSLGAENSVAYSNNSIAIPTNFTISVTTEILPVSMTKTSVDCTMYICGDSTECSNLLLQYGSFCTQLNRALTGIAVEQDKNTQEVFAQVKQIYKTPPIKDFGGFNFSQILPDPSKPSKRSFIEDLLFNKVTLADAGFIKQYGDCLGDIAARDLICAQKFNGLTVLPPLLTDEMIAQYTSALLAGTITSGWTFGAGAALQIPFAMQMAYRFNGIGVTQNVLYENQKLIANQFNSAIGKIQDSLSSTASALGKLQDVVNQNAQALNTLVKQLSSNFGAISSVLNDILSRLDKVEAEVQIDRLITGRLQSLQTYVTQQLIRAAEIRASANLAATKMSECVLGQSKRVDFCGKGYHLMSFPQSAPHGVVFLHVTYVPAQEKNFTTAPAICHDGKAHFPREGVFVSNGTHWFVTQRNFYEPQIITTDNTFVSGNCDVVIGIVNNTVYDPLQPELDSFKEELDKYFKNHTSPDVDLGDISGINASVVNIQKEIDRLNEVAKNLNESLIDLQELGKYEQYIKGGGGSDIIKLLNEQVNKEMQSSNLYMSMSSWCYTHSLDGAGLFLFDHAAEEYEHAKKLIIFLNENNVPVQLTSISAPEHKFEGLTQIFQKAYEHEQHISESINNIVDHAIKSKDHATFNFLQWYVAEQHEEEVLFKDILDKIELIGNENHGLYLADQYVKGIAKSRKS

SEQ ID NO: 4671 - protein, 1379 aa, Artificial Sequence
  SARS-CoV-2/Belgium/ULG-6939/2020__EPI_ISL_417020 spike protein (1-1211) Ferritin construct
MFVFLVLLPLVSSQCVNLTTRTQLPPAYTNSFTRGVYYPDKVFRSSVLHSTQDLFLPFFSNVTWFHAIHVSGTNGTKRFDNPVLPFNDGVYFASTEKSNIIRGWIFGTTLDSKTQSLLIVNNATNVVIKVCEFQFCNDPFLGVYYHKNNKSWMESEFRVYSSANNCTFEYVSQPFLMDLEGKQGNFKNLREFVFKNIDGYFKIYSKHTPINLVRDLPQGFSALEPLVDLPIGINITRFQTLLALHRSYLTPGDSSSGWTAGAAAYYVGYLQPRTFLLKYNENGTITDAVDCALDPLSETKCTLKSFTVEKGIYQTSNFRVQPTESIVRFPNITNLCPFGEVFNATRFASVYAWNRKRISNCVADYSVLYNSASFSTFKCYGVSPTKLNDLCFTNVYADSFVIRGDEVRQIAPGQTGKIADYNYKLPDDFTGCVIAWNSNNLDSKVGGNYNYLYRLFRKSNLKPFERDISTEIYQAGSTPCNGVEGFNCYFPLQSYGFQPTNGVGYQPYRVVVLSFELLHAPATVCGPKKSTNLVKNKCVNFNFNGLTGTGVLTESNKKFLPFQQFGRDIADTTDAVRDPQTLEILDITPCSFGGVSVITPGTNTSNQVAVLYQGVNCTEVPVAIHADQLTPTWRVYSTGSNVFQTRAGCLIGAEHVNNSYECDIPIGAGICASYQTQTNSPRRARSVASQSIIAYTMSLGAENSVVYSNNSIAIPTNFTISVTTEILPVSMTKTSVDCTMYICGDSTECSNLLLQYGSFCTQLNRALTGIAVEQDKNTQEVFAQVKQIYKTPPIKDFGGFNFSQILPDPSKPSKRSFIEDLLFNKVTLADAGFIKQYGDCLGDIAARDLICAQKFNGLTVLPPLLTDEMIAQYTSALLAGTITSGWTFGAGAALQIPFAMQMAYRFNGIGVTQNVLYENQKLIANQFNSAIGKIQDSLSSTASALGKLQDVVNQNAQALNTLVKQLSSNFGAISSVLNDILSRLDKVEAEVQIDRLITGRLQSLQTYVTQQLIRAAEIRASANLAATKMSECVLGQSKRVDFCGKGYHLMSFPQSAPHGVVFLHVTYVPAQEKNFTTAPAICHDGKAHFPREGVFVSNGTHWFVTQRNFYEPQIITTDNTFVSGNCDVVIGIVNNTVYDPLQPELDSFKEELDKYFKNHTSPDVDLGDISGINASVVNIQKEIDRLNEVAKNLNESLIDLQELGKYEQYIKGGGGSDIIKLLNEQVNKEMQSSNLYMSMSSWCYTHSLDGAGLFLFDHAAEEYEHAKKLIIFLNENNVPVQLTSISAPEHKFEGLTQIFQKAYEHEQHISESINNIVDHAIKSKDHATFNFLQWYVAEQHEEEVLFKDILDKIELIGNENHGLYLADQYVKGIAKSRKS

SEQ ID NO: 4672 - protein, 1379 aa, Artificial Sequence
  SARS-CoV-2/France/HF2496/2020__EPI_ISL_418231 spike protein (1-1211) Ferritin construct
MFVFLVLLPLVSSQCVNLTTRTQLPPAYTNSFTRGVYYPDKVFRSSVLHSTQDLFLPFFSNVTWFHAIHVSGTNGTKRFDNPVLPFNDGVYFASTEKSNIIRGWIFGTTLDSKTQSLLIVNNATNVVIKVCEFQFCNDPFLGVYYHKNNKSWMESEFRVYSSANNCTFEYVSQPFLMDLEGKQGNFKNLREFVFKNIDGYFKIYSKHTPINLVRDLPQGFSALEPLVDLPIGINITRFQTLLALHRSYLTPGDSSSGWTAGAAAYYVGYLQPRTFLLKYNENGTITDAVDCALDPLSETKCTLKSFTVEKGIYQTSNFRVQPTESIVRFPNITNLCPFGEVFNATRFASVYAWNRKRISNCVADYSVLYNSASFSTFKCYGVSPTKLNDLCFTNVYADSFVIRGDEVRQIAPGQTGKIADYNYKLPDDFTGCVIAWNSNNLDSKVGGNYNYLYRLFRKSNLKPFERDISTEIYQAGSTPCNGVEGFNCYFPLQSYGFQPTNGVGYQPYRVVVLSFELLHAPATVCGPKKSTNLVKNKCVNFNFNGLTGTGVLTESNKKFLPFQQFGRDIADTTDAVRDPQTLEILDITPCSFGGVSVITPGTNTSNQVAVLYQGVNCTEVPVAIHADQLTPTWRVYSTGSNVFQTRAGCLIGAEHVNNSYECDIPIGAGICASYQTQTNSPRRARSVASQSIIAYTMSLGAENSVAYSNNSIAIPTNFTISVTTEILPVSMTKTSVDCTMYICGDSTECSNLLLQYGSFCTQLNRALTGIAVEQDKNTQEVFAQVKQIYKTPPIKDFGGFNFSQILPDPSKPSKRSFIEDLLFNKVTLADAGFIKQYGDCLGDIVARDLICAQKFNGLTVLPPLLTDEMIAQYTSALLAGTITSGWTFGAGAALQIPFAMQMAYRFNGIGVTQNVLYENQKLIANQFNSAIGKIQDSLSSTASALGKLQDVVNQNAQALNTLVKQLSSNFGAISSVLNDILSRLDKVEAEVQIDRLITGRLQSLQTYVTQQLIRAAEIRASANLAATKMSECVLGQSKRVDFCGKGYHLMSFPQSAPHGVVFLHVTYVPAQEKNFTTAPAICHDGKAHFPREGVFVSNGTHWFVTQRNFYEPQIITTDNTFVSGNCDVVIGIVNNTVYDPLQPELDSFKEELDKYFKNHTSPDVDLGDISGINASVVNIQKEIDRLNEVAKNLNESLIDLQELGKYEQYIKGGGGSDIIKLLNEQVNKEMQSSNLYMSMSSWCYTHSLDGAGLFLFDHAAEEYEHAKKLIIFLNENNVPVQLTSISAPEHKFEGLTQIFQKAYEHEQHISESINNIVDHAIKSKDHATFNFLQWYVAEQHEEEVLFKDILDKIELIGNENHGLYLADQYVKGIAKSRKS

SEQ ID NO: 4673 - protein, 1379 aa, Artificial Sequence
  SARS-CoV-2/USA/WA-UW291/2020__EPI_ISL_418076 spike protein (1-1211) Ferritin construct
MFVFLVLLPLVSSQCVNLTTRTQLPPAYTNSFTRGVYYPDKVFRSSVLHSTQDLFLPFFSNVTWFHAIHVSGTNGTKRFDNPVLPFNDGVYFASTEKSNIIRGWIFGTTLDSKTQSLLIVNNATNVVIKVCEFQFCNDPFLGVYYHKNNKSWMESEFRVYSSANNCTFEYVSQPFLMDLEGKQGNFKNLREFVFKNIDGYFKIYSKHTPINLVRDLPQGFSALEPLVDLPIGINITRFQTLLALHRSYLTPGDSSSGWTAGAAAYYVGYLQPRTFLLKYNENGTITDAVDCALDPLSETKCTLKSFTVEKGIYQTSNFRVQPTESIVRFPNITNLCPFGEVFNATRFASVYAWNRKRISNCVADYSVLYNSASFSTFKCYGVSPTKLNDLCFTNVYADSFVIRGDEVRQIAPGQTGKIADYNYKLPDDFTGCVIAWNSNNLDSKVGGNYNYLYRLFRKSNLKPFERDISTEIYQAGSTPCNGVEGFNCYFPLQSYGFQPTNGVGYQPYRVVVLSFELLHAPATVCGPKKSTNLVKNKCVNFNFNGLTGTGVLTESNKKFLPFQQFGRDIADTTDAVRDPQTLEILDITPCSFGGVSVITPGTNTSNQVAVLYQGVNCTEVPVAIHADQLTPTWRVYSTGSNVFQTRAGCLIGAEHVNNSYECDIPIGAGICASYQTQTNSPRRARSVASQSIIAYTMSLGAENSVAYSNNSIAIPTNFTISVTTEILPVSMTKTSVDCTMYICGDSTECSNLLLQYGSFCTQLNRALTGIAVEQDKNTQEVFAQVKQIYKTPPIKDFGGFNFSQILPDPSKPSKRSFIEDLLFNKVTLADAGFIKQYGDCLGDIAARDLICAQKFNGLTVLPPLLTDEMIAQYTSALLAGTITSGWTFGAGAALQIPFAMQMAYRFNGIGVTQNVLYENQKLIANQFNSAIGKIQYSLSSTASALGKLQDVVNQNAQALNTLVKQLSSNFGAISSVLNDILSRLDKVEAEVQIDRLITGRLQSLQTYVTQQLIRAAEIRASANLAATKMSECVLGQSKRVDFCGKGYHLMSFPQSAPHGVVFLHVTYVPAQEKNFTTAPAICHDGKAHFPREGVFVSNGTHWFVTQRNFYEPQIITTDNTFVSGNCDVVIGIVNNTVYDPLQPELDSFKEELDKYFKNHTSPDVDLGDISGINASVVNIQKEIDRLNEVAKNLNESLIDLQELGKYEQYIKGGGGSDIIKLLNEQVNKEMQSSNLYMSMSSWCYTHSLDGAGLFLFDHAAEEYEHAKKLIIFLNENNVPVQLTSISAPEHKFEGLTQIFQKAYEHEQHISESINNIVDHAIKSKDHATFNFLQWYVAEQHEEEVLFKDILDKIELIGNENHGLYLADQYVKGIAKSRKS

SEQ ID NO: 4674 - protein, 1379 aa, Artificial Sequence; identical to SEQ ID NO: 4637
  SARS-CoV-2/Portugal/PT0034/2020__EPI_ISL_418019 spike protein (1-1211) Ferritin construct

SEQ ID NO: 4675 - protein, 1379 aa, Artificial Sequence
  SARS-CoV-2/Iceland/202/2020__EPI_ISL_417750 spike protein (1-1211) Ferritin construct
MFVFLVLLPLVSSQCVNLTTRTQLPPAYTNSFTRGVYYPDKVFRSSVLHSTQDLFLPFFSNVTWFHAIHVSGTNGTKRFDNPVLPFNDGVYFASTEKSNIIRGWIFGTTLDSKTQSLLIVNNATNVVIKVCEFQFCNDPFLGVYYHKNNKSWMESEFRVYSSANNCTFEYVSQPFLMDLEGKQGNFKNLREFVFKNIDGYFKIYSKHTPINLVRDLPQGFSALEPLVDLPIGINITRFQTLLALHRSYLTPGDSSSGWTAGAAAYYVGYLQPRTFLLKYNENGTITDAVDCALDPLSETKCTLKSFTVEKGIYQTSNFRVQPTESIVRFPNITNLCPFGEVFNATRFASVYAWNRKRISNCVADYSVLYNSASFSTFKCYGVSPTKLNDLCFTNVYADSFVIRGDEVRQIAPGQTGKIADYNYKLPDDFTGCVIAWNSNNLDSKVGGNYNYLYRLFRKSNLKPFERDISTEIYQAGSTPCNGVEGFNCYFPLQSYGFQPTNGVGYQPYRVVVLSFELLHAPATVCGPKKSTNLVKNKCVNFNFNGLTGTGVLTESNKKFLPFQQFGRDIADTTDAVRDPQTLEILDITPCSFGGVSVITPGTNTSNQVAVLYQDVNCTEVPVAIHADQLTPTWRVYSTGSNVFQTRAGCLIGAEHVNNSYECDIPIGAGICASYQTQTNSPRRARSVASQSIIAYTMSLGAENSVAYSNNSIAIPTNFTISVTTEILPVSMTKTSVDCTMYICGDSTECSNLLLQYGSFCTQLNRALTGIAVEQDKNTQEVFAQVKQIYKTPPIKDFGGFNFSQILPDPSKPSKRSFIEDLLFNKVTLADAGFIKQYGDCLGDIAARDLICAQKFNGLTVLPPLLTDEMIAQYTSALLAGTITSGWTFGAGAALQIPFAMQMAYRFNGIGVTQNVLYENQKLIANQFNSAIGKIQDSLSSTASALGKLQDVVNQNAQALNTLVKQLSSNFGAISSVLNDILSRLDKVEAEVQIDRLITGRLQSLQTYVTQQLIRAAEIRASANLAATKMSECVLGQSKRVDFCGKGYHLMSFPQSAPHGVVFLHVTYVPAQEKNFTTAPAICHDGKAHFPREGVFVSNGTHWFVTQRNFYEPQIITTDNTFVSGNCDVVIGIVNNTVYDPLQPELDSFKEELDKYFKNHTSPDVDLGDIPGINASVVNIQKEIDRLNEVAKNLNESLIDLQELGKYEQYIKGGGGSDIIKLLNEQVNKEMQSSNLYMSMSSWCYTHSLDGAGLFLFDHAAEEYEHAKKLIIFLNENNVPVQLTSISAPEHKFEGLTQIFQKAYEHEQHISESINNIVDHAIKSKDHATFNFLQWYVAEQHEEEVLFKDILDKIELIGNENHGLYLADQYVKGIAKSRKS

SEQ ID NO: 4676 - protein, 1379 aa, Artificial Sequence
  SARS-CoV-2/USA/WA-UW261/2020__EPI_ISL_418046 spike protein (1-1211) Ferritin construct
MFVFLVLLPLVSSQCVNLTTRTQLPPAYTNSFTRGVYYPDKVFRSSVLHSTQDLFLPFFSNVTWFHAIHVSGTNGTKRFDNPVLPFNDGVYFASTEKSNIIRGWIFGTTLDSKTQSLLIVNNATNVVIKVCEFQFCNDPFLGVYYHKNNKSWMESEFRVYSSANNCTFEYVSQPFLMDLEGKQGNFKNLREFVFKNIDGYFKIYSKHTPINLVRDLPQGFSALEPLVDLPIGINITRFQTLLALHRSYLTPGDSSSGWTAGAAAYYVGYLQPRTFLLKYNENGTITDAVDCALDPLSETKCTLKSFTVEKGIYQTSNFRVQPTESIVRFPNITNLCPFGEVFNATRFTSVYAWNRKRISNCVADYSVLYNSASFSTFKCYGVSPTKLNDLCFTNVYADSFVIRGDEVRQIAPGQTGKIADYNYKLPDDFTGCVIAWNSNNLDSKVGGNYNYLYRLFRKSNLKPFERDISTEIYQAGSTPCNGVEGFNCYFPLQSYGFQPTNGVGYQPYRVVVLSFELLHAPATVCGPKKSTNLVKNKCVNFNFNGLTGTGVLTESNKKFLPFQQFGRDIADTTDAVRDPQTLEILDITPCSFGGVSVITPGTNTSNQVAVLYQDVNCTEVPVAIHADQLTPTWRVYSTGSNVFQTRAGCLIGAEHVNNSYECDIPIGAGICASYQTQTNSPRRARSVASQSIIAYTMSLGAENSVAYSNNSIAIPTNFTISVTTEILPVSMTKTSVDCTMYICGDSTECSNLLLQYGSFCTQLNRALTGIAVEQDKNTQEVFAQVKQIYKTPPIKDFGGFNFSQILPDPSKPSKRSFIEDLLFNKVTLADAGFIKQYGDCLGDIAARDLICAQKFNGLTVLPPLLTDEMIAQYTSALLAGTITSGWTFGAGAALQIPFAMQMAYRFNGIGVTQNVLYENQKLIANQFNSAIGKIQDSLSSTASALGKLQDVVNQNAQALNTLVKQLSSNFGAISSVLNDILSRLDKVEAEVQIDRLITGRLQSLQTYVTQQLIRAAEIRASANLAATKMSECVLGQSKRVDFCGKGYHLMSFPQSAPHGVVFLHVTYVPAQEKNFTTAPAICHDGKAHFPREGVFVSNGTHWFVTQRNFYEPQIITTDNTFVSGNCDVVIGIVNNTVYDPLQPELDSFKEELDKYFKNHTSPDVDLGDISGINASVVNIQKEIDRLNEVAKNLNESLIDLQELGKYEQYIKGGGGSDIIKLLNEQVNKEMQSSNLYMSMSSWCYTHSLDGAGLFLFDHAAEEYEHAKKLIIFLNENNVPVQLTSISAPEHKFEGLTQIFQKAYEHEQHISESINNIVDHAIKSKDHATFNFLQWYVAEQHEEEVLFKDILDKIELIGNENHGLYLADQYVKGIAKSRKS

SEQ ID NO: 4677 - protein, 1379 aa, Artificial Sequence
  SARS-CoV-2/Portugal/PT0035/2020__EPI_ISL_418020 spike protein (1-1211) Ferritin construct
MFVFLVLLPLVSSQCVNLTTRTQLPPAYTNSFTRGVYYPDKVFRSSVLHSTQDLFLPFFSNVTWFHAIHVSGTNGTKRFDNPVLPFNDGVYFASTEKSNIIRGWIFGTTLDSKTQSLLIVNNATNVVIKVCEFQFCNDPFLGVYYHKNNKSWMESEFRVYSSANNCTFEYVSQPFLMDLEGKQGNFKNLREFVFKNIDGYFKIYSKHTPINLVRDLPQGFSALEPLVDLPIGINITRFQTLLALHRSYLTPGDSSSGWTAGAAAYYVGYLQPRTFLLKYNENGTITDAVDCALDPLSETKCTLKSFTVEKGIYQTSNFRVQPTESIVRFPNITNLCPFGEVFNATRFASVYAWNRKRISNCVADYSVLYNSASFSTFKCYGVSPTKLNDLCFTNVYADSFVIRGDEVRQIAPGQTGKIADYNYKLPDDFTGCVIAWNSNNLDSKVGGNYNYLYRLFRKSNLKPFERDISTEIYQAGSTPCNGVEGFNCYFPLQSYGFQPTNGVGYQPYRVVVLSFELLHAPATVCGPKKSTNLVKNKCVNFNFNGLTGTGVLTESNKKFLPFQQFGRDIADTTDAVRDPQTLEILDITPCSFGGVSVITPGTNTSNQVAVLYQDVNCTEVPVAIHADQLTPTWRVYSTGSNVFQTRAGCLIGAEHVNNSYECDIPIGAGICASYQTQTNSPRRARSVASQSIIAYTMSLGAENSVAYSNNSIAIPTNFTISVTTEILPVSMTKTSVDCTMYICGDSTECSNLLLQYGSFCTQLNRALTGIAVEQDKNTQEVFAQVKQIYKTPPIKDFGGFNFSQILPDPSKPSKRSFIEDLLFNKVTLADAGFIKQYGDCLGDISARDLICAQKFNGLTVLPPLLTDEMIAQYTSALLAGTITSGWTFGAGAALQIPFAMQMAYRFNGIGVTQNVLYENQKLIANQFNSAIGKIQDSLSSTASALGKLQDVVNQNAQALNTLVKQLSSNFGAISSVLNDILSRLDKVEAEVQIDRLITGRLQSLQTYVTQQLIRAAEIRASANLAATKMSECVLGQSKRVDFCGKGYHLMSFPQSAPHGVVFLHVTYVPAQEKNFTTAPAICHDGKAHFPREGVFVSNGTHWFVTQRNFYEPQIITTDNTFVSGNCDVVIGIVNNTVYDPLQPELDSFKEELDKYFKNHTSPDVDLGDISGINASVVNIQKEIDRLNEVAKNLNESLIDLQELGKYEQYIKGGGGSDIIKLLNEQVNKEMQSSNLYMSMSSWCYTHSLDGAGLFLFDHAAEEYEHAKKLIIFLNENNVPVQLTSISAPEHKFEGLTQIFQKAYEHEQHISESINNIVDHAIKSKDHATFNFLQWYVAEQHEEEVLFKDILDKIELIGNENHGLYLADQYVKGIAKSRKS

SEQ ID NO: 4678 - protein, 1379 aa, Artificial Sequence
  SARS-CoV-2/USA/NY-NYUMC7/2020__EPI_ISL_418192 spike protein (1-1211) Ferritin construct
MFVFLVLLPLVSSQCVNLTTRTQLPPAYTNSFTRGVYYPDKVFRSSVLHSTQDLFLPFFSNVTWFHAIHVSGTNGTKRFDNPVLPFNDGVYFASTEKSNIIRGWIFGTTLDSKTQSLLIVNNATNVVIKVCEFQFCNDPFLGVYHHKNNKSWMESEFRVYSSANNCTFEYVSQPFLMDLEGKQGNFKNLREFVFKNIDGYFKIYSKHTPINLVRDLPQGFSALEPLVDLPIGINITRFQTLLALHRSYLTPGDSSSGWTAGAAAYYVGYLQPRTFLLKYNENGTITDAVDCALDPLSETKCTLKSFTVEKGIYQTSNFRVQPTESIVRFPNITNLCPFGEVFNATRFASVYAWNRKRISNCVADYSVLYNSASFSTFKCYGVSPTKLNDLCFTNVYADSFVIRGDEVRQIAPGQTGKIADYNYKLPDDFTGCVIAWNSNNLDSKVGGNYNYLYRLFRKSNLKPFERDISTEIYQAGSTPCNGVEGFNCYFPLQSYGFQPTNGVGYQPYRVVVLSFELLHAPATVCGPKKSTNLVKNKCVNFNFNGLTGTGVLTESNKKFLPFQQFGRDIADTTDAVRDPQTLEILDITPCSFGGVSVITPGTNTSNQVAVLYQGVNCTEVPVAIHADQLTPTWRVYSTGSNVFQTRAGCLIGAEHVNNSYECDIPIGAGICASYQTQTNSPRRARSVASQSIIAYTMSLGAENSVAYSNNSIAIPTNFTISVTTEILPVSMTKTSVDCTMYICGDSTECSNLLLQYGSFCTQLNRALTGIAVEQDKNTQEVFAQVKQIYKTPPIKDFGGFNFSQILPDPSKPSKRSFIEDLLFNKVTLADAGFIKQYGDCLGDIAARDLICAQKFNGLTVLPPLLTDEMIAQYTSALLAGTITSGWTFGAGAALQIPFAMQMAYRFNGIGVTQNVLYENQKLIANQFNSAIGKIQDSLSSTASALGKLQDVVNQNAQALNTLVKQLSSNFGAISSVLNDILSRLDKVEAEVQIDRLITGRLQSLQTYVTQQLIRAAEIRASANLAATKMSECVLGQSKRVDFCGKGYHLMSFPQSAPHGVVFLHVTYVPAQEKNFTTAPAICHDGKAHFPREGVFVSNGTHWFVTQRNFYEPQIITTDNTFVSGNCDVVIGIVNNTVYDPLQPELDSFKEELDKYFKNHTSPDVDLGDISGINASVVNIQKEIDRLNEVAKNLNESLIDLQELGKYEQYIKGGGGSDIIKLLNEQVNKEMQSSNLYMSMSSWCYTHSLDGAGLFLFDHAAEEYEHAKKLIIFLNENNVPVQLTSISAPEHKFEGLTQIFQKAYEHEQHISESINNIVDHAIKSKDHATFNFLQWYVAEQHEEEVLFKDILDKIELIGNENHGLYLADQYVKGIAKSRKS

SEQ ID NO: 4679 - protein, 1379 aa, Artificial Sequence
  SARS-CoV-2/Iceland/189/2020__EPI_ISL_417709 spike protein (1-1211) Ferritin construct
MFVFLVLLPLVSSQCVNLTTRTQLPPAYTNSFTRGVYYPDKVFRSSVLHSTQDLFLPFFSNVTWFHAIHVSGTNGTKRFDNPVLPFNDGVYFASTEKSNIIRGWIFGTTLDSKTQSLLIVNNATNVVIKVCEFQFCNDPFLGVYYHKNNKSWMESEFRVYSSANNCTFEYVSQPFLMDLEGKQGNFKNLREFVFKNIDGYFKIYSKHTPINLVRDLPQGFSALEPLVDLPIGINITRFQTLLALHRSYLTPGDSSSGWTAGAAAYYVGYLQPRTFLLKYNENGTITDAVDCALDPLSETKCTLKSFTVEKGIYQTSNFRVQPTESIVRFPNITNLCPFGEVFNATRFASVYAWNRKRISNCVADYSVLYNSASFSTFKCYGVSPTKLNDLCFTNVYADSFVIRGDEVRQIAPGQTGKIADYNYKLPDDFTGCVIAWNSNNLDSKVGGNYNYLYRLFRKSNLKPFERDISTEIYQAGSTPCNGVEGFNCYFPLQSYGFQPTNGVGYQPYRVVVLSFELLHAPATVCGPKKSTNLVKNKCVNFNFNGLTGTGVLTESNKKFLPFQQFGRDIADTTDAVRDPQTLEILDITPCSFGGVSVITPGTNTSNQVAVLYQGVNCTEVPVAIHADQLTPTWRVYSTGSNVFQTRAGCLIGAEHVNNSYECDIPIGAGICASYQTQTNSPRRARSVASQSIIAYTMSLGAENSVAYSNNSIAIPTNFTISVTTEILPVSMTKTSVDCTMYICGDSTECSNLLLQYGSFCTQLNRALTGIAVEQDKNTQEVFAQVKQIYKTPPIKDFGGFNFSQILPDPSKPSKRSFIEDLLFNKVTLADAGFTKQYGDCLGDIAARDLICAQKFNGLTVLPPLLTDEMIAQYTSALLAGTITSGWTFGAGAALQIPFAMQMAYRFNGIGVTQNVLYENQKLIANQFNSAIGKIQDSLSSTASALGKLQDVVNQNAQALNTLVKQLSSNFGAISSVLNDILSRLDKVEAEVQIDRLITGRLQSLQTYVTQQLIRAAEIRASANLAATKMSECVLGQSKRVDFCGKGYHLMSFPQSAPHGVVFLHVTYVPAQEKNFTTAPAICHDGKAHFPREGVFVSNGTHWFVTQRNFYEPQIITTDNTFVSGNCDVVIGIVNNTVYDPLQPELDSFKEELDKYFKNHTSPDVDLGDISGINASVVNIQKEIDRLNEVAKNLNESLIDLQELGKYEQYIKGGGGSDIIKLLNEQVNKEMQSSNLYMSMSSWCYTHSLDGAGLFLFDHAAEEYEHAKKLIIFLNENNVPVQLTSISAPEHKFEGLTQIFQKAYEHEQHISESINNIVDHAIKSKDHATFNFLQWYVAEQHEEEVLFKDILDKIELIGNENHGLYLADQYVKGIAKSRKS

SEQ ID NO: 4680 - protein, 1379 aa, Artificial Sequence
  SARS-CoV-2/Australia/NSW56/2020__EPI_ISL_417408 spike protein (1-1211) Ferritin construct
MFVFLVLLPLVSSQCVNLTTRTQLPPAYTNSFTRGVYYPDKVFRSSVLHSTQDLFLPFFSNVTWFHAIHVSGTNGTKRFDNPVLPFNDGVYFASTEKSNIIRGWIFGTTLDSKTQSLLIVNNATNVVIKVCEFQFCNDPFLGVYYHKNNKSWMESEFRVYSSANNCTFEYVSQPFLMDLEGKQGNFKNLREFVFKNIDGYFKIYSKHTPINLVRDLPQGFSALEPLVDLPIGINITRFQTLLALHRSYLTPGDSSSGWTAGAAAYYVGYLQPRTFLLKYNENGTITDAVDCALDPLSETKCTLKSFTVEKGIYQTSNFRVQPTESIVRFPNITNLCPFGEVFNATRFASVYAWNRKRISNCVADYSVLYNSASFSTFKCYGVSPTKLNDLCFTNVYADSFVIRGDEVRQIAPGQTGKIADYNYKLPDDFTGCVIAWNSNNLDSKVGGNYNYLYRLFRKSNLKPFERDISTEIYQAGSTPCNGVEGFNCYFPLQSYGFQPTNGVGYQPYRVVVLSFELLHAPATVCGPKKSTNLVKNKCVNFNFNGLTGTGVLTESNKKFLPFQQFGRDIADTTDAVRDPQTLEILDITPCSFGGVSVITPGTNTSNQVAVLYQDVNCTEVPVAIHADQLTPTWRVYSTGSNVFQTRAGCLIGAEHVNNSYECDIPIGAGICASYQTQTNSPRRARSVASQSIIAYTMSLGAENSVAYSNNSIAIPTNFTISVTTEILPVSMTKTSVDCTMYICGDSTECSNLLLQYGSFCTQLNRALTGIAVEQDKNTQEVFAQVKQIYKTPPIKDFGGFNFSQILPDSSKPSKRSFIEDLLFNKVTLADAGFIKQYGDCLGDIAARDLICAQKFNGLTVLPPLLTDEMIAQYTSALLAGTITSGWTFGAGAALQIPFAMQMAYRFNGIGVTQNVLYENQKLIANQFNSAIGKIQDSLSSTASALGKLQDVVNQNAQALNTLVKQLSSNFGAISSVLNDILSRLDKVEAEVQIDRLITGRLQSLQTYVTQQLIRAAEIRASANLAATKMSECVLGQSKRVDFCGKGYHLMSFPQSAPHGVVFLHVTYVPAQEKNFTTAPAICHDGKAHFPREGVFVSNGTHWFVTQRNFYEPQIITTDNTFVSGNCDVVIGIVNNTVYDPLQPELDSFKEELDKYFKNHTSPDVDLGDISGINASVVNIQKEIDRLNEVAKNLNESLIDLQELGKYEQYIKGGGGSDIIKLLNEQVNKEMQSSNLYMSMSSWCYTHSLDGAGLFLFDHAAEEYEHAKKLIIFLNENNVPVQLTSISAPEHKFEGLTQIFQKAYEHEQHISESINNIVDHAIKSKDHATFNFLQWYVAEQHEEEVLFKDILDKIELIGNENHGLYLADQYVKGIAKSRKS

SEQ ID NO: 4681 - protein, 1379 aa, Artificial Sequence
  SARS-CoV-2/Iceland/280/2020__EPI_ISL_417608 spike protein (1-1211) Ferritin construct
MFVFLVLLPLVSSQCVNLTTRTQLPPAYTNSFTRGVYYPDKVFRSSVLHSTQDLFLPFFSNVTWFHAIHVSGTNGTKRFDNPVLPFNDGVYFASTEKSNIIRGWIFGTTLDSKTQSLLIVNNATNVVIKVCEFQFCNDPFLGVYYHKNNKSWMESEFRVYSSANNCTFEYVSQPFLMDLEGKQGNFKNLREFVFKNIDGYFKIYSKHTPINLVRDLPQGFSALEPLVDLPIGINITRFQTLLALHRSYLTPGDSSSGWTAGAAAYYVGYLQPRTFLLKYNENGTITDAVDCALDPLSETKCTLKSFTVEKGIYQTSNFRVQPTESIVRFPNITNLCPFGEVFNATRFASVYAWNRKRISNCVADYSVLYNSASFSTFKCYGVSPTKLNDLCFTNVYADSFVIRGDEVRQIAPGQTGKIADYNYKLPDDFTGCVIAWNSNNLDSKVGGNYNYLYRLFRKSNLKPFERDISTEIYQAGSTPCNGVEGFNCYFPLQSYGFQPTNGVGYQPYRVVVLSFELLHAPATVCGPKKSTNLVKNKCVNFNFNGLTGTGVLTESNKKFLPFQQFGRDIADTTDAVRDPQTLEILDITPCSFGGVSVITPGTNTSNQVAVLYQGVNCTEVPVAIHADQLTPTWRVYSTGSNVFQTRAGCLIGAEHVNNSYECDIPIGAGICASYHTQTNSPRRARSVASQSIIAYTMSLGAENSVAYSNNSIAIPTNFTISVTTEILPVSMTKTSVDCTMYICGDSTECSNLLLQYGSFCTQLNRALTGIAVEQDKNTQEVFAQVKQIYKTPPIKDFGGFNFSQILPDPSKPSKRSFIEDLLFNKVTLADAGFIKQYGDCLGDIAARDLICAQKFNGLTVLPPLLTDEMIAQYTSALLAGTITSGWTFGAGAALQIPFAMQMAYRFNGIGVTQNVLYENQKLIANQFNSAIGKIQDSLSSTASALGKLQDVVNQNAQALNTLVKQLSSNFGAISSVLNDILSRLDKVEAEVQIDRLITGRLQSLQTYVTQQLIRAAEIRASANLAATKMSECVLGQSKRVDFCGKGYHLMSFPQSAPHGVVFLHVTYVPAQEKNFTTAPAICHDGKAHFPREGVFVSNGTHWFVTQRNFYEPQIITTDNTFVSGNCDVVIGIVNNTVYDPLQPELDSFKEELDKYFKNHTSPDVDLGDISGINASVVNIQKEIDRLNEVAKNLNESLIDLQELGKYEQYIKGGGGSDIIKLLNEQVNKEMQSSNLYMSMSSWCYTHSLDGAGLFLFDHAAEEYEHAKKLIIFLNENNVPVQLTSISAPEHKFEGLTQIFQKAYEHEQHISESINNIVDHAIKSKDHATFNFLQWYVAEQHEEEVLFKDILDKIELIGNENHGLYLADQYVKGIAKSRKS

SEQ ID NO: 4682 - protein, 1379 aa, Artificial Sequence; identical to SEQ ID NO: 4637
  SARS-CoV-2/Iceland/247/2020__EPI_ISL_417575 spike protein (1-1211) Ferritin construct

SEQ ID NO: 4683 - protein, 1379 aa, Artificial Sequence
  SARS-CoV-2/Iceland/238/2020__EPI_ISL_417566 spike protein (1-1211) Ferritin construct
MFVFLVLLPLVSSQCVNLTTRTQLPPAYTNSFTRGVYYPDKVFRSSVLHSTQDLFLPFFSNVTWFHAIHVSGTNGTKRFDNPVLPFNDGVYFASTEKSNIIRGWIFGTTLDSKTQSLLIVNNATNVVIKVCEFQFCNDPFLGVYYHKNNKSWMESEFRVYSSANNCTFEYVSQPFLMDLEGKQGNFKNLREFVFKNIDGYFKIYSKHTPINLVRDLPQGFSALEPLVDLPIGINITRFQTLLALHRSYLTPGDSSSGWTAGAAAYYVGYLQPRTFLLKYNENGTITDAVDCALDPLSETKCTLKSFTVEKGIYQTSNFRVQPTESIVRFPNITNLCPFGEVFNATRFASVYAWNRKRISNCVADYSVLYNSASFSTFKCYGVSPTKLNDLCFTNVYADSFVIRGDEVRQIAPGQTGKIADYNYKLPDDFTGCVIAWNSNNLDSKVGGNYNYLYRLFRKSNLKPFERDISTEIYQAGSTPCNGVEGFNCYFPLQSYGFQPTNGVGYQPYRVVVLSFELLHAPATVCGPKKSTNLVKNKCVNFNFNGLTGTGVLTESNKKFLPFQQFGRDIADTTDAVRDPQTLEILDITPCSFGGVSVITPGTNTSNQVAVLYQGVNCTEVPVAIHADQLTPTWRVYSTGSNVFQTRAGCLIGAEHVNNSYECDIPIGAGICASYQTQTNSPRRARSVASQSIIAYTMSLGAENSVAYSNNSIAIPTNFTISVTTEILPVSMTKTSVDCTMYICGDSTECSNLLLQYGSFCTQLNRALTGIAVEQDKNTQEVFAQVKQIYKTPPIKDFGGFNFSQILPDPSKPSKRSFIEDLLFNKVTLADVGFIKQYGDCLGDIAARDLICAQKFNGLTVLPPLLTDEMIAQYTSALLAGTITSGWTFGAGAALQIPFAMQMAYRFNGIGVTQNVLYENQKLIANQFNSAIGKIQDSLSSTASALGKLQDVVNQNAQALNTLVKQLSSNFGAISSVLNDILSRLDKVEAEVQIDRLITGRLQSLQTYVTQQLIRAAEIRASANLAATKMSECVLGQSKRVDFCGKGYHLMSFPQSAPHGVVFLHVTYVPAQEKNFTTAPAICHDGKAHFPREGVFVSNGTHWFVTQRNFYEPQIITTDNTFVSGNCDVVIGIVNNTVYDPLQPELDSFKEELDKYFKNHTSPDVDLGDISGINASVVNIQKEIDRLNEVAKNLNESLIDLQELGKYEQYIKGGGGSDIIKLLNEQVNKEMQSSNLYMSMSSWCYTHSLDGAGLFLFDHAAEEYEHAKKLIIFLNENNVPVQLTSISAPEHKFEGLTQIFQKAYEHEQHISESINNIVDHAIKSKDHATFNFLQWYVAEQHEEEVLFKDILDKIELIGNENHGLYLADQYVKGIAKSRKS

SEQ ID NO: 4684 - protein, 1379 aa, Artificial Sequence
  SARS-CoV-2/Greece/16/2020__EPI_ISL_418265 spike protein (1-1211) Ferritin construct
MFVFLVLLPLVSSQCVNLTTRTQLPPAYTNSFTRGVYYPDKVFRSSVLHSTQDLFLPFFSNVTWFHAIHVSGTNGTKRFDNPVLPFNDGVYFASTEKSNIIRGWIFGTTLDSKTQSLLIVNNATNVVIKVCEFQFCNDPFLGVYYHKNNKSWMESEFRVYSSANNCTFEYVSQPFLMDLEGKQGNFKNLREFVFKNVDGYFKIYSKHTPINLVRDLPQGFSALEPLVDLPIGINITRFQTLLALHRSYLTPGDSSSGWTAGAAAYYVGYLQPRTFLLKYNENGTITDAVDCALDPLSETKCTLKSFTVEKGIYQTSNFRVQPTESIVRFPNITNLCPFGEVFNATRFASVYAWNRKRISNCVADYSVLYNSASFSTFKCYGVSPTKLNDLCFTNVYADSFVIRGDEVRQIAPGQTGKIADYNYKLPDDFTGCVIAWNSNNLDSKVGGNYNYLYRLFRKSNLKPFERDISTEIYQAGSTPCNGVEGFNCYFPLQSYGFQPTNGVGYQPYRVVVLSFELLHAPATVCGPKKSTNLVKNKCVNFNFNGLTGTGVLTESNKKFLPFQQFGRDIADTTDAVRDPQTLEILDITPCSFGGVSVITPGTNTSNQVAVLYQDVNCTEVPVAIHADQLTPTWRVYSTGSNVFQTRAGCLIGAEHVNNSYECDIPIGAGICASYQTQTNSPRRARSVASQSIIAYTMSLGAENSVAYSNNSIAIPTNFTISVTTEILPVSMTKTSVDCTMYICGDSTECSNLLLQYGSFCTQLNRALTGIAVEQDKNTQEVFAQVKQIYKTPPIKDFGGFNFSQILPDPSKPSKRSFIEDLLFNKVTLADAGFIKQYGDCLGDIAARDLICAQKFNGLTVLPPLLTDEMIAQYTSALLAGTITSGWTFGAGAALQIPFAMQMAYRFNGIGVTQNVLYENQKLIANQFNSAIGKIQDSLSSTASALGKLQDVVNQNAQALNTLVKQLSSNFGAISSVLNDILSRLDKVEAEVQIDRLITGRLQSLQTYVTQQLIRAAEIRASANLAATKMSECVLGQSKRVDFCGKGYHLMSFPQSAPHGVVFLHVTYVPAQEKNFTTAPAICHDGKAHFPREGVFVSNGTHWFVTQRNFYEPQIITTDNTFVSGNCDVVIGIVNNTVYDPLQPELDSFKEELDKYFKNHTSPDVDLGDISGINASVVNIQKEIDRLNEVAKNLNESLIDLQELGKYEQYIKGGGGSDIIKLLNEQVNKEMQSSNLYMSMSSWCYTHSLDGAGLFLFDHAAEEYEHAKKLIIFLNENNVPVQLTSISAPEHKFEGLTQIFQKAYEHEQHISESINNIVDHAIKSKDHATFNFLQWYVAEQHEEEVLFKDILDKIELIGNENHGLYLADQYVKGIAKSRKS

SEQ ID NO: 4685 - protein, 1379 aa, Artificial Sequence
  SARS-CoV-2/Iceland/319/2020__EPI_ISL_417648 spike protein (1-1211) Ferritin construct
MFVFLVLLPLVSSQCVNLTTRTQLPPAYTNSFTRGVYYPDKVFRSSVLHSTQDLFLPFFSNVTWFHAIHVSGTNGTKRFDNPVLPFNDGVYFASTEKSNIIRGWIFGTTLDSKTQSLLIVNNATNVVIKVCEFQFCNDPFLGVYYHKNNKSWMESEFRVYSSANNCTFEYVSQPFLIDLEGKQGNFKNLREFVFKNIDGYFKIYSKHTPINLVRDLPQGFSALEPLVDLPIGINITRFQTLLALHRSYLTPGDSSSGWTAGAAAYYVGYLQPRTFLLKYNENGTITDAVDCALDPLSETKCTLKSFTVEKGIYQTSNFRVQPTESIVRFPNITNLCPFGEVFNATRFASVYAWNRKRISNCVADYSVLYNSASFSTFKCYGVSPTKLNDLCFTNVYADSFVIRGDEVRQIAPGQTGKIADYNYKLPDDFTGCVIAWNSNNLDSKVGGNYNYLYRLFRKSNLKPFERDISTEIYQAGSTPCNGVEGFNCYFPLQSYGFQPTNGVGYQPYRVVVLSFELLHAPATVCGPKKSTNLVKNKCVNFNFNGLTGTGVLTESNKKFLPFQQFGRDIADTTDAVRDPQTLEILDITPCSFGGVSVITPGTNTSNQVAVLYQGVNCTEVPVAIHADQLTPTWRVYSTGSNVFQTRAGCLIGAEHVNNSYECDIPIGAGICASYQTQTNSPRRARSVASQSIIAYTMSLGAENSVAYSNNSIAIPTNFTISVTTEILPVSMTKTSVDCTMYICGDSTECSNLLLQYGSFCTQLNRALTGIAVEQDKNTQEVFAQVKQIYKTPPIKDFGGFNFSQILPDPSKPSKRSFIEDLLFNKVTLADAGFIKQYGDCLGDIAARDLICAQKFNGLTVLPPLLTDEMIAQYTSALLAGTITSGWTFGAGAALQIPFAMQMAYRFNGIGVTQNVLYENQKLIANQFNSAIGKIQDSLSSTASALGKLQDVVNQNAQALNTLVKQLSSNFGAISSVLNDILSRLDKVEAEVQIDRLITGRLQSLQTYVTQQLIRAAEIRASANLAATKMSECVLGQSKRVDFCGKGYHLMSFPQSAPHGVVFLHVTYVPAQEKNFTTAPAICHDGKAHFPREGVFVSNGTHWFVTQRNFYEPQIITTDNTFVSGNCDVVIGIVNNTVYDPLQPELDSFKEELDKYFKNHTSPDVDLGDISGINASVVNIQKEIDRLNEVAKNLNESLIDLQELGKYEQYIKGGGGSDIIKLLNEQVNKEMQSSNLYMSMSSWCYTHSLDGAGLFLFDHAAEEYEHAKKLIIFLNENNVPVQLTSISAPEHKFEGLTQIFQKAYEHEQHISESINNIVDHAIKSKDHATFNFLQWYVAEQHEEEVLFKDILDKIELIGNENHGLYLADQYVKGIAKSRKS

SEQ ID NO: 4686 - protein, 1379 aa, Artificial Sequence
  SARS-CoV-2/Congo/94/2020__EPI_ISL_417947 spike protein (1-1211) Ferritin construct
MFVFLVLLPLVSSQCVNLTTRTQLPPAYTNSFTRGVYYPDKVFRSSVLHSTQDLFLPFFSNVTWFHAIHVSGTNGTKRFDNPVLPFNDGVYFASTEKSNIIRGWIFGTTLDSKTQSLLIVNNATNVVIKVCEFQFCNDPFLGVYYHKNNKSWMESEFRVYSSANNCTFEYVSQPFLMDLEGKQGNFKNLREFVFKNIDGYFKIYSKHTPINLVRDLPQGFSALEPLVDLPIGINITRFQTLLALHRSYLTPGDSSSGWTAGAAAYYVGYLQPRTFLLKYNENGTITDAVDCALDPLSETKCTLKSFTVEKGIYQTSNFRVQPTESIVRFPNITNLCPFGEVFNATRFASVYAWNRKRISNCVADYSVLYNSASFSTFKCYGVSPTKLNDLCFTNVYADSFVIRGDEVRQIAPGQTGKIADYNYKLPDDFTGCVIAWNSNNLDSKVGGNYNYLYRLFRKSNLKPFERDISTEIYQAGSTPCNGVEGFNCYFPLQSYGFQPTNGVGYQPYRVVVLSFELLHAPATVCGPKKSTNLVKNKCVNFNFNGLTGTGVLTESNKKFLPFQQFGRDIADTTDAVRDPQTLEILDITPCSFGGVSVITPGTNTSNQVAVLYQGVNCTEVPVAIHADQLTPTWRVYSTGSNVFQTRAGCLIGAEHVNNSYECDIPIGAGICASYQTQTNSPRRARSVASQSIIAYTMSLGAENSVAYSNNSIAIPTNFTISVTTEILPVSMTKTSVDCTMYICGDSTECSNLLLQYGSFCTQLNRALTGIAVEQDKNTQEVFAQVKQIYKTPPIKDFGGFNFSQILPDPSKPSKRSFIEDILFNKVTLADAGFIKQYGDCLGDIAARDLICAQKFNGLTVLPPLLTDEMIAQYTSALLAGTITSGWTFGAGAALQIPFAMQMAYRFNGIGVTQNVLYENQKLIANQFNSAIGKIQDSLSSTASALGKLQDVVNQNAQALNTLVKQLSSNFGAISSVLNDILSRLDKVEAEVQIDRLITGRLQSLQTYVTQQLIRAAEIRASANLAATKMSECVLGQSKRVDFCGKGYHLMSFPQSAPHGVVFLHVTYVPAQEKNFTTAPAICHDGKAHFPREGVFVSNGTHWFVTQRNFYEPQIITTDNTFVSGNCDVVIGIVNNTVYDPLQPELDSFKEELDKYFKNHTSPDVDLGDISGINASVVNIQKEIDRLNEVAKNLNESLIDLQELGKYEQYIKGGGGSDIIKLLNEQVNKEMQSSNLYMSMSSWCYTHSLDGAGLFLFDHAAEEYEHAKKLIIFLNENNVPVQLTSISAPEHKFEGLTQIFQKAYEHEQHISESINNIVDHAIKSKDHATFNFLQWYVAEQHEEEVLFKDILDKIELIGNENHGLYLADQYVKGIAKSRKS

SEQ ID NO: 4687 - protein, 1379 aa, Artificial Sequence
  SARS-CoV-2/Congo/158/2020__EPI_ISL_417950 spike protein (1-1211) Ferritin construct
MFVFLVLLPLVSSQCVNLTTRTQLPPAYTNSFTRGVYYPDKVFRSSVLHSTQDLFLPFFSNVTWFHAIHVSGTNGTKRFDNPVLPFNDGVYFASTEKSNIIRGWIFGTTLDSKTQSLLIVNNATNVVIKVCEFQFCNDPFLGVYYHKNNKSWMESEFRVYSSANNCTFEYVSQPFLMDLEGKQGNFKNLREFVFKNIDGYFKIYSKHTPINLVRDLPQGFSALEPLVDLPIGINITRFQTLLALHRSYLTPGDSSSGWTAGAAAYYVGYLQPRTFLLKYNENGTITDAVDCALDPLSETKCTLKSFTVEKGIYQTSNFRVQPTESIVRFPNITNLCPFGEVFNATRFASVYAWNRKRISNCVADYSVLYNSASFSTFKCYGVSPTKLNDLCFTNVYADSFVIRGDEVRQIAPGQTGKIADYNYKLPDDFTGCVIAWNSNNLDSKVGGNYNYLYRLFRKSNLKPFERDISTEIYQAGSTPCNGVEGFNCYFPLQSYGFQPTNGVGYQPYRVVVLSFELLHAPATVCGPKKSTNLVKNKCVNFNFNGLTGTGVLTESNKKFLPFQQFGRDIADTTDAVRDPQTLEILDITPCSFGGVSVITPGTNTSNQVAVLYQDVNCTEVPVAIHADQLTPTWRVYSTGSNVFQTRAGCLIGAEHVNNSYECDIPIGAGICASYQTQTNSPRRARSVASQSIIAYTMSLGAENSVAYSNNSIAIPTNFTISVTTEILPVSMTKTSVDCTMYICGDSTECSNLLLQYGSFCTQLNRALTGIAVEQDKNTQEVFAQVKQIYKTPPIKDFGGFNFSQILPDPSKPSKRSFIEDLLFNKVTLADAGFIKQYGDCLGDIAARDLICAQKFNGLTVLPPLLTDEMIAQYTSALLAGTITSGWTFGAGAALQIPFAMQMAYRFNGIGVTQNVLYENQKLIANQFNSAIGKIQDSLSSTASALGKLQDVVNQNAQALNTLVKQLSSNFGAISSVLNDILSRLDKVEAEVQIDRLITGRLQSLQTYVTQQLIRAAEIRASANLAATKMSECVLGQSKRVDFCGKGYHLMSFPQSAPHGVVFLHVTYVPAQEKNFTTAPAICHDGKAHFPREGVFVSNGTHWFVTQRNFYEPQIITTDNTFLSGNCDVVIGIVNNTVYDPLQPELDSFKEELDKYFKNHTSPDVDLGDISGINASVVNIQKEIDRLNEVAKNLNESLIDLQELGKYEQYIKGGGGSDIIKLLNEQVNKEMQSSNLYMSMSSWCYTHSLDGAGLFLFDHAAEEYEHAKKLIIFLNENNVPVQLTSISAPEHKFEGLTQIFQKAYEHEQHISESINNIVDHAIKSKDHATFNFLQWYVAEQHEEEVLFKDILDKIELIGNENHGLYLADQYVKGIAKSRKS

SEQ ID NO: 4688 - protein, 1379 aa, Artificial Sequence
  SARS-CoV-2/USA/UT-00034/2020__EPI_ISL_417977 spike protein (1-1211) Ferritin construct
MFVFLVLLPLVSSQCVNLTTRTQLPPAYTNSFTRGVYYPDKVFRSSVLHSTQDLFLPFFSNVTWFHAIHVSGTNGTKRFDNPVLPFNDGVYFASTEKSNIIRGWIFGTTLDSKTQSLLIVNNATNVVIKVCEFQFCNDPFLGVYYYKNNKSWMESEFRVYSSANNCTFEYVSQPFLMDLEGKQGNFKNLREFVFKNIDGYFKIYSKHTPINLVRDLPQGFSALEPLVDLPIGINITRFQTLLALHRSYLTPGDSSSGWTAGAAAYYVGYLQPRTFLLKYNENGTITDAVDCALDPLSETKCTLKSFTVEKGIYQTSNFRVQPTESIVRFPNITNLCPFGEVFNATRFASVYAWNRKRISNCVADYSVLYNSASFSTFKCYGVSPTKLNDLCFTNVYADSFVIRGDEVRQIAPGQTGKIADYNYKLPDDFTGCVIAWNSNNLDSKVGGNYNYLYRLFRKSNLKPFERDISTEIYQAGSTPCNGVEGFNCYFPLQSYGFQPTNGVGYQPYRVVVLSFELLHAPATVCGPKKSTNLVKNKCVNFNFNGLTGTGVLTESNKKFLPFQQFGRDIADTTDAVRDPQTLEILDITPCSFGGVSVITPGTNTSNQVAVLYQGVNCTEVPVAIHADQLTPTWRVYSTGSNVFQTRAGCLIGAEHVNNSYECDIPIGAGICASYQTQTNSPRRARSVASQSIIAYTMSLGAENSVAYSNNSIAIPTNFTISVTTEILPVSMTKTSVDCTMYICGDSTECSNLLLQYGSFCTQLNRALTGIAVEQDKNTQEVFAQVKQIYKTPPIKDFGGFNFSQILPDPSKPSKRSFIEDLLFNKVTLADAGFIKQYGDCLGDIAARDLICAQKFNGLTVLPPLLTDEMIAQYTSALLAGTITSGWTFGAGAALQIPFAMQMAYRFNGIGVTQNVLYENQKLIANQFNSAIGKIQDSLSSTASALGKLQDVVNQNAQALNTLVKQLSSNFGAISSVLNDILSRLDKVEAEVQIDRLITGRLQSLQTYVTQQLIRAAEIRASANLAATKMSECVLGQSKRVDFCGKGYHLMSFPQSAPHGVVFLHVTYVPAQEKNFTTAPAICHDGKAHFPREGVFVSNGTHWFVTQRNFYEPQIITTDNTFVSGNCDVVIGIVNNTVYDPLQPELDSFKEELDKYFKNHTSPDVDLGDISGINASVVNIQKEIDRLNEVAKNLNESLIDLQELGKYEQYIKGGGGSDIIKLLNEQVNKEMQSSNLYMSMSSWCYTHSLDGAGLFLFDHAAEEYEHAKKLIIFLNENNVPVQLTSISAPEHKFEGLTQIFQKAYEHEQHISESINNIVDHAIKSKDHATFNFLQWYVAEQHEEEVLFKDILDKIELIGNENHGLYLADQYVKGIAKSRKS

SEQ ID NO: 4689 - protein, 1379 aa, Artificial Sequence
  SARS-CoV-2/USA/UT-00033/2020__EPI_ISL_417976 spike protein (1-1211) Ferritin construct
MFVFLVLLPLVSSQCVNLTTRTQLPPAYTNSFTRGVYYPDKVFRSSVLHSTQDLFLPFFSNVTWFHAIHVSGTNGTKRFDNPVLPFNDGVYFASTEKSNIIRGWIFGTTLDSKTQSLLIVNNATNVVIKVCEFQFCNDPFLGVYYHKNNKSWMESEFRVYSSANNCTFEYVSQPFLMDLEGKQGNFKNLREFVFKNIDGYFKIYSKHTPINLVRDLPQGFSALEPLVDLPIGINITRFQTLLALHRSYLTPGDSSSGLTAGAAAYYVGYLQPRTFLLKYNENGTITDAVDCALDPLSETKCTLKSFTVEKGIYQTSNFRVQPTESIVRFPNITNLCPFGEVFNATRFASVYAWNRKRISNCVADYSVLYNSASFSTFKCYGVSPTKLNDLCFTNVYADSFVIRGDEVRQIAPGQTGKIADYNYKLPDDFTGCVIAWNSNNLDSKVGGNYNYLYRLFRKSNLKPFERDISTEIYQAGSTPCNGVEGFNCYFPLQSYGFQPTNGVGYQPYRVVVLSFELLHAPATVCGPKKSTNLVKNKCVNFNFNGLTGTGVLTESNKKFLPFQQFGRDIADTTDAVRDPQTLEILDITPCSFGGVSVITPGTNTSNQVAVLYQGVNCTEVPVAIHADQLTPTWRVYSTGSNVFQTRAGCLIGAEHVNNSYECDIPIGAGICASYQTQTNSPRRARSVASQSIIAYTMSLGAENSVAYSNNSIAIPTNFTISVTTEILPVSMTKTSVDCTMYICGDSTECSNLLLQYGSFCTQLNRALTGIAVEQDKNTQEVFAQVKQIYKTPPIKDFGGFNFSQILPDPSKPSKRSFIEDLLFNKVTLADAGFIKQYGDCLGDIAARDLICAQKFNGLTVLPPLLTDEMIAQYTSALLAGTITSGWTFGAGAALQIPFAMQMAYRFNGIGVTQNVLYENQKLIANQFNSAIGKIQDSLSSTASALGKLQDVVNQNAQALNTLVKQLSSNFGAISSVLNDILSRLDKVEAEVQIDRLITGRLQSLQTYVTQQLIRAAEIRASANLAATKMSECVLGQSKRVDFCGKGYHLMSFPQSAPHGVVFLHVTYVPAQEKNFTTAPAICHDGKAHFPREGVFVSNGTHWFVTQRNFYEPQIITTDNTFVSGNCDVVIGIVNNTVYDPLQPELDSFKEELDKYFKNHTSPDVDLGDISGINASVVNIQKEIDRLNEVAKNLNESLIDLQELGKYEQYIKGGGGSDIIKLLNEQVNKEMQSSNLYMSMSSWCYTHSLDGAGLFLFDHAAEEYEHAKKLIIFLNENNVPVQLTSISAPEHKFEGLTQIFQKAYEHEQHISESINNIVDHAIKSKDHATFNFLQWYVAEQHEEEVLFKDILDKIELIGNENHGLYLADQYVKGIAKSRKS

SEQ ID NO: 4690 - protein, 1379 aa, Artificial Sequence
  SARS-CoV-2/USA/WI-13/2020__EPI_ISL_417516 spike protein (1-1211) Ferritin construct
MFVFLVLLPLVSSQCVNLTTRTQLPPAYTNSFTRGVYYPDKVFRSSVLHSTQDLFLPFFSNVTWFHAIHVSGTNGTKRFDNPVLPFNDGVYFASTEKSNIIRGWIFGTTLDSKTQSLLIVNNATNVVIKVCEFQFCNDPFLGVYYHKNNKSWMESEFRVYSSANNCTFEYVSQPFLMDLEGKQGNFKNLREFVFKNIDGYFKIYSKHTPINLVRDLPQGFSALEPLVDLPIGINITRFQTLLALHRSYLTPGDSSSGWTAGAAAYYVGYLQPRTFLLKYNENGTITDAVDCALDPLSETKCTLKSFTVEKGIYQTSNFRVLPTESIVRFPNITNLCPFGEVFNATRFASVYAWNRKRISNCVADYSVLYNSASFSTFKCYGVSPTKLNDLCFTNVYADSFVIRGDEVRQIAPGQTGKIADYNYKLPDDFTGCVIAWNSNNLDSKVGGNYNYLYRLFRKSNLKPFERDISTEIYQAGSTPCNGVEGFNCYFPLQSYGFQPTNGVGYQPYRVVVLSFELLHAPATVCGPKKSTNLVKNKCVNFNFNGLTGTGVLTESNKKFLPFQQFGRDIADTTDAVRDPQTLEILDITPCSFGGVSVITPGTNTSNQVAVLYQGVNCTEVPVAIHADQLTPTWRVYSTGSNVFQTRAGCLIGAEHVNNSYECDIPIGAGICASYQTQTNSPRRARSVASQSIIAYTMSLGAENSVAYSNNSIAIPTNFTISVTTEILPVSMTKTSVDCTMYICGDSTECSNLLLQYGSFCTQLNRALTGIAVEQDKNTQEVFAQVKQIYKTPPIKDFGGFNFSQILPDPSKPSKRSFIEDLLFNKVTLADAGFIKQYGDCLGDIAARDLICAQKFNGLTVLPPLLTDEMIAQYTSALLAGTITSGWTFGAGAALQIPFAMQMAYRFNGIGVTQNVLYENQKLIANQFNSAIGKIQDSLSSTASALGKLQDVVNQNAQALNTLVKQLSSNFGAISSVLNDILSRLDKVEAEVQIDRLITGRLQSLQTYVTQQLIRAAEIRASANLAATKMSECVLGQSKRVDFCGKGYHLMSFPQSAPHGVVFLHVTYVPAQEKNFTTAPAICHDGKAHFPREGVFVSNGTHWFVTQRNFYEPQIITTDNTFVSGNCDVVIGIVNNTVYDPLQPELDSFKEELDKYFKNHTSPDVDLGDISGINASVVNIQKEIDRLNEVAKNLNESLIDLQELGKYEQYIKGGGGSDIIKLLNEQVNKEMQSSNLYMSMSSWCYTHSLDGAGLFLFDHAAEEYEHAKKLIIFLNENNVPVQLTSISAPEHKFEGLTQIFQKAYEHEQHISESINNIVDHAIKSKDHATFNFLQWYVAEQHEEEVLFKDILDKIELIGNENHGLYLADQYVKGIAKSRKS

SEQ ID NO: 4691 - protein, 1378 aa, Artificial Sequence
  SARS-CoV-2/India/1-27/2020__EPI_ISL_413522 spike protein (1-1210) Ferritin construct
MFVFLVLLPLVSSQCVNLTTRTQLPPAYTNSFTRGVYYPDKVFRSSVLHSTQDLFLPFFSNVTWFHAIHVSGTNGTKRFDNPVLPFNDGVYFASTEKSNIIRGWIFGTTLDSKTQSLLIVNNATNVVIKVCEFQFCNDPFLGVYHKNNKSWMESEFRVYSSANNCTFEYVSQPFLMDLEGKQGNFKNLREFVFKNIDGYFKIYSKHTPINLVRDLPQGFSALEPLVDLPIGINITRFQTLLALHRSYLTPGDSSSGWTAGAAAYYVGYLQPRTFLLKYNENGTITDAVDCALDPLSETKCTLKSFTVEKGIYQTSNFRVQPTESIVRFPNITNLCPFGEVFNATRFASVYAWNRKRISNCVADYSVLYNSASFSTFKCYGVSPTKLNDLCFTNVYADSFVIRGDEVIQIAPGQTGKIADYNYKLPDDFTGCVIAWNSNNLDSKVGGNYNYLYRLFRKSNLKPFERDISTEIYQAGSTPCNGVEGFNCYFPLQSYGFQPTNGVGYQPYRVVVLSFELLHAPATVCGPKKSTNLVKNKCVNFNFNGLTGTGVLTESNKKFLPFQQFGRDIADTTDAVRDPQTLEILDITPCSFGGVSVITPGTNTSNQVAVLYQDVNCTEVPVAIHADQLTPTWRVYSTGSNVFQTRAGCLIGAEHVNNSYECDIPIGAGICASYQTQTNSPRRARSVASQSIIAYTMSLGAENSVAYSNNSIAIPTNFTISVTTEILPVSMTKTSVDCTMYICGDSTECSNLLLQYGSFCTQLNRALTGIAVEQDKNTQEVFAQVKQIYKTPPIKDFGGFNFSQILPDPSKPSKRSFIEDLLFNKVTLADAGFIKQYGDCLGDIAARDLICAQKFNGLTVLPPLLTDEMIAQYTSALLAGTITSGWTFGAGAALQIPFAMQMAYRFNGIGVTQNVLYENQKLIANQFNSAIGKIQDSLSSTASALGKLQDVVNQNAQALNTLVKQLSSNFGAISSVLNDILSRLDKVEAEVQIDRLITGRLQSLQTYVTQQLIRAAEIRASANLAATKMSECVLGQSKRVDFCGKGYHLMSFPQSAPHGVVFLHVTYVPAQEKNFTTAPAICHDGKAHFPREGVFVSNGTHWFVTQRNFYEPQIITTDNTFVSGNCDVVIGIVNNTVYDPLQPELDSFKEELDKYFKNHTSPDVDLGDISGINASVVNIQKEIDRLNEVAKNLNESLIDLQELGKYEQYIKGGGGSDIIKLLNEQVNKEMQSSNLYMSMSSWCYTHSLDGAGLFLFDHAAEEYEHAKKLIIFLNENNVPVQLTSISAPEHKFEGLTQIFQKAYEHEQHISESINNIVDHAIKSKDHATFNFLQWYVAEQHEEEVLFKDILDKIELIGNENHGLYLADQYVKGIAKSRKS

SEQ ID NO: 4692 - protein, 1373 aa, Artificial Sequence
  SARS-CoV-2/pangolin/Guangxi/P4L/2017__EPI_ISL_410538 spike protein (1-1205) Ferritin construct
MFVFLFVLPLVSSQCVNLTTRTGIPPGYTNSSTRGVYYPDKVFRSSILHLTQDLFLPFFSNVTWFNTINYQGGFKKFDNPVLPFNDGVYFASTEKSNIIRGWIFGTTLDARTQSLLIVNNATNVVIKVCEFQFCTDPFLGVYYHNNNKTWVENEFRVYSSANNCTFEYISQPFLMDLEGKQGNFKNLREFVFKNVDGYFKIYSKHTPIDLVRDLPRGFAALEPLVDLPIGINITRFQTLLALHRSYLTPGNLESGWTTGAAAYYVGYLQQRTFLLSYNQNGTITDAVDCSLDPLSETKCTLKSLTVEKGIYQTSNFRVQPTISIVRFPNITNLCPFGEVFNASKFASVYAWNRKRISNCVADYSVLYNSTSFSTFKCYGVSPTKLNDLCFTNVYADSFVVKGDEVRQIAPGQTGVIADYNYKLPDDFTGCVIAWNSVKQDALTGGNYGYLYRLFRKSKLKPFERDISTEIYQAGSTPCNGQVGLNCYYPLERYGFHPTTGVNYQPFRVVVLSFELLNGPATVCGPKLSTTLVKDKCVNFNFNGLTGTGVLTTSKKQFLPFQQFGRDISDTTDAVRDPQTLEILDITPCSFGGVSVITPGTNTSNQVAVLYQDVNCTEVPMAIHAEQLTPAWRVYSAGANVFQTRAGCLVGAEHVNNSYECDIPVGAGICASYHSMSSLRSVNQRSIIAYTMSLGAENSVAYSNNSIAIPTNFTISVTTEILPVSMTKTSVDCTMYICGDSIECSNLLLQYGSFCTQLNRALTGIAVEQDKNTQEVFAQVKQIYKTPPIKDFGGFNFSQILPDPSKPSKRSFIEDLLFNKVTLADAGFIKQYGDCLGDIAARDLICAQKFNGLTVLPPLLTDEMIAQYTSALLAGTITSGWTFGAGAALQIPFAMQMAYRFNGIGVTQNVLYENQKLIANQFNSAIGKIQDSLSSTASALGKLQDVVNQNAQALNTLVKQLSSNFGAISSVLNDILSRLDKVEAEVQIDRLITGRLQSLQTYVTQQLIRAAEIRASANLAATKMSECVLGQSKRVDFCGKGYHLMSFPQSAPHGVVFLHVTYVPAQEKNFTTAPAICHEGKAHFPREGVFVSNGTHWFITQRNFYEPQIITTDNTFVSGSCDVVIGIVNNTVYDPLQPELDSFKEELDKYFKNHTSPDVDLGDISGINASVVNIQKEIDRLNEVAKNLNESPIDLQELGKYEQYIKGGGGSDIIKLLNEQVNKEMQSSNLYMSMSSWCYTHSLDGAGLFLFDHAAEEYEHAKKLIIFLNENNVPVQLTSISAPEHKFEGLTQIFQKAYEHEQHISESINNIVDHAIKSKDHATFNFLQWYVAEQHEEEVLFKDILDKIELIGNENHGLYLADQYVKGIAKSRKS

SEQ ID NO: 4693 - protein, 1373 aa, Artificial Sequence
  SARS-CoV-2/pangolin/Guangxi/P5L/2017__EPI_ISL_410540 spike protein (1-1205) Ferritin construct
MFVFLFVLPLVSSQCVNLTTRTGIPPGYTNSSTRGVYYPDKVFRSSILHLTQDLFLPFFSNVTWFNTINYQGGFKKFDNPVLPFNDGVYFASTEKSNIIRGWIFGTTLDARTQSLLIVNNATNVVIKVCEFQFCTDPFLGVYYHNNNKTWVENEFRVYSSANNCTFEYISQPFLMDLEGKQGNFKNLREFVFKNVDGYFKIYSKHTPIDLVRDLPRGFAALEPLVDLPIGINITRFQTLLALHRSYLTPGKLESGWTTGAAAYYVGYLQQRTFLLSYNQNGTITDAVDCSLDPLSETKCTLKSLTVEKGIYQTSNFRVQPTISIVRFPNITNLCPFGEVFNASKFASVYAWNRKRISNCVADYSVLYNSTSFSTFKCYGVSPTKLNDLCFTNVYADSFVVKGDEVRQIAPGQTGVIADYNYKLPDDFTGCVIAWNSVKQDALTGGNYGYLYRLFRKSKLKPFERDISTEIYQAGSTPCNGQVGLNCYYPLERYGFHPTTGVNYQPFRVVVLSFELLNGPATVCGPKLSTTLVKDKCVNFNFNGLTGTGVLTTSKKQFLPFQQFGRDISDTTDAVRDPQTLEILDITPCSFGGVSVITPGTNTSNQVAVLYQDVNCTEVPMAIHAEQLTPAWRVYSAGANVFQTRAGCLVGAEHVNNSYECDIPVGAGICASYHSMSSFRSVNQRSIIAYTMSLGAENSVAYSNNSIAIPTNFTISVTTEILPVSMTKTSVDCTMYICGDSIECSNLLLQYGSFCTQLNRALTGIAVEQDKNTQEVFAQVKQIYKTPPIKDFGGFNFSQILPDPSKPSKRSFIEDLLFNKVTLADAGFIKQYGDCLGDIAARDLICAQKFNGLTVLPPLLTDEMIAQYTSALLAGTITSGWTFGAGAALQIPFAMQMAYRFNGIGVTQNVLYENQKLIANQFNSAIGKIQDSLSSTASALGKLQDVVNQNAQALNTLVKQLSSNFGAISSVLNDILSRLDKVEAEVQIDRLITGRLQSLQTYVTQQLIRAAEIRASANLAATKMSECVLGQSKRVDFCGKGYHLMSFPQSAPHGVVFLHVTYVPAQEKNFTTAPAICHEGKAHFPREGVFVSNGTHWFITQRNFYEPQIITTDNTFVSGSCDVVIGIVNNTVYDPLQPELDSFKEELDKYFKNHTSPDVDLGDISGINASVVNIQKEIDRLNEVAKNLNESLIDLQELGKYEQYIKGGGGSDIIKLLNEQVNKEMQSSNLYMSMSSWCYTHSLDGAGLFLFDHAAEEYEHAKKLIIFLNENNVPVQLTSISAPEHKFEGLTQIFQKAYEHEQHISESINNIVDHAIKSKDHATFNFLQWYVAEQHEEEVLFKDILDKIELIGNENHGLYLADQYVKGIAKSRKS

SEQ ID NO: 4694 - protein, 1373 aa, Artificial Sequence
  SARS-CoV-2/pangolin/Guangxi/P5E/2017__EPI_ISL_410541 spike protein (1-1205) Ferritin construct
MFVFLFVLPLVSSQCVNLTTRTGIPPGYTNSSTRGVYYPDKVFRSSILHLTQDLFLPFFSNVTWFNTITYQGGSKKFDNPVLPFNDGVYFASTEKSNIIRGWIFGTTLDARTQSLLIVNNATNVVIKVCEFQFCTDPFLGVYYHNNNKTWVENEFRVYSSANNCTFEYISQPFLMDLEGKQGNFKNLREFVFKNVDGYFKIYSKHTPIDLVRDLPRGFAALEPLVDLPIGINITRFQTLLALHRSYLTPGKLESGWTTGAAAYYVGYLQQRTFLLSYNQNGTITDAVDCSLDPLSETKCTLKSLTVEKGIYQTSNFRVQPTISIVRFPNITNLCPFGEVFNASKFASVYAWNRKRISNCVADYSVLYNSTSFSTFKCYGVSPTKLNDLCFTNVYADSFVVKGDEVRQIAPGQTGVIADYNYKLPDDFTGCVIAWNSVKQDALTGDNYGYLYRLFRKSKLKPFERDISTEIYQAGSTPCNGQVGLNCYYPLERYGFHPTTGVNYQPFRVVVLSFELLNGPATVCGPKLSTTLVKDKCVNFNFNGLTGTGVLTTSKKQFLPFQQFGRDISDTTDAVRDPQTLEILDITPCSFGGVSVITPGTNTSNQVAVLYQDVNCTEVPMAIHAEQLTPAWRVYSAGANVFQTRAGCLVGAEHVNNSYECDIPVGAGICASYHSMSSFRSVNQRSIIAYTMSLGAENSVAYSNNSIAIPTNFTISVTTEILPVSMTKTSVDCTMYICGDSIECSNLLLQYGSFCTQLNRALTGIAVEQDKNTQEVFAQVKQIYKTPPIKDFGGFNFSQILPDPSKPSKRSFIEDLLFNKVTLADAGFIKQYGDCLGDIAARDLICAQKFNGLTVLPPLLTDEMIAQYTSALLAGTITSGWTFGAGAALQIPFAMQMAYRFNGIGVTQNVLYENQKLIANQFNSAIGKIQDSLSSTASALGKLQDVVNQNAQALNTLVKQLSSNFGAISSVLNDILSRLDKVEAEVQIDRLITGRLQSLQTYVTQQLIRAAEIRASANLAATKMSECVLGQSKRVDFCGKGYHLMSFPQSAPHGVVFLHVTYVPAQEKNFTTAPAICHEGKAHFPREGVFVSNGTHWFITQRNFYEPQIITTDNTFVSGSCDVVIGIVNNTVYDPLQPELDSFKEELDKYFKNHTSPDVDLGDISGINASVVNIQKEIDRLNEVAKNLNESLIDLQELGKYEQYIKGGGGSDIIKLLNEQVNKEMQSSNLYMSMSSWCYTHSLDGAGLFLFDHAAEEYEHAKKLIIFLNENNVPVQLTSISAPEHKFEGLTQIFQKAYEHEQHISESINNIVDHAIKSKDHATFNFLQWYVAEQHEEEVLFKDILDKIELIGNENHGLYLADQYVKGIAKSRKS

SEQ ID NO: 4695 - protein, 1371 aa, Artificial Sequence
  SARS-CoV-2/pangolin/Guangxi/P1E/2017__EPI_ISL_410539 spike protein (1-1203) Ferritin construct
MFVFLFVLPLVSSQCVNLTTRTGIQPGYTNSSTRGVYYPDKVFRSSILHLTQDLFLPFFSNVTWFNTINYQGGFKKFDNPVLPFNDGVYFASTEKSNIIRGWIFGTTLDARTQSLLIVNNATNVVIKVCEFQFCTDPFLGVYYHNNNKTWVENEFRVYSSANNCTFEYISQPFLMDLEGKQGNFKNLREFVFKNVDGYFKIYSKHTPIDLVRDLPRGFAALEPLVDLPIGINITRFQTLLALHRSYLTPGKLESGWTTGAAAYYVGYLQQRTFLLSYNQNGTITDAVDCSLDPLSETKCTLKSLTVEKGIYQTSNFRVQPTISIVRFPNITNLCPFGEVFNASKFASVYAWNRKRISNCVADYSVLYNSTSFSTFKCYGVSPTKLNDLCFTNVYADSFVVKGDEVRQIAPGQTGVIADYNYKLPDDFTGCVIAWNSVKQDALTGGNYLYRLFRKSKLKPFERDISTEIYQAGSTPCNGQVGLNCYYPLERYGFHPTTGVNYQPFRVVVLSFELLNGPATVCGPKLSTTLVKDKCVNFNFNGLTGTGVLTTSKKQFLPFQQFGRDISDTTDAVRDPQTLEILDITPCSFGGVSVITPGTNTSNQVAVLYQDVNCTEVPMAIHAEQLTPAWRVYSAGANVFQTRAGCLVGAEHVNNSYECDIPVGAGICASYHSMSSLRSVNQRSIIAYTMSLGAENSVAYSNNSIAIPTNFTISVTTEILPVSMTKTSVDCTMYICGDSIECSNLLLQYGSFCTQLNRALTGIAVEQDKNTQEVFAQVKQIYKTPPIKDFGGFNFSQILPDPSKPSKRSFIEDLLFNKVTLADAGFIKQYGDCLGDIAARDLICAQKFNGLTVLPPLLTDEMIAQYTSALLAGTITSGWTFGAGAALQIPFAMQMAYRFNGIGVTQNVLYENQKLIANQFNSAIGKIQDSLSSTASALGKLQDVVNQNAQALNTLVKQLSSNFGAISSVLNDILSRLDKVEAEVQIDRLITGRLQSLQTYVTQQLIRAAEIRASANLAATKMSECVLGQSKRVDFCGKGYHLMSFPQSAPHGVVFLHVTYVPAQEKNFTTAPAICHEGKAHFPREGVFVSNGTHWFITQRNFYEPQIITTDNTFVSGSCDVVIGIVNNTVYDPLQPELDSFKEELDKYFKNHTSPDVDLGDISGINASVVNIQKEIDRLNEVAKNLNESLIDLQELGKYEQYIKGGGGSDIIKLLNEQVNKEMQSSNLYMSMSSWCYTHSLDGAGLFLFDHAAEEYEHAKKLIIFLNENNVPVQLTSISAPEHKFEGLTQIFQKAYEHEQHISESINNIVDHAIKSKDHATFNFLQWYVAEQHEEEVLFKDILDKIELIGNENHGLYLADQYVKGIAKSRKS

SEQ ID NO: 4696 - protein, 1379 aa, Artificial Sequence
  SARS-CoV-2/Wuhan/WIV05/2019__EPI_ISL_402128 spike protein (1-1211)(K986P_V987P) Ferritin construct
MFVFLVLLPLVSSQCVNLTTRTQLPPAYTNSFTRGVYYPDKVFRSSVLHSTQDLFLPFFSNVTWFHAIHVSGTNGTKRFDNPVLPFNDGVYFASTEKSNIIRGWIFGTTLDSKTQSLLIVNNATNVVIKVCEFQFCNDPFLGVYYHKNNKSWMESEFRVYSSANNCTFEYVSQPFLMDLEGKQGNFKNLREFVFKNIDGYFKIYSKHTPINLVRDLPQGFSALEPLVDLPIGINITRFQTLLALHRSYLTPGDSSSGWTAGAAAYYVGYLQPRTFLLKYNENGTITDAVDCALDPLSETKCTLKSFTVEKGIYQTSNFRVQPTESIVRFPNITNLCPFGEVFNATRFASVYAWNRKRISNCVADYSVLYNSASFSTFKCYGVSPTKLNDLCFTNVYADSFVIRGDEVRQIAPGQTGKIADYNYKLPDDFTGCVIAWNSNNLDSKVGGNYNYLYRLFRKSNLKPFERDISTEIYQAGSTPCNGVEGFNCYFPLQSYGFQPTNGVGYQPYRVVVLSFELLHAPATVCGPKKSTNLVKNKCVNFNFNGLTGTGVLTESNKKFLPFQQFGRDIADTTDAVRDPQTLEILDITPCSFGGVSVITPGTNTSNQVAVLYQDVNCTEVPVAIHADQLTPTWRVYSTGSNVFQTRAGCLIGAEHVNNSYECDIPIGAGICASYQTQTNSPRRARSVASQSIIAYTMSLGAENSVAYSNNSIAIPTNFTISVTTEILPVSMTKTSVDCTMYICGDSTECSNLLLQYGSFCTQLNRALTGIAVEQDKNTQEVFAQVKQIYKTPPIKDFGGFNFSQILPDPSKPSKRSFIEDLLFNKVTLADAGFIKQYGDCLGDIAARDLICAQKFNGLTVLPPLLTDEMIAQYTSALLAGTITSGWTFGAGAALQIPFAMQMAYRFNGIGVTQNVLYENQKLIANQFNSAIGKIQDSLSSTASALGKLQDVVNQNAQALNTLVKQLSSNFGAISSVLNDILSRLDPPEAEVQIDRLITGRLQSLQTYVTQQLIRAAEIRASANLAATKMSECVLGQSKRVDFCGKGYHLMSFPQSAPHGVVFLHVTYVPAQEKNFTTAPAICHDGKAHFPREGVFVSNGTHWFVTQRNFYEPQIITTDNTFVSGNCDVVIGIVNNTVYDPLQPELDSFKEELDKYFKNHTSPDVDLGDISGINASVVNIQKEIDRLNEVAKNLNESLIDLQELGKYEQYIKGGGGSDIIKLLNEQVNKEMQSSNLYMSMSSWCYTHSLDGAGLFLFDHAAEEYEHAKKLIIFLNENNVPVQLTSISAPEHKFEGLTQIFQKAYEHEQHISESINNIVDHAIKSKDHATFNFLQWYVAEQHEEEVLFKDILDKIELIGNENHGLYLADQYVKGIAKSRKS

SEQ ID NO: 4697 - protein, 1375 aa, Artificial Sequence
  SARS-CoV-2/bat/Yunnan/RaTG13/2013__EPI_ISL_402131 spike protein (1-1207)(K982P_V983P) Ferritin construct
MFVFLVLLPLVSSQCVNLTTRTQLPPAYTNSSTRGVYYPDKVFRSSVLHLTQDLFLPFFSNVTWFHAIHVSGTNGIKRFDNPVLPFNDGVYFASTEKSNIIRGWIFGTTLDSKTQSLLIVNNATNVVIKVCEFQFCNDPFLGVYYHKNNKSWMESEFRVYSSANNCTFEYVSQPFLMDLEGKQGNFKNLREFVFKNIDGYFKIYSKHTPINLVRDLPPGFSALEPLVDLPIGINITRFQTLLALHRSYLTPGDSSSGWTAGAAAYYVGYLQPRTFLLKYNENGTITDAVDCALDPLSETKCTLKSFTVEKGIYQTSNFRVQPTDSIVRFPNITNLCPFGEVFNATTFASVYAWNRKRISNCVADYSVLYNSTSFSTFKCYGVSPTKLNDLCFTNVYADSFVITGDEVRQIAPGQTGKIADYNYKLPDDFTGCVIAWNSKHIDAKEGGNFNYLYRLFRKANLKPFERDISTEIYQAGSKPCNGQTGLNCYYPLYRYGFYPTDGVGHQPYRVVVLSFELLNAPATVCGPKKSTNLVKNKCVNFNFNGLTGTGVLTESNKKFLPFQQFGRDIADTTDAVRDPQTLEILDITPCSFGGVSVITPGTNASNQVAVLYQDVNCTEVPVAIHADQLTPTWRVYSTGSNVFQTRAGCLIGAEHVNNSYECDIPIGAGICASYQTQTNSRSVASQSIIAYTMSLGAENSVAYSNNSIAIPTNFTISVTTEILPVSMTKTSVDCTMYICGDSTECSNLLLQYGSFCTQLNRALTGIAVEQDKNTQEVFAQVKQIYKTPPIKDFGGFNFSQILPDPSKPSKRSFIEDLLFNKVTLADAGFIKQYGDCLGDIAARDLICAQKFNGLTVLPPLLTDEMIAQYTSALLAGTITSGWTFGAGAALQIPFAMQMAYRFNGIGVTQNVLYENQKLIANQFNSAIGKIQDSLSSTASALGKLQDVVNQNAQALNTLVKQLSSNFGAISSVLNDILSRLDPPEAEVQIDRLITGRLQSLQTYVTQQLIRAAEIRASANLAATKMSECVLGQSKRVDFCGKGYHLMSFPQSAPHGVVFLHVTYVPAQEKNFTTAPAICHDGKAHFPREGVFVSNGTHWFVTQRNFYEPQIITTDNTFVSGSCDVVIGIVNNTVYDPLQPELDSFKEELDKYFKNHTSPDVDLGDISGINASVVNIQKEIDRLNEVAKNLNESLIDLQELGKYEQYIKGGGGSDIIKLLNEQVNKEMQSSNLYMSMSSWCYTHSLDGAGLFLFDHAAEEYEHAKKLIIFLNENNVPVQLTSISAPEHKFEGLTQIFQKAYEHEQHISESINNIVDHAIKSKDHATFNFLQWYVAEQHEEEVLFKDILDKIELIGNENHGLYLADQYVKGIAKSRKS

SEQ ID NO: 4698 - protein, 1379 aa, Artificial Sequence
  SARS-CoV-2/Wuhan/HBCDC-HB-01/2019__EPI_ISL_402132 spike protein (1-1211)(K986P_V987P) Ferritin construct
MFVFLVLLPLVSSQCVNLTTRTQLPPAYTNSITRGVYYPDKVFRSSVLHSTQDLFLPFFSNVTWFHAIHVSGTNGTKRFDNPVLPFNDGVYFASTEKSNIIRGWIFGTTLDSKTQSLLIVNNATNVVIKVCEFQFCNDPFLGVYYHKNNKSWMESEFRVYSSANNCTFEYVSQPFLMDLEGKQGNFKNLREFVFKNIDGYFKIYSKHTPINLVRDLPQGFSALEPLVDLPIGINITRFQTLLALHRSYLTPGDSSSGWTAGAAAYYVGYLQPRTFLLKYNENGTITDAVDCALDPLSETKCTLKSFTVEKGIYQTSNFRVQPTESIVRFPNITNLCPFGEVFNATRFASVYAWNRKRISNCVADYSVLYNSASFSTFKCYGVSPTKLNDLCFTNVYADSFVIRGDEVRQIAPGQTGKIADYNYKLPDDFTGCVIAWNSNNLDSKVGGNYNYLYRLFRKSNLKPFERDISTEIYQAGSTPCNGVEGFNCYFPLQSYGFQPTNGVGYQPYRVVVLSFELLHAPATVCGPKKSTNLVKNKCVNFNFNGLTGTGVLTESNKKFLPFQQFGRDIADTTDAVRDPQTLEILDITPCSFGGVSVITPGTNTSNQVAVLYQDVNCTEVPVAIHADQLTPTWRVYSTGSNVFQTRAGCLIGAEHVNNSYECDIPIGAGICASYQTQTNSPRRARSVASQSIIAYTMSLGAENSVAYSNNSIAIPTNFTISVTTEILPVSMTKTSVDCTMYICGDSTECSNLLLQYGSFCTQLNRALTGIAVEQDKNTQEVFAQVKQIYKTPPIKDFGGFNFSQILPDPSKPSKRSFIEDLLFNKVTLADAGFIKQYGDCLGDIAARDLICAQKFNGLTVLPPLLTDEMIAQYTSALLAGTITSGWTFGAGAALQIPFAMQMAYRFNGIGVTQNVLYENQKLIANQFNSAIGKIQDSLSSTASALGKLQDVVNQNAQALNTLVKQLSSNFGAISSVLNDILSRLDPPEAEVQIDRLITGRLQSLQTYVTQQLIRAAEIRASANLAATKMSECVLGQSKRVDFCGKGYHLMSFPQSAPHGVVFLHVTYVPAQEKNFTTAPAICHDGKAHFPREGVFVSNGTHWFVTQRNFYEPQIITTDNTFVSGNCDVVIGIVNNTVYDPLQPELDSFKEELDKYFKNHTSPDVDLGDISGINASVVNIQKEIDRLNEVAKNLNESLIDLQELGKYEQYIKGGGGSDIIKLLNEQVNKEMQSSNLYMSMSSWCYTHSLDGAGLFLFDHAAEEYEHAKKLIIFLNENNVPVQLTSISAPEHKFEGLTQIFQKAYEHEQHISESINNIVDHAIKSKDHATFNFLQWYVAEQHEEEVLFKDILDKIELIGNENHGLYLADQYVKGIAKSRKS

SEQ ID NO: 4699 - protein, 1379 aa, Artificial Sequence
  SARS-CoV-2/Guangdong/20SF028/2020__EPI_ISL_403936 spike protein (1-1211)(K986P_V987P) Ferritin construct
MFVFLVLLPLVSSQCVNLTTRTQLPPAYTNSFTRGVYYPDKVFRSSVLYSTQDLFLPFFSNVTWFHAIHVSGTNGTKRFDNPVLPFNDGVYFASTEKSNIIRGWIFGTTLDSKTQSLLIVNNATNVVIKVCEFQFCNDPFLGVYYHKNNKSWMESEFRVYSSANNCTFEYVSQPFLMDLEGKQGNFKNLREFVFKNIDGYFKIYSKHTPINLVRDLPQGFSALEPLVDLPIGINITRFQTLLALHRSYLTPGDSSSGWTAGAAAYYVGYLQPRTFLLKYNENGTITDAVDCALDPLSETKCTLKSFTVEKGIYQTSNFRVQPTESIVRFPNITNLCPFGEVFNATRFASVYAWNRKRISNCVADYSVLYNSASFSTFKCYGVSPTKLNDLCFTNVYADSFVIRGDEVRQIAPGQTGKIADYNYKLPDDFTGCVIAWNSNNLDSKVGGNYNYLYRLFRKSNLKPFERDISTEIYQAGSTPCNGVEGFNCYFPLQSYGFQPTNGVGYQPYRVVVLSFELLHAPATVCGPKKSTNLVKNKCVNFNFNGLTGTGVLTESNKKFLPFQQFGRDIADTTDAVRDPQTLEILDITPCSFGGVSVITPGTNTSNQVAVLYQDVNCTEVPVAIHADQLTPTWRVYSTGSNVFQTRAGCLIGAEHVNNSYECDIPIGAGICASYQTQTNSPRRARSVASQSIIAYTMSLGAENSVAYSNNSIAIPTNFTISVTTEILPVSMTKTSVDCTMYICGDSTECSNLLLQYGSFCTQLNRALTGIAVEQDKNTQEVFAQVKQIYKTPPIKDFGGFNFSQILPDPSKPSKRSFIEDLLFNKVTLADAGFIKQYGDCLGDIAARDLICAQKFNGLTVLPPLLTDEMIAQYTSALLAGTITSGWTFGAGAALQIPFAMQMAYRFNGIGVTQNVLYENQKLIANQFNSAIGKIQDSLSSTASALGKLQDVVNQNAQALNTLVKQLSSNFGAISSVLNDILSRLDPPEAEVQIDRLITGRLQSLQTYVTQQLIRAAEIRASANLAATKMSECVLGQSKRVDFCGKGYHLMSFPQSAPHGVVFLHVTYVPAQEKNFTTAPAICHDGKAHFPREGVFVSNGTHWFVTQRNFYEPQIITTDNTFVSGNCDVVIGIVNNTVYDPLQPELDSFKEELDKYFKNHTSPDVDLGDISGINASVVNIQKEIDRLNEVAKNLNESLIDLQELGKYEQYIKGGGGSDIIKLLNEQVNKEMQSSNLYMSMSSWCYTHSLDGAGLFLFDHAAEEYEHAKKLIIFLNENNVPVQLTSISAPEHKFEGLTQIFQKAYEHEQHISESINNIVDHAIKSKDHATFNFLQWYVAEQHEEEVLFKDILDKIELIGNENHGLYLADQYVKGIAKSRKS

SEQ ID NO: 4700 - protein, 1379 aa, Artificial Sequence
  SARS-CoV-2/Shenzhen/SZTH-001/2020__EPI_ISL_406592 spike protein (1-1211)(K986P_V987P) Ferritin construct
MFVFLVLLPLVSSQCVNLTTRTQLPPAYTNSFTRGVYYPDKVFRSSVLHSTQDLFLPFFSNVTWFHAIHVSGTNGTKRFDNPVLPFNDGVYFASTEKSNIIRGWIFGTTLDSKTQSLLIVNNATNVVIKVCEFQFCNDPFLGVYYHKNNKSWMESEFRVYSSANNCTFEYVSQPFLMDLEGKQGNFKNLREFVFKNIDGYFKIYSKHTPINLVRDLPQGFSALEPLVDLPIGINITRFQTLLALHRSYLTPGDSSSGWTAGAAAYYVGYLQPRTFLLKYNENGTITDAVDCALDPLSETKCTLKSFTVEKGIYQTSNFRVQPTESIVRFPNITNLCPFGEVFNATRFASVYAWNRKRISNCVADYSVLYNSASFSTFKCYGVSPTKLNDLCFTNVYADSFVIRGDEVRQIAPGQTGKIADYNYKLPDDFTGCVIAWNSNNLDSKVGGNYNYLYRLFRKSNLKPFERDISTEIYQAGSTPCNGVEGFNCYFPLQSYGFQPTNGVGYQPYRVVVLSFELLHAPATVCGPKKSTNLVKNKCVNFNFNGLTGTGVLTESNKKFLPFQQFGRDIADTTDAVRDPQTLEILDITPCSFGGVSVITPGTNTSNQVAVLYQDVNCTEVPVAIHADQLTPTWRVYSTGSNVFQTRAGCLIGAEHVNNSYECDIPIGAGICASYQTQTNSPRRARSVASQSIIAYTMSLGAENSVAYSNNSIAIPTNFTISVTTEILPVSMTKTSVDCTMYICGDSTECSNLLLQYGSFCTQLNRALTGIAVEQDKNTQEVFAQVKQIYKTPPIKDFGGFNFSQILPDPSKPSKRSFIEDLLFNKVTLADAGFIKQYGDCLGDIAARDLICAQKFNGLTVLPPLLTDEMIAQYTSALLAGTITSGWTFGAGAALQIPFAMQMAYRFNGIGVTQNVLYENQKLIANQFNSAIGKIQDSLSSTASALGKLQDVVNQNAQALNTLVKQLSSNFGAISSVLNDILSRLDPPEAEVQIDRLITGRLQSLQTYVTQQLIRAAEIRASANLAATKMSECVLGQSKRVDFCGKGYHLMSFPQSAPHGVVFLHVTYVPAQEKNFTTAPAICHDGKAHFPREGVFVSNGTHWFVTQRNFYEPQIITTDNTFVSGNCDVLIGIVNNTVYDPLQPELDSFKEELDKYFKNHTSPDVDLGDISGINASVVNIQKEIDRLNEVAKNLNESLIDLQELGKYEQYIKGGGGSDIIKLLNEQVNKEMQSSNLYMSMSSWCYTHSLDGAGLFLFDHAAEEYEHAKKLIIFLNENNVPVQLTSISAPEHKFEGLTQIFQKAYEHEQHISESINNIVDHAIKSKDHATFNFLQWYVAEQHEEEVLFKDILDKIELIGNENHGLYLADQYVKGIAKSRKS

SEQ ID NO: 4701 - protein, 1379 aa, Artificial Sequence
  SARS-CoV-2/Shenzhen/SZTH-004/2020__EPI_ISL_406595 spike protein (1-1211)(K986P_V987P) Ferritin construct
MFVFLVLLPLVSSQCVNLTTRTQLPPAYTNSFTRGVYYPDKVFRSSVLHSTQDLFLPFFSNVTWFHAIHVSGTNGTKRFDNPVLPFNDGVYFASTEKSNIIRGWIFGTTLDSKTQSLLIVNNATNVVIKVCEFQFCNDPFLGVYYHKNNKSWMESEFRVYSSANNCTFEYVSQPFLMDLEGKQGNFKNLREFVFKNIDGYFKIYSKHTPINLVRDLPQGFSALEPLVDLPIGINITRFQTLLALHRSYLTPGDSSSGWTAGAAAYYVGYLQPRTFLLKYNENGTITDAVDCALDPLSETKCTLKSFTVEKGIYQTSNFRVQPTESIVRFPNITNLCPFGEVFNATRFASVYAWDRKRISNCVAYYSVLYNSASFSTFKCYGVSPTKLNDLCFTNVYADSFVIRGDEVRQIAPGQTGKIADYNYKLPDDFTGCVIAWNSNNLDSKVGGNYNYLYRLFRKSNLKPFERDISTEIYQAGSTPCNGVEGFNCYFPLQSYGFQPTNGVGYQPYRVVVLSFELLHAPATVCGPKKSTNLVKNKCVNFNFNGLTGTGVLTESNKKFLPFQQFGRDIADTTDAVRDPQTLEILDITPCSFGGVSVITPGTNTSNQVAVLYQDVNCTEVPVAIHADQLTPTWRVYSTGSNVFQTRAGCLIGAEHVNNSYECDIPIGAGICASYQTQTNSPRRARSVASQSIIAYTMSLGAENSVAYSNNSIAIPTNFTISVTTEILPVSMTKTSVDCTMYICGDSTECSNLLLQYGSFCTQLNRALTGIAVEQDKNTQEVFAQVKQIYKTPPIKDFGGFNFSQILPDPSKPSKRSFIEDLLFNKVTLADAGFIKQYGDCLGDIAARDLICAQKFNGLTVLPPLLTDEMIAQYTSALLAGTITSGWTFGAGAALQIPFAMQMAYRFNGIGVTQNVLYENQKLIANQFNSAIGKIQDSLSSTASALGKLQDVVNQNAQALNTLVKQLSSNFGAISSVLNDILSRLDPPEAEVQIDRLITGRLQSLQTYVTQQLIRAAEIRASANLAATKMSECVLGQSKRVDFCGKGYHLMSFPQSAPHGVVFLHVTYVPAQEKNFTTAPAICHDGKAHFPREGVFVSNGTHWFVTQRNFYEPQIITTDNTFVSGNCDVVIGIVNNTVYDPLQPELDSFKEELDKYFKNHTSPDVDLGDISGINASVVNIQKEIDRLNEVAKNLNESLIDLQELGKYEQYIKGGGGSDIIKLLNEQVNKEMQSSNLYMSMSSWCYTHSLDGAGLFLFDHAAEEYEHAKKLIIFLNENNVPVQLTSISAPEHKFEGLTQIFQKAYEHEQHISESINNIVDHAIKSKDHATFNFLQWYVAEQHEEEVLFKDILDKIELIGNENHGLYLADQYVKGIAKSRKS

SEQ ID NO: 4702 - protein, 1379 aa, Artificial Sequence
  SARS-CoV-2/France/IDF0372/2020__EPI_ISL_406596 spike protein (1-1211)(K986P_V987P) Ferritin construct
MFVFLVLLPLVSSQCVNLTTRTQLPPAYTNSFTRGVYYPDKVFRSSVLHSTQDLFLPFFSNVTWFHAIHVSGTNGTKRFDNPVLPFNDGVYFASTEKSNIIRGWIFGTTLDSKTQSLLIVNNATNVVIKVCEFQFCNDPFLGVYYHKNNKSWMESEFRVYSSANNCTFEYVSQPFLMDLEGKQGNFKNLREFVFKNIDGYFKIYSKHTPINLVRDLPQGFSALEPLVDLPIGINITRFQTLLALHRSYLTPGDSSSGWTAGAAAYYVGYLQPRTFLLKYNENGTITDAVDCALDPLSETKCTLKSFTVEKGIYQTSNFRVQPTESIVRFPNITNLCPFGEVFNATRFASVYAWNRKRISNCVADYSFLYNSASFSTFKCYGVSPTKLNDLCFTNVYADSFVIRGDEVRQIAPGQTGKIADYNYKLPDDFTGCVIAWNSNNLDSKVGGNYNYLYRLFRKSNLKPFERDISTEIYQAGSTPCNGVEGFNCYFPLQSYGFQPTNGVGYQPYRVVVLSFELLHAPATVCGPKKSTNLVKNKCVNFNFNGLTGTGVLTESNKKFLPFQQFGRDIADTTDAVRDPQTLEILDITPCSFGGVSVITPGTNTSNQVAVLYQDVNCTEVPVAIHADQLTPTWRVYSTGSNVFQTRAGCLIGAEHVNNSYECDIPIGAGICASYQTQTNSPRRARSVASQSIIAYTMSLGAENSVAYSNNSIAIPTNFTISVTTEILPVSMTKTSVDCTMYICGDSTECSNLLLQYGSFCTQLNRALTGIAVEQDKNTQEVFAQVKQIYKTPPIKDFGGFNFSQILPDPSKPSKRSFIEDLLFNKVTLADAGFIKQYGDCLGDIAARDLICAQKFNGLTVLPPLLTDEMIAQYTSALLAGTITSGWTFGAGAALQIPFAMQMAYRFNGIGVTQNVLYENQKLIANQFNSAIGKIQDSLSSTASALGKLQDVVNQNAQALNTLVKQLSSNFGAISSVLNDILSRLDPPEAEVQIDRLITGRLQSLQTYVTQQLIRAAEIRASANLAATKMSECVLGQSKRVDFCGKGYHLMSFPQSAPHGVVFLHVTYVPAQEKNFTTAPAICHDGKAHFPREGVFVSNGTHWFVTQRNFYEPQIITTDNTFVSGNCDVVIGIVNNTVYDPLQPELDSFKEELDKYFKNHTSPDVDLGDISGINASVVNIQKEIDRLNEVAKNLNESLIDLQELGKYEQYIKGGGGSDIIKLLNEQVNKEMQSSNLYMSMSSWCYTHSLDGAGLFLFDHAAEEYEHAKKLIIFLNENNVPVQLTSISAPEHKFEGLTQIFQKAYEHEQHISESINNIVDHAIKSKDHATFNFLQWYVAEQHEEEVLFKDILDKIELIGNENHGLYLADQYVKGIAKSRKS

SEQ ID NO: 4703 - protein, 1379 aa, Artificial Sequence
  SARS-CoV-2/Australia/VIC01/2020__EPI_ISL_406844 spike protein (1-1211)(K986P_V987P) Ferritin construct
MFVFLVLLPLVSSQCVNLTTRTQLPPAYTNSFTRGVYYPDKVFRSSVLHSTQDLFLPFFSNVTWFHAIHVSGTNGTKRFDNPVLPFNDGVYFASTEKSNIIRGWIFGTTLDSKTQSLLIVNNATNVVIKVCEFQFCNDPFLGVYYHKNNKSWMESEFRVYSSANNCTFEYVSQPFLMDLEGKQGNFKNLREFVFKNIDGYFKIYSKHTPINLVRDLPQGFSALEPLVDLPIGINITRFQTLLALHRRYLTPGDSSSGWTAGAAAYYVGYLQPRTFLLKYNENGTITDAVDCALDPLSETKCTLKSFTVEKGIYQTSNFRVQPTESIVRFPNITNLCPFGEVFNATRFASVYAWNRKRISNCVADYSVLYNSASFSTFKCYGVSPTKLNDLCFTNVYADSFVIRGDEVRQIAPGQTGKIADYNYKLPDDFTGCVIAWNSNNLDSKVGGNYNYLYRLFRKSNLKPFERDISTEIYQAGSTPCNGVEGFNCYFPLQSYGFQPTNGVGYQPYRVVVLSFELLHAPATVCGPKKSTNLVKNKCVNFNFNGLTGTGVLTESNKKFLPFQQFGRDIADTTDAVRDPQTLEILDITPCSFGGVSVITPGTNTSNQVAVLYQDVNCTEVPVAIHADQLTPTWRVYSTGSNVFQTRAGCLIGAEHVNNSYECDIPIGAGICASYQTQTNSPRRARSVASQSIIAYTMSLGAENSVAYSNNSIAIPTNFTISVTTEILPVSMTKTSVDCTMYICGDSTECSNLLLQYGSFCTQLNRALTGIAVEQDKNTQEVFAQVKQIYKTPPIKDFGGFNFSQILPDPSKPSKRSFIEDLLFNKVTLADAGFIKQYGDCLGDIAARDLICAQKFNGLTVLPPLLTDEMIAQYTSALLAGTITSGWTFGAGAALQIPFAMQMAYRFNGIGVTQNVLYENQKLIANQFNSAIGKIQDSLSSTASALGKLQDVVNQNAQALNTLVKQLSSNFGAISSVLNDILSRLDPPEAEVQIDRLITGRLQSLQTYVTQQLIRAAEIRASANLAATKMSECVLGQSKRVDFCGKGYHLMSFPQSAPHGVVFLHVTYVPAQEKNFTTAPAICHDGKAHFPREGVFVSNGTHWFVTQRNFYEPQIITTDNTFVSGNCDVVIGIVNNTVYDPLQPELDSFKEELDKYFKNHTSPDVDLGDISGINASVVNIQKEIDRLNEVAKNLNESLIDLQELGKYEQYIKGGGGSDIIKLLNEQVNKEMQSSNLYMSMSSWCYTHSLDGAGLFLFDHAAEEYEHAKKLIIFLNENNVPVQLTSISAPEHKFEGLTQIFQKAYEHEQHISESINNIVDHAIKSKDHATFNFLQWYVAEQHEEEVLFKDILDKIELIGNENHGLYLADQYVKGIAKSRKS

SEQ ID NO: 4704 - protein, 1379 aa, Artificial Sequence
  SARS-CoV-2/Germany/BavPat1/2020__EPI_ISL_406862 spike protein (1-1211)(K986P_V987P) Ferritin construct
MFVFLVLLPLVSSQCVNLTTRTQLPPAYTNSFTRGVYYPDKVFRSSVLHSTQDLFLPFFSNVTWFHAIHVSGTNGTKRFDNPVLPFNDGVYFASTEKSNIIRGWIFGTTLDSKTQSLLIVNNATNVVIKVCEFQFCNDPFLGVYYHKNNKSWMESEFRVYSSANNCTFEYVSQPFLMDLEGKQGNFKNLREFVFKNIDGYFKIYSKHTPINLVRDLPQGFSALEPLVDLPIGINITRFQTLLALHRSYLTPGDSSSGWTAGAAAYYVGYLQPRTFLLKYNENGTITDAVDCALDPLSETKCTLKSFTVEKGIYQTSNFRVQPTESIVRFPNITNLCPFGEVFNATRFASVYAWNRKRISNCVADYSVLYNSASFSTFKCYGVSPTKLNDLCFTNVYADSFVIRGDEVRQIAPGQTGKIADYNYKLPDDFTGCVIAWNSNNLDSKVGGNYNYLYRLFRKSNLKPFERDISTEIYQAGSTPCNGVEGFNCYFPLQSYGFQPTNGVGYQPYRVVVLSFELLHAPATVCGPKKSTNLVKNKCVNFNFNGLTGTGVLTESNKKFLPFQQFGRDIADTTDAVRDPQTLEILDITPCSFGGVSVITPGTNTSNQVAVLYQGVNCTEVPVAIHADQLTPTWRVYSTGSNVFQTRAGCLIGAEHVNNSYECDIPIGAGICASYQTQTNSPRRARSVASQSIIAYTMSLGAENSVAYSNNSIAIPTNFTISVTTEILPVSMTKTSVDCTMYICGDSTECSNLLLQYGSFCTQLNRALTGIAVEQDKNTQEVFAQVKQIYKTPPIKDFGGFNFSQILPDPSKPSKRSFIEDLLFNKVTLADAGFIKQYGDCLGDIAARDLICAQKFNGLTVLPPLLTDEMIAQYTSALLAGTITSGWTFGAGAALQIPFAMQMAYRFNGIGVTQNVLYENQKLIANQFNSAIGKIQDSLSSTASALGKLQDVVNQNAQALNTLVKQLSSNFGAISSVLNDILSRLDPPEAEVQIDRLITGRLQSLQTYVTQQLIRAAEIRASANLAATKMSECVLGQSKRVDFCGKGYHLMSFPQSAPHGVVFLHVTYVPAQEKNFTTAPAICHDGKAHFPREGVFVSNGTHWFVTQRNFYEPQIITTDNTFVSGNCDVVIGIVNNTVYDPLQPELDSFKEELDKYFKNHTSPDVDLGDISGINASVVNIQKEIDRLNEVAKNLNESLIDLQELGKYEQYIKGGGGSDIIKLLNEQVNKEMQSSNLYMSMSSWCYTHSLDGAGLFLFDHAAEEYEHAKKLIIFLNENNVPVQLTSISAPEHKFEGLTQIFQKAYEHEQHISESINNIVDHAIKSKDHATFNFLQWYVAEQHEEEVLFKDILDKIELIGNENHGLYLADQYVKGIAKSRKS

SEQ ID NO: 4705 - protein, 1379 aa, Artificial Sequence
  SARS-CoV-2/Wuhan/HBCDC-HB-02/2020__EPI_ISL_412978 spike protein (1-1211)(K986P_V987P) Ferritin construct
MFVFLVLLPLVSSQCVNLTTRTQLPPAYTNSFTRGVYYPDKVFRSSVLHSTQDLFLPFFSNVTWFHAIHVSGTNGTKRFDNPVLPFNDGVYFASTEKSNIIRGWIFGTTLDSKTQSLLIVNNATNVVIKVCEFQFCNDPFLGVYYHKNNKSWMESEFRVYSSANNCTFEYVSQPFLMDLEGKQGNFKNLREFVFKNIDGYFKIYSKHTPINLVRDLPQGFSALEPLVDLPIGINITRFQTLLALHRSYLTPGDSSSGWTAGAAAYYVGYLQPRTFLLKYNENGTITDAVDCALDPLSETKCTLKSFTVEKGIYQTSNFRVQPTESIVRFPNITNLCPFGEVFNATRFASVYAWNRKRISNCVADYSVLYNSASFSTFKCYGVSPTKLNDLCFTNVYADSFVIRGDEVRQIAPGQTGKIADYNYKLPDDFTGCVIAWNSNNLDSKVGGNYNYLYRLFRKSNLKPFERDISTEIYQAGSTPCNGVEGFNCYFPLQSYGFQPTNGVGYQPYRVVVLSFELLHAPATVCGPKKSTNLVKNKCVNFNFNGLTGTGVLTESNKKFLPFQQFGRDIADTTDAVRDPQTLEILDITPCSFGGVSVITPGTNTSNQVAVLYQDVNCTEVPVAIHADQLTPTWRVYSTGSNVFQTRAGCLIGAEHVNNSYECDIPIGAGICASYQTQTNSPRRARSVASQSIIAYTMSLGAENSVAYSNNSIAIPTNFTISVTTEILPVSMTKTSVDCTMYICGDSTECSNFLLQYGSFCTQLNRALTGIAVEQDKNTQEVFAQVKQIYKTPPIKDFGGFNFSQILPDPSKPSKRSFIEDLLFNKVTLADAGFIKQYGDCLGDIAARDLICAQKFNGLTVLPPLLTDEMIAQYTSALLAGTITSGWTFGAGAALQIPFAMQMAYRFNGIGVTQNVLYENQKLIANQFNSAIGKIQDSLSSTASALGKLQDVVNQNAQALNTLVKQLSSNFGAISSVLNDILSRLDPPEAEVQIDRLITGRLQSLQTYVTQQLIRAAEIRASANLAATKMSECVLGQSKRVDFCGKGYHLMSFPQSAPHGVVFLHVTYVPAQEKNFTTAPAICHDGKAHFPREGVFVSNGTHWFVTQRNFYEPQIITTDNTFVSGNCDVVIGIVNNTVYDPLQPELDSFKEELDKYFKNHTSPDVDLGDISGINASVVNIQKEIDRLNEVAKNLNESLIDLQELGKYEQYIKGGGGSDIIKLLNEQVNKEMQSSNLYMSMSSWCYTHSLDGAGLFLFDHAAEEYEHAKKLIIFLNENNVPVQLTSISAPEHKFEGLTQIFQKAYEHEQHISESINNIVDHAIKSKDHATFNFLQWYVAEQHEEEVLFKDILDKIELIGNENHGLYLADQYVKGIAKSRKS

SEQ ID NO: 4706 - protein, 1379 aa, Artificial Sequence
  SARS-CoV-2/Australia/QLD02/2020__EPI_ISL_407896 spike protein (1-1211)(K986P_V987P) Ferritin construct
MFVFLVLLPLVSSQCVNLTTRTQLPPAYTNSFTRGVYYPDKVFRSSVLHSTQDLFLPFFSNVTWFHAIHVSGTNGTKRFDNPVLPFNDGVYFASTEKSNIIRGWIFGTTLDSKTQSLLIVNNATNVVIKVCEFQFCNDPFLGVYYHKNNKSWMESEFRVYSSANNCTFEYVSQPFLMDLEGKQGNFKNLREFVFKNIDGYFKIYSKHTPINLVRDLPQGFSALEPLVDLPIGINITRFQTLLALHRSYLTPGDSSSGWTAGAAAYYVGYLQPRTFLLKYNENGTITDAVDCALDPLSETKCTLKSFTVEKGIYQTSNFRVQPTESIVRFPNITNLCPFGEVFNATRFASVYAWNRKRISNCVADYSVLYNSASFSTFKCYGVSPTKLNDLCFTNVYADSFVIRGDEVRQIAPGQTGKIADYNYKLPDDFTGCVIAWNSNNLDSKVGGNYNYLYRLFRKSNLKPFERDISTEIYQAGSTPCNGVEGFNCYFPLQSYGFQPTNGVGYQPYRVVVLSFELLHAPATVCGPKKSTNLVKNKCVNFNFNGLTGTGVLTESNKKFLPFQQFGRDIADTTDAVRDPQTLEILDITPCSFGGVSVITPGTNTSNQVAVLYQDVNCTEVPVAIHADQLTPTWRVYSTGSNVFQTRAGCLIGAEHVNNSYECDIPIGAGICASYQTQTNSPRRARSVASQSIIAYTMSLGAENSVAYSNNSIAIPTNFTISVTTEILPVSMTKTSVDCTMYICGDSTECSNLLLQYGSFCTQLNRALTGIAVEQDKNTQEVFAQVKQIYKTPPIKDFGGFNFSQILPDPSKPSKRSFIEDLLFNKVTLADAGFIKQYGDCLGDIAARDLICAQKFNGLTVLPPLLTDEMIAQYTSALLAGTITSGWTFGAGAALQIPFAMQMAYRFNGIGVTQNVLYENQKLIANQFNSAIGKIQDSLSSTASALGKLQDVVNQNAQALNTLVKQLSSNFGAISSVLNDILSRLDPPEAEVQIDRLITGRLQSLQTYVTQQLIRAAEIRASANLAATKMSECVLGQSKRVDFCGKGYHLMSFPQSAPHGVVFLHVTYVPAQEKNFTTAPAICHDGKAHFPREGVFVSNGTHWFVTQRNFYEPQIITTDNTFVSGNCDVVIGIVNNTVYDPLQLELDSFKEELDKYFKNHTSPDVDLGDISGINASVVNIQKEIDRLNEVAKNLNESLIDLQELGKYEQYIKGGGGSDIIKLLNEQVNKEMQSSNLYMSMSSWCYTHSLDGAGLFLFDHAAEEYEHAKKLIIFLNENNVPVQLTSISAPEHKFEGLTQIFQKAYEHEQHISESINNIVDHAIKSKDHATFNFLQWYVAEQHEEEVLFKDILDKIELIGNENHGLYLADQYVKGIAKSRKS

SEQ ID NO: 4707 - protein, 1379 aa, Artificial Sequence
  SARS-CoV-2/India/1-31/2020__EPI_ISL_413523 spike protein (1-1211)(K986P_V987P) Ferritin construct
MFVFLVLLPLVSSQCVNLTTRTQLPPAYTNSFTRGVYYPDKVFRSSVLHSTQDLFLPFFSNVTWFHAIHVSGTNGTKRFDNPVLPFNDGVYFASTEKSNIIRGWIFGTTLDSKTQSLLIVNNATNVVIKVCEFQFCNDPFLGVYYHKNNKSWMESEFRVYSSANNCTFEYVSQPFLMDLEGKQGNFKNLREFVFKNIDGYFKIYSKHTPINLVRDLPQGFSALEPLVDLPIGINITRFQTLLALHRSYLTPGDSSSGWTAGAAAYYVGYLQPRTFLLKYNENGTITDAVDCALDPLSETKCTLKSFTVEKGIYQTSNFRVQPTESIVRFPNITNLCPFGEVFNATRFASVYAWNRKRISNCVADYSVLYNSASFSTFKCYGVSPTKLNDLCFTNVYADSFVIRGDEVRQIAPGQTGKIADYNYKLPDDFTGCVIAWNSNNLDSKVGGNYNYLYRLFRKSNLKPFERDISTEIYQAGSTPCNGVEGFNCYFPLQSYGFQPTNGVGYQPYRVVVLSFELLHAPATVCGPKKSTNLVKNKCVNFNFNGLTGTGVLTESNKKFLPFQQFGRDIADTTDAVRDPQTLEILDITPCSFGGVSVITPGTNTSNQVAVLYQDVNCTEVPVAIHADQLTPTWRVYSTGSNVFQTRAGCLIGAEHVNNSYECDIPIGAGICASYQTQTNSPRRARSVASQSIIAYTMSLGAENSVAYSNNSIAIPTNFTISVTTEILPVSMTKTSVDCTMYICGDSTECSNLLLQYGSFCTQLNRALTGIAVEQDKNTQEVFAQVKQIYKTPPIKDFGGFNFSQILPDPSKPSKRSFIEDLLFNKVTLADAGFIKQYGDCLGDIAARDLICAQKFNGLTVLPPLLTDEMIAQYTSALLAGTITSGWTFGAGAALQIPFAMQMAYRFNGIGVTQNVLYENQKLIANQFNSVIGKIQDSLSSTASALGKLQDVVNQNAQALNTLVKQLSSNFGAISSVLNDILSRLDPPEAEVQIDRLITGRLQSLQTYVTQQLIRAAEIRASANLAATKMSECVLGQSKRVDFCGKGYHLMSFPQSAPHGVVFLHVTYVPAQEKNFTTAPAICHDGKAHFPREGVFVSNGTHWFVTQRNFYEPQIITTDNTFVSGNCDVVIGIVNNTVYDPLQPELDSFKEELDKYFKNHTSPDVDLGDISGINASVVNIQKEIDRLNEVAKNLNESLIDLQELGKYEQYIKGGGGSDIIKLLNEQVNKEMQSSNLYMSMSSWCYTHSLDGAGLFLFDHAAEEYEHAKKLIIFLNENNVPVQLTSISAPEHKFEGLTQIFQKAYEHEQHISESINNIVDHAIKSKDHATFNFLQWYVAEQHEEEVLFKDILDKIELIGNENHGLYLADQYVKGIAKSRKS

SEQ ID NO: 4708 - protein, 1379 aa, Artificial Sequence
  SARS-CoV-2/Guangdong/GD2020087-P0008/2020__EPI_ISL_413863 spike protein (1-1211)(K986P_V987P) Ferritin construct
MFVFLVLLPLVSSQCVNLTTRTQLPPAYTNSFTRGVYYPDKVFRSSVLHSTQDLFLPFFSNVTWFHAIHVSGTNGTKRFDNPVLPFNDGVYFASTEKSNIIRGWIFGTTLDSKTQSLLIVNNATNVVIKVCEFQFCNDPFLGVYYHKNNKSWMESEFRVYSSANNCTFEYVSQPFLMDLEGKQGNFKNLREFVFKNIDGYFKIYSKHTPINLVRDLPQGFSALEPLVDLPIGINITRFQTLLALHRSYLTPGDSSSGWTAGAAAYYVGYLQPRTFLLKYNENGTITDAVDCALDPLSETKCTLKSFTVEKGIYQTSNFRVQPTESIVRFPNITNLCPFGEVFNATRFASVYAWNRKRISNCVADYSVLYNSASFSTFKCYGVSPTKLNDLCFTNVYADSFVIRGDEVREIAPGQTGKIADYNYKLPDDFTGCVIAWNSNNLDSKVGGNYNYLYRLFRKSNLKPFERDISTEIYQAGSTPCNGVEGFNCYFPLQSYGFQPTNGVGYQPYRVVVLSFELLHAPATVCGPKKSTNLVKNKCVNFNFNGLTGTGVLTESNKKFLPFQQFGRDIADTTDAVRDPQTLEILDITPCSFGGVSVITPGTNTSNQVAVLYQDVNCTEVPVAIHADQLTPTWRVYSTGSNVFQTRAGCLIGAEHVNNSYECDIPIGAGICASYQTQTNSPRRARSVASQSIIAYTMSLGAENSVAYSNNSIAIPTNFTISVTTEILPVSMTKTSVDCTMYICGDSTECSNLLLQYGSFCTQLNRALTGIAVEQDKNTQEVFAQVKQIYKTPPIKDFGGFNFSQILPDPSKPSKRSFIEDLLFNKVTLADAGFIKQYGDCLGDIAARDLICAQKFNGLTVLPPLLTDEMIAQYTSALLAGTITSGWTFGAGAALQIPFAMQMAYRFNGIGVTQNVLYENQKLIANQFNSAIGKIQDSLSSTASALGKLQDVVNQNAQALNTLVKQLSSNFGAISSVLNDILSRLDPPEAEVQIDRLITGRLQSLQTYVTQQLIRAAEIRASANLAATKMSECVLGQSKRVDFCGKGYHLMSFPQSAPHGVVFLHVTYVPAQEKNFTTAPAICHDGKAHFPREGVFVSNGTHWFVTQRNFYEPQIITTDNTFVSGNCDVVIGIVNNTVYDPLQPELDSFKEELDKYFKNHTSPDVDLGDISGINASVVNIQKEIDRLNEVAKNLNESLIDLQELGKYEQYIKGGGGSDIIKLLNEQVNKEMQSSNLYMSMSSWCYTHSLDGAGLFLFDHAAEEYEHAKKLIIFLNENNVPVQLTSISAPEHKFEGLTQIFQKAYEHEQHISESINNIVDHAIKSKDHATFNFLQWYVAEQHEEEVLFKDILDKIELIGNENHGLYLADQYVKGIAKSRKS

SEQ ID NO: 4709 - protein, 1379 aa, Artificial Sequence
  SARS-CoV-2/Sweden/01/2020__EPI_ISL_411951 spike protein (1-1211)(K986P_V987P) Ferritin construct
MFVFLVLLPLVSSQCVNLTTRTQLPPAYTNSFTRGVYYPDKVFRSSVLHSTQDLFLPFFSNVTWFHAIHVSGTNGTKRFDNPVLPFNDGVYFASTEKSNIIRGWIFGTTLDSKTQSLLIVNNATNVVIKVCEFQFCNDPFLGVYYHKNNKSWMESEFRVYSSANNCTFEYVSQPFLMDLEGKQGNFKNLREFVFKNIDGYFKIYSKHTPINLVRDLPQGFSALEPLVDLPIGINITRFQTLLALHRSYLTPGDSSSGWTAGAAAYYVGYLQPRTFLLKYNENGTITDAVDCALDPLSETKCTLKSFTVEKGIYQTSNFRVQPTESIVRFPNITNLCPFGEVFNATRFASVYAWNRKRISNCVADYSVLYNSASFSTFKCYGVSPTKLNDLCFTNVYADSFVIRGDEVRQIAPGQTGKIADYNYKLPDDFTGCVIAWNSNNLDSKVGGNYNYLYRLFRKSNLKPFERDISTEIYQAGSTPCNGVEGFNCYFPLQSYGFQPTNGVGYQPYRVVVLSFELLHAPATVCGPKKSTNLVKNKCVNFNFNGLTGTGVLTESNKKFLPFQQFGRDIADTTDAVRDPQTLEILDITPCSFGGVSVITPGTNTSNQVAVLYQDVNCTEVPVAIHADQLTPTWRVYSTGSNVFQTRAGCLIGAEHVNNSYECDIPIGAGICASYQTQTNSPRRARSVASQSIIAYTMSLGAENSVAYSNNSIAIPTNFTISVTTEILPVSMTKTSVDCTMYICGDSTECSNLLLQYGSFCTQLNRALTGIAVEQDKNTQEVFAQVKQIYKTPPIKDCGGFNFSQILPDPSKPSKRSFIEDLLFNKVTLADAGFIKQYGDCLGDIAARDLICAQKFNGLTVLPPLLTDEMIAQYTSALLAGTITSGWTFGAGAALQIPFAMQMAYRFNGIGVTQNVLYENQKLIANQFNSAIGKIQDSLSSTASALGKLQDVVNQNAQALNTLVKQLSSNFGAISSVLNDILSRLDPPEAEVQIDRLITGRLQSLQTYVTQQLIRAAEIRASANLAATKMSECVLGQSKRVDFCGKGYHLMSFPQSAPHGVVFLHVTYVPAQEKNFTTAPAICHDGKAHFPREGVFVSNGTHWFVTQRNFYEPQIITTDNTFVSGNCDVVIGIVNNTVYDPLQPELDSFKEELDKYFKNHTSPDVDLGDISGINASVVNIQKEIDRLNEVAKNLNESLIDLQELGKYEQYIKGGGGSDIIKLLNEQVNKEMQSSNLYMSMSSWCYTHSLDGAGLFLFDHAAEEYEHAKKLIIFLNENNVPVQLTSISAPEHKFEGLTQIFQKAYEHEQHISESINNIVDHAIKSKDHATFNFLQWYVAEQHEEEVLFKDILDKIELIGNENHGLYLADQYVKGIAKSRKS

SEQ ID NO: 4710 - protein, 1379 aa, Artificial Sequence
  SARS-CoV-2/Tianmen/HBCDC-HB-07/2020__EPI_ISL_412983 spike protein (1-1211)(K986P_V987P) Ferritin construct
MFVFLVLLPLVSSQCVNLTTRTQLPPAYTNSFTRGVYYPDKVFRSSVLHSTQDLFLPFFSNVTWFHAIHVSGTNGTKRFDNPVLPFNDGVYFASTEKSNIIRGWIFGTTLDSKTQSLLIVNNATNVVIKVCEFQFCNDPFLGVYYHKNNKSWMESEFRVYSSANNCTFEYVSQPFLMDLEGKQGNFKNLREFVFKNIDGYFKIYSKHTPINLVRDLPQGFSALEPLVDLPIGINITRFQTLLALHRSYLTPGDSSSGWTAGAAAYYVGYLQPRTFLLKYNENGTITDAVDCALDPLSETKCTLKSFTVEKGIYQTSNFRVQPTESIVRFPNITNLCPFGEVFNATRFASVYAWNRKRISNCVADYSVLYNSASFSTFKCYGVSPTKLNDLCFTNVYADSFVIRGDEVRQIAPGQTGKIADYNYKLPDDFTGCVIAWNSNNLDSKVGGNYNYLYRLFRKSNLKPFERDISTEIYQAGSTPCNGVEGFNCYFPLQSYGFQPTNGVGYQPYRVVVLSFELLHAPATVCGPKKSTNLVKNKCVNFNFNGLTGTGVLTESNKKFLPFQQFGRDIADTTDAVRDPQTLEILDITPCSFGGVSVITPGTNTSNQVAVLYQDLNCTEVPVAIHADQLTPTWRVYSTGSNVFQTRAGCLIGAEHVNNSYECDIPIGAGICASYQTQTNSPRRARSVASQSIIAYTMSLGAENSVAYSNNSIAIPTNFTISVTTEILPVSMTKTSVDCTMYICGDSTECSNLLLQYGSFCTQLNRALTGIAVEQDKNTQEVFAQVKQIYKTPPIKDFGGFNFSQILPDPSKPSKRSFIEDLLFNKVTLADAGFIKQYGDCLGDIAARDLICAQKFNGLTVLPPLLTDEMIAQYTSALLAGTITSGWTFGAGAALQIPFAMQMAYRFNGIGVTQNVLYENQKLIANQFNSAIGKIQDSLSSTASALGKLQDVVNQNAQALNTLVKQLSSNFGAISSVLNDILSRLDPPEAEVQIDRLITGRLQSLQTYVTQQLIRAAEIRASANLAATKMSECVLGQSKRVDFCGKGYHLMSFPQSAPHGVVFLHVTYVPAQEKNFTTAPAICHDGKAHFPREGVFVSNGTHWFVTQRNFYEPQIITTDNTFVSGNCDVVIGIVNNTVYDPLQPELDSFKEELDKYFKNHTSPDVDLGDISGINASVVNIQKEIDRLNEVAKNLNESLIDLQELGKYEQYIKGGGGSDIIKLLNEQVNKEMQSSNLYMSMSSWCYTHSLDGAGLFLFDHAAEEYEHAKKLIIFLNENNVPVQLTSISAPEHKFEGLTQIFQKAYEHEQHISESINNIVDHAIKSKDHATFNFLQWYVAEQHEEEVLFKDILDKIELIGNENHGLYLADQYVKGIAKSRKS

SEQ ID NO: 4711 - protein, 1379 aa, Artificial Sequence
  SARS-CoV-2/Hong Kong/case42_VM20002493/2020__EPI_ISL_414527 spike protein (1-1211)(K986P_V987P) Ferritin construct
MFVFLVLLPLVSSQCVNLTTRTQLPPAYTNSFTRGVYYPDKVFRSSVLHSTQDLFLPFFSNVTWFHAIHVSGTNGTKRFDNPVLPFNDGVYFASTEKSNIIRGWIFGTTLDSKTQSLLIVNNATNVVIKVCEFQFCNDPFLGVYYHKNNKSWMESEFRVYSSANNCTFEYVSQPFLMDLEGKQGNFKNLREFVFKNIDGYFKIYSKHTPINLVRDLPQGFSALEPLVDLPIGINITRFQTLLALHRSYLTPGDSSSGWTAGAAAYYVGYLQPRTFLLKYNENGTITDAVDCALDPLSETKCTLKSFTVEKGIYQTSNFRVQPTESIVRFPNITNLCPFGEVFNATRFASVYAWNRKRISNCVADYSVLYNSASFSTFKCYGVSPTKLNDLCFTNVYADSFVIRGDEVRQIAPGQTGKIADYNYKLPDDFTGCVIAWNSNNLDSKVGGNYNYLYRLFRKSNLKPFERDISTEIYQAGSTPCNGVEGFNCYFPLQSYGFQPTNGVGYQPYRVVVLSFELLHAPATVCGPKKSTNLVKNKCVNFNFNGLTGTGVLTESNKKFLPFQQFGRDIADTTDAVRDPQTLEILDITPCSFGGVSVITPGTNTSNQVAVLYQDVNCTEVPVAIHADQLTPTWRVYSTGSNVFQTRAGCLIGAEHVNNSYECDIPIGAGICASYQTQTNSPRRARSVASQSIIAYTMSLGAENSVAYSNNSIAIPTNFAISVTTEILPVSMTKTSVDCTMYICGDSTECSNLLLQYGSFCTQLNRALTGIAVEQDKNTQEVFAQVKQIYKTPPIKDFGGFNFSQILPDPSKPSKRSFIEDLLFNKVTLADAGFIKQYGDCLGDIAARDLICAQKFNGLTVLPPLLTDEMIAQYTSALLAGTITSGWTFGAGAALQIPFAMQMAYRFNGIGVTQNVLYENQKLIANQFNSAIGKIQDSLSSTASALGKLQDVVNQNAQALNTLVKQLSSNFGAISSVLNDILSRLDPPEAEVQIDRLITGRLQSLQTYVTQQLIRAAEIRASANLAATKMSECVLGQSKRVDFCGKGYHLMSFPQSAPHGVVFLHVTYVPAQEKNFTTAPAICHDGKAHFPREGVFVSNGTHWFVTQRNFYEPQIITTDNTFVSGNCDVVIGIVNNTVYDPLQPELDSFKEELDKYFKNHTSPDVDLGDISGINASVVNIQKEIDRLNEVAKNLNESLIDLQELGKYEQYIKGGGGSDIIKLLNEQVNKEMQSSNLYMSMSSWCYTHSLDGAGLFLFDHAAEEYEHAKKLIIFLNENNVPVQLTSISAPEHKFEGLTQIFQKAYEHEQHISESINNIVDHAIKSKDHATFNFLQWYVAEQHEEEVLFKDILDKIELIGNENHGLYLADQYVKGIAKSRKS

SEQ ID NO: 4712 - protein, 1379 aa, Artificial Sequence
  SARS-CoV-2/USA/CruiseA-23/2020__EPI_ISL_414482 spike protein (1-1211)(K986P_V987P) Ferritin construct
MFVFLVLLPLVSSQCVNLTTRTQLPPAYTNSFTRGVYYPDKVFRSSVLHSTQDLFLPFFSNVTWFHAIHVSGTNGTKRFDNPVLPFNDGVYFASTEKSNIIRGWIFGTTLDSKTQSLLIVNNATNVVIKVCEFQFCNDPFLGVYYHKNNKSWMESEFRVYSSANNCTFEYVSQPFLMDLEVKQGNFKNLREFVFKNIDGYFKIYSKHTPINLVRDLPQGFSALEPLVDLPIGINITRFQTLLALHRSYLTPGDSSSGWTAGAAAYYVGYLQPRTFLLKYNENGTITDAVDCALDPLSETKCTLKSFTVEKGIYQTSNFRVQPTESIVRFPNITNLCPFGEVFNATRFASVYAWNRKRISNCVADYSVLYNSASFSTFKCYGVSPTKLNDLCFTNVYADSFVIRGDEVRQIAPGQTGKIADYNYKLPDDFTGCVIAWNSNNLDSKVGGNYNYLYRLFRKSNLKPFERDISTEIYQAGSTPCNGVEGFNCYFPLQSYGFQPTNGVGYQPYRVVVLSFELLHAPATVCGPKKSTNLVKNKCVNFNFNGLTGTGVLTESNKKFLPFQQFGRDIADTTDAVRDPQTLEILDITPCSFGGVSVITPGTNTSNQVAVLYQDVNCTEVPVAIHADQLTPTWRVYSTGSNVFQTRAGCLIGAEHVNNSYECDIPIGAGICASYQTQTNSPRRARSVASQSIIAYTMSLGAENSVAYSNNSIAIPTNFTISVTTEILPVSMTKTSVDCTMYICGDSTECSNLLLQYGSFCTQLNRALTGIAVEQDKNTQEVFAQVKQIYKTPPIKDFGGFNFSQILPDPSKPSKRSFIEDLLFNKVTLADAGFIKQYGDCLGDIAARDLICAQKFNGLTVLPPLLTDEMIAQYTSALLAGTITSGWTFGAGAALQIPFAMQMAYRFNGIGVTQNVLYENQKLIANQFNSAIGKIQDSLSSTASALGKLQDVVNQNAQALNTLVKQLSSNFGAISSVLNDILSRLDPPEAEVQIDRLITGRLQSLQTYVTQQLIRAAEIRASANLAATKMSECVLGQSKRVDFCGKGYHLMSFPQSAPHGVVFLHVTYVPAQEKNFTTAPAICHDGKAHFPREGVFVSNGTHWFVTQRNFYEPQIITTDNTFVSGNCDVVIGIVNNTVYDPLQPELDSFKEELDKYFKNHTSPDVDLGDISGINASVVNIQKEIDRLNEVAKNLNESLIDLQELGKYEQYIKGGGGSDIIKLLNEQVNKEMQSSNLYMSMSSWCYTHSLDGAGLFLFDHAAEEYEHAKKLIIFLNENNVPVQLTSISAPEHKFEGLTQIFQKAYEHEQHISESINNIVDHAIKSKDHATFNFLQWYVAEQHEEEVLFKDILDKIELIGNENHGLYLADQYVKGIAKSRKS

SEQ ID NO: 4713 - protein, 1379 aa, Artificial Sequence
  SARS-CoV-2/Hong Kong/case85_VM20002868/2020__EPI_ISL_414519 spike protein (1-1211)(K986P_V987P) Ferritin construct
MFVFLVLVPLVSSQCVNLTTRTQLPPAYTNSFTRGVYYPDKVFRSSVLHSTQDLFLPFFSNVTWFHAIHVSGTNGTKRFDNPVLPFNDGVYFASTEKSNIIRGWIFGTTLDSKTQSLLIVNNATNVVIKVCEFQFCNDPFLGVYYHKNNKSWMESEFRVYSSANNCTFEYVSQPFLMDLEGKQGNFKNLREFVFKNIDGYFKIYSKHTPINLVRDLPQGFSALEPLVDLPIGINITRFQTLLALHRSYLTPGDSSSGWTAGAAAYYVGYLQPRTFLLKYNENGTITDAVDCALDPLSETKCTLKSFTVEKGIYQTSNFRVQPTESIVRFPNITNLCPFGEVFNATRFASVYAWNRKRISNCVADYSVLYNSASFSTFKCYGVSPTKLNDLCFTNVYADSFVIRGDEVRQIAPGQTGKIADYNYKLPDDFTGCVIAWNSNNLDSKVGGNYNYLYRLFRKSNLKPFERDISTEIYQAGSTPCNGVEGFNCYFPLQSYGFQPTNGVGYQPYRVVVLSFELLHAPATVCGPKKSTNLVKNKCVNFNFNGLTGTGVLTESNKKFLPFQQFGRDIADTTDAVRDPQTLEILDITPCSFGGVSVITPGTNTSNQVAVLYQDVNCTEVPVAIHADQLTPTWRVYSTGSNVFQTRAGCLIGAEHVNNSYECDIPIGAGICASYQTQTNSPRRARSVASQSIIAYTMSLGAENSVAYSNNSIAIPTNFTISVTTEILPVSMTKTSVDCTMYICGDSTECSNLLLQYGSFCTQLNRALTGIAVEQDKNTQEVFAQVKQIYKTPPIKDFGGFNFSQILPDPSKPSKRSFIEDLLFNKVTLADAGFIKQYGDCLGDIAARDLICAQKFNGLTVLPPLLTDEMIAQYTSALLAGTITSGWTFGAGAALQIPFAMQMAYRFNGIGVTQNVLYENQKLIANQFNSAIGKIQDSLSSTASALGKLQDVVNQNAQALNTLVKQLSSNFGAISSVLNDILSRLDPPEAEVQIDRLITGRLQSLQTYVTQQLIRAAEIRASANLAATKMSECVLGQSKRVDFCGKGYHLMSFPQSAPHGVVFLHVTYVPAQEKNFTTAPAICHDGKAHFPREGVFVSNGTHWFVTQRNFYEPQIITTDNTFVSGNCDVVIGIVNNTVYDPLQPELDSFKEELDKYFKNHTSPDVDLGDISGINASVVNIQKEIDRLNEVAKNLNESLIDLQELGKYEQYIKGGGGSDIIKLLNEQVNKEMQSSNLYMSMSSWCYTHSLDGAGLFLFDHAAEEYEHAKKLIIFLNENNVPVQLTSISAPEHKFEGLTQIFQKAYEHEQHISESINNIVDHAIKSKDHATFNFLQWYVAEQHEEEVLFKDILDKIELIGNENHGLYLADQYVKGIAKSRKS

SEQ ID NO: 4714 - protein, 1379 aa, Artificial Sequence; identical to SEQ ID NO: 4704
  SARS-CoV-2/England/200990660/2020__EPI_ISL_414523 spike protein (1-1211)(K986P_V987P) Ferritin construct

SEQ ID NO: 4715 - protein, 1379 aa, Artificial Sequence
  SARS-CoV-2/Australia/NSW09/2020__EPI_ISL_413595 spike protein (1-1211)(K986P_V987P) Ferritin construct
MFVFLVLLPLVSSQCVNLTTRTQLPPAYTNSFTRGVYYPDKVFRSSVLHSTQDLFLPFFSNVTWFHAIHVSGTNGTKRFDNPVLPFNDGVYFASTEKSNIIRGWIFGTTLDSKTQSLLIVNNATNVVIKVCEFQFCNDPFLGVYYHKNNKSWMESEFRVYSSANNCTFEYVSQPFLMDLEGKQGNFKNLREFVFKNIDGYFKIYSKHTPINLVRDLPQGFSALEPLVDLPIGINITRFQTLLALHRSYLTPGDSSSGWTAGAAAYYVGYLQPRTFLLKYNENGTITDAVDCALDPLSETKCTLKSFTVEKGIYQTSNFRVQPTESIVRFPNITNLCPFGEVFNATRFASVYAWNRKRISNCVADYSVLYNSASFSTFKCYGVSPTKLNDLCFTNVYADSFVIRGDEVRQIAPGQTGKIADYNYKLPDDFTGCVIAWNSNNLDSKVGGNYNYLYRLFRKSNLKPFERDISTEIYQAGSTPCNGVEGFNCYFPLQSYGFQPTNGVGYQPYRVVVLSFELLHAPATVCGPKKSTNLVKNKCVNFNFNGLTGTGVLTESNKKFLPFQQFGRDIADTTDAVRDPQTLEILDITPCSFGGVSVITPGTNTSNQVAVLYQDVNCTEVPVAIHADQLTPTWRVYSTGSNVFQTRAGCLIGAEHVNNSYECDIPIGAGICASYQTQTNSPRRARSVASQSIIAYTMSLGAENSVAYSNNSIAIPTNFTISVTTEILPVSMTKTSVDCTMYICGDSTECSNLLLQYGSFCTQLNRALTGIAVEQDKNTQEVFAQVKQIYKTPPIKDFGGFNFSQILPDPSKPSKRSFIEDLLFNKVTLADAGFIKQYGDCLGDIAARDLICAQKFNGLTVLPPLLTDEMIAQYTSALLAGTITSGWTFGAGAALQIPFAMQMAYRFNGIGVTQNVLYENQKLIANQFNSAIGKIQDSLSFTASALGKLQDVVNQNAQALNTLVKQLSSNFGAISSVLNDILSRLDPPEAEVQIDRLITGRLQSLQTYVTQQLIRAAEIRASANLAATKMSECVLGQSKRVDFCGKGYHLMSFPQSAPHGVVFLHVTYVPAQEKNFTTAPAICHDGKAHFPREGVFVSNGTHWFVTQRNFYEPQIITTDNTFVSGNCDVVIGIVNNTVYDPLQPELDSFKEELDKYFKNHTSPDVDLGDISGINASVVNIQKEIDRLNEVAKNLNESLIDLQELGKYEQYIKGGGGSDIIKLLNEQVNKEMQSSNLYMSMSSWCYTHSLDGAGLFLFDHAAEEYEHAKKLIIFLNENNVPVQLTSISAPEHKFEGLTQIFQKAYEHEQHISESINNIVDHAIKSKDHATFNFLQWYVAEQHEEEVLFKDILDKIELIGNENHGLYLADQYVKGIAKSRKS

SEQ ID NO: 4716 - protein, 1379 aa, Artificial Sequence; identical to SEQ ID NO: 4696
  SARS-CoV-2/Australia/NSW10/2020__EPI_ISL_413596 spike protein (1-1211)(K986P_V987P) Ferritin construct

SEQ ID NO: 4717 - protein, 1379 aa, Artificial Sequence
  SARS-CoV-2/Switzerland/1000477797/2020__EPI_ISL_413023 spike protein (1-1211)(K986P_V987P) Ferritin construct
MFVFLVLLPLVSSQCVNLTTRTQLPPAYTNSFTRGVYYPDKVFRSSVLHSTQDLFLPFFSNVTWFHAIHVSGTNGTKRFDNPVLPFNDGVYFASTEKSNIIRGWIFGTTLDSKTQSLLIVNNATNVVIKVCEFQFCNDPFLGVYYHKNNKSWMESEFRVYSSANNCTFEYVSQPFLMDLEGKQGNFKNLREFVFKNIDGYFNIYSKHTPINLVRDLPQGFSALEPLVDLPIGINITRFQTLLALHRSYLTPGDSSSGWTAGAAAYYVGYLQPRTFLLKYNENGTITDAVDCALDPLSETKCTLKSFTVEKGIYQTSNFRVQPTESIVRFPNITNLCPFGEVFNATRFASVYAWNRKRISNCVADYSVLYNSASFSTFKCYGVSPTKLNDLCFTNVYADSFVIRGDEVRQIAPGQTGKIADYNYKLPDDFTGCVIAWNSNNLDSKVGGNYNYLYRLFRKSNLKPFERDISTEIYQAGSTPCNGVEGFNCYFPLQSYGFQPTNGVGYQPYRVVVLSFELLHAPATVCGPKKSTNLVKNKCVNFNFNGLTGTGVLTESNKKFLPFQQFGRDIADTTDAVRDPQTLEILDITPCSFGGVSVITPGTNTSNQVAVLYQGVNCTEVPVAIHADQLTPTWRVYSTGSNVFQTRAGCLIGAEHVNNSYECDIPIGAGICASYQTQTNSPRRARSVASQSIIAYTMSLGAENSVAYSNNSIAIPTNFTISVTTEILPVSMTKTSVDCTMYICGDSTECSNLLLQYGSFCTQLNRALTGIAVEQDKNTQEVFAQVKQIYKTPPIKDFGGFNFSQILPDPSKPSKRSFIEDLLFNKVTLADAGFIKQYGDCLGDIAARDLICAQKFNGLTVLPPLLTDEMIAQYTSALLAGTITSGWTFGAGAALQIPFAMQMAYRFNGIGVTQNVLYENQKLIANQFNSAIGKIQDSLSSTASALGKLQDVVNQNAQALNTLVKQLSSNFGAISSVLNDILSRLDPPEAEVQIDRLITGRLQSLQTYVTQQLIRAAEIRASANLAATKMSECVLGQSKRVDFCGKGYHLMSFPQSAPHGVVFLHVTYVPAQEKNFTTAPAICHDGKAHFPREGVFVSNGTHWFVTQRNFYEPQIITTDNTFVSGNCDVVIGIVNNTVYDPLQPELDSFKEELDKYFKNHTSPDVDLGDISGINASVVNIQKEIDRLNEVAKNLNESLIDLQELGKYEQYIKGGGGSDIIKLLNEQVNKEMQSSNLYMSMSSWCYTHSLDGAGLFLFDHAAEEYEHAKKLIIFLNENNVPVQLTSISAPEHKFEGLTQIFQKAYEHEQHISESINNIVDHAIKSKDHATFNFLQWYVAEQHEEEVLFKDILDKIELIGNENHGLYLADQYVKGIAKSRKS

SEQ ID NO: 4718 - protein, 1379 aa, Artificial Sequence
  SARS-CoV-2/Belgium/BA-02291/2020__EPI_ISL_415159 spike protein (1-1211)(K986P_V987P) Ferritin construct
MFVFLVLLPLVSSQCVNLTTRTQLPPAYTNSFTRGVYYPDKVFRSSVLHSTQDLFLPFFSNVTWFHAIHVSGTNGTKRFDNPVLPFNDGVYFASTEKSNIIRGWIFGTTLDSKTQSLLIVNNATNVVIKVCEFQFCNDPFLGVYYHKNNKSWMESEFRVYSSANNCTFEYVSQPFLMDLEGKQGNFKNLREFVFKNIDGYFKIYSKHTPINLVRDLPQGFSALEPLVDLPIGINITRFQTLLALHRSYLTPGDSSSGWTAGAAAYYVGYLQPRTFLLKYNENGTITDAVDCALDPLSETKCTLKSFTVEKGIYQTSNFRVQPTESIVRFPNITNLCPFGEVFNATRFASVYAWNRKRISNCVADYSVLYNSASFSTFKCYGVSPTKLNDLCFTNVYADSFVIRGDEVRQIAPGQTGKIADYNYKLPDDFTGCVIAWNSNNLDSKVGGNYNYLYRLFRRSNLKPFERDISTEIYQAGSTPCNGVEGFNCYFPLQSYGFQPTNGVGYQPYRVVVLSFELLPAPATVCGPKKSTNLVKNKCVNFNFNGLTGTGVLTESNKKFLPFQQFGRDIADTTDAVRDPQTLEILDITPCSFGGVSVITPGTNTSNQVAVLYQGVNCTEVPVAIHADQLTPTWRVYSTGSNVFQTRAGCLIGAEHVNNSYECDIPIGAGICASYQTQTNSPRRARSVASQSIIAYTMSLGAENSVAYSNNSIAIPTNFTISVTTEILPVSMTKTSVDCTMYICGDSTECSNLLLQYGSFCTQLNRALTGIAVEQDKNTQEVFAQVKQIYKTPPIKDFGGFNFSQILPDPSKPSKRSFIEDLLFNKVTLADAGFIKQYGDCLGDIAARDLICAQKFNGLTVLPPLLTDEMIAQYTSALLAGTITSGWTFGAGAALQIPFAMQMAYRFNGIGVTQNVLYENQKLIANQFNSAIGKIQDSLSSAAPALGKLQDVVNQNAQALNTLVKQLSSNFGAISSVLNDILSRLDPPEAEVQIDRLITGRLQSLQTYVTQQLIRAAEIRASANLAATKMSECVLGQSKRVDFCGKGYHLMSFPQSAPHGVVFLHVTYVPAQEKNFTTAPAICHDGKAHFPREGVFVSNGTHWFVTQRNFYEPQIITTDNTFVSGNCDVVIGIVNNTVYDPLQPELDSFKEELDKYFKNHTSPDVDLGDISGINASVVNIQKEIDRLNEVAKNLNESLIDLQELGKYEQYIKGGGGSDIIKLLNEQVNKEMQSSNLYMSMSSWCYTHSLDGAGLFLFDHAAEEYEHAKKLIIFLNENNVPVQLTSISAPEHKFEGLTQIFQKAYEHEQHISESINNIVDHAIKSKDHATFNFLQWYVAEQHEEEVLFKDILDKIELIGNENHGLYLADQYVKGIAKSRKS

SEQ ID NO: 4719 - protein, 1379 aa, Artificial Sequence
  SARS-CoV-2/USA/WA8-UW5/2020__EPI_ISL_413486 spike protein (1-1211)(K986P_V987P) Ferritin construct
MFVFLVLLPLVSSQCVNLTTRTQLPPAYTNSFTRGVYYPDKVFRSSVLHSTQDLFLPFFSNVTWFHAIHVSGTNGTKRFDNPVLPFNDGVYFASTEKSNIIRGWIFGTTLDSKTQSLLIVNNATNVVIKVCEFQFCNDPFLGVYYHKNNKSWMESEFRVYSSANNCTFEYVSQPFLMDLEGKQGNFKNLREFVFKNIDGYFKIYSKHTPINLVRDLPQGFSALEPLVDLPIGINITRFQTLLALHRSYLTPGDSSSGWTAGAAAYYVGYLQPRTFLLKYNENGTITDAVDCALDPLSETKCTLKSFTVEKGIYQTSNFRVQPTESIVRFPNITNLCPFGEVFNATRFASVYAWNRKRISNCVADYSVLYNSASFSTFKCYGVSPTKLNDLCFTNVYADSFVIRGDEVRQIAPGQTGKIADYNYKLPDDFTGCVIAWNSNNLDSKVGGNYNYLYRLFRKSNLKPFERDISTEIYQAGSTPCNGVEGFNCYFPLQSYGFQPTNGVGYQPYRVVVLSFELLHAPATVCGPKKSTNLVKNKCVNFNFNGLTGTGVLTESNKKFLPFQQFGRDIADTTDAVRDPQTLEILDITPCSFGGVSVITPGTNTSNQVAVLYQDVNCTEVPVAIHADQLTPTWRVYSTGSNVFQTRAGCLIGAEYVNNSYECDIPIGAGICASYQTQTNSPRRARSVASQSIIAYTMSLGAENSVAYSNNSIAIPTNFTISVTTEILPVSMTKTSVDCTMYICGDSTECSNLLLQYGSFCTQLNRALTGIAVEQDKNTQEVFAQVKQIYKTPPIKDFGGFNFSQILPDPSKPSKRSFIEDLLFNKVTLADAGFIKQYGDCLGDIAARDLICAQKFNGLTVLPPLLTDEMIAQYTSALLAGTITSGWTFGAGAALQIPFAMQMAYRFNGIGVTQNVLYENQKLIANQFNSAIGKIQDSLSSTASALGKLQDVVNQNAQALNTLVKQLSSNFGAISSVLNDILSRLDPPEAEVQIDRLITGRLQSLQTYVTQQLIRAAEIRASANLAATKMSECVLGQSKRVDFCGKGYHLMSFPQSAPHGVVFLHVTYVPAQEKNFTTAPAICHDGKAHFPREGVFVSNGTHWFVTQRNFYEPQIITTDNTFVSGNCDVVIGIVNNTVYDPLQPELDSFKEELDKYFKNHTSPDVDLGDISGINASVVNIQKEIDRLNEVAKNLNESLIDLQELGKYEQYIKGGGGSDIIKLLNEQVNKEMQSSNLYMSMSSWCYTHSLDGAGLFLFDHAAEEYEHAKKLIIFLNENNVPVQLTSISAPEHKFEGLTQIFQKAYEHEQHISESINNIVDHAIKSKDHATFNFLQWYVAEQHEEEVLFKDILDKIELIGNENHGLYLADQYVKGIAKSRKS

SEQ ID NO: 4720 - protein, 1379 aa, Artificial Sequence
  SARS-CoV-2/England/20102000506/2020__EPI_ISL_415147 spike protein (1-1211)(K986P_V987P) Ferritin construct
MFVFLVLLPLVSSQCVNLTTRTQLPPAYTNSFTRGVYYPDKVFRSSVLHSTQDLFLPFFSNVTWFHAIHVSGTNGTKRFDNPVLPFNDGVYFASTEKSNIIRGWIFGTTLDSKTQSLLIVNNATNVVIKVCEFQFCNDPFLGVYYHKNNKSWMESEFRVYSSANNCTFEYVSQPFLMDLEGKQGNFKNLREFVFKNIDGYFKIYSKHTPINLVRDLPQGFSALEPLVDLPIGINITRFQTLLALHRSYLTPGDSSSGWTAGAAAYYVGYLQPRTFLLKYNENGTITDAVDCALDPLSETKCTLKSFTVEKGIYQTSNFRVQPTESIVRFPNITNLCPFGEVFNATRFASVYAWNRKRISNCVADYSVLYNSASFSTFKCYGVSPTKLNDLCFTNVYADSFVIRGDEVRQIAPGQTGKIADYNYKLPDDFTGCVIAWNSNNLDSKVGGNYNYLYRLFRKSNLKPFERDISTEIYQAGSTPCNGVEGFNCYFPLQSYGFQPTNGVGYQPYRVVVLSFELLHAPATVCGPKKSTNLVKNKCVNFNFNGLTGTGVLTESNKKFLPFQQFGRDIADTTDAVRDPQTLEILDITPCSFGGVSVITPGTNTSNQVAVLYQGVNCTEVPVAIHADQLTPTWRVYSTGSNVFQTRAGCLIGAEHVNNSYECDIPIGAGICASYQTQTNSPRRARSVASQSIIAYTMSLGAENSVAYSNNSIAIPTNFTISVTTEILPVSMTKTSVDCTMYICGDSTECSNLLLQYGSFCTQLNRALTGIAVEQDKNTQEVFAQVKQIYKTPPIKDFGGFNFSQILPDPSKPSKRSFIEDLLFNKVTLADAGFIKQYGYCLGDIAARDLICAQKFNGLTVLPPLLTDEMIAQYTSALLAGTITSGWTFGAGAALQIPFAMQMAYRFNGIGVTQNVLYENQKLIANQFNSAIGKIQDSLSSTASALGKLQDVVNQNAQALNTLVKQLSSNFGAISSVLNDILSRLDPPEAEVQIDRLITGRLQSLQTYVTQQLIRAAEIRASANLAATKMSECVLGQSKRVDFCGKGYHLMSFPQSAPHGVVFLHVTYVPAQEKNFTTAPAICHDGKAHFPREGVFVSNGTHWFVTQRNFYEPQIITTDNTFVSGNCDVVIGIVNNTVYDPLQPELDSFKEELDKYFKNHTSPDVDLGDISGINASVVNIQKEIDRLNEVAKNLNESLIDLQELGKYEQYIKGGGGSDIIKLLNEQVNKEMQSSNLYMSMSSWCYTHSLDGAGLFLFDHAAEEYEHAKKLIIFLNENNVPVQLTSISAPEHKFEGLTQIFQKAYEHEQHISESINNIVDHAIKSKDHATFNFLQWYVAEQHEEEVLFKDILDKIELIGNENHGLYLADQYVKGIAKSRKS

SEQ ID NO: 4721 - protein, 1379 aa, Artificial Sequence
  SARS-CoV-2/Belgium/VAG-03013/2020__EPI_ISL_415155 spike protein (1-1211)(K986P_V987P) Ferritin construct
MFVFLVLLPLVSSQCVNLTTRTQLPPAYTNSFTRGVYYPDKVFRSSVLHSTQDLFLPFFSNVTWFHAIHVSGTNGTKRFDNPVLPFNDGVYFASTEKSNIIRGWIFGTTLDSKTQSLLIVNNATNVVIKVCEFQFCNDPFLGVYYHKNNKSWMESEFRVYSSANNCTFEYVSQPFLMDLEGKQGNFKNLREFVFKNIDGYFKIYSKHTPINLVRDLPQGFSALEPLVDLPIGINITRFQTLLALHRSYLTPGDSSSGWTAGAAAYYVGYLQPRTFLLKYNENGTITDAVDCALDPLSETKCTLKSFTVEKGIYQTSNFRVQPTESIVRFPNITNLCPFGEVFNATRFASVYAWNRKRISNCVADYSVLYNSASFSTFKCYGVSPTKLNDLCFTNVYADSFVIRGDEVRQIAPGQTGKIADYNYKLPDDFTGCVIAWNSNNLDSKVGGNYNYLYRLFRKSNLKPFERDISTEIYQAGSTPCNGVEGFNCYFPLQSYGFQPTNGVGYQPYRVVVLSFELLHAPATVCGPKKSTNLVKNKCVNFNFNGLTGTGVLTESNKKFLPFQQFGRDIADTTDAVRDPQTLEILDITPCSFGGVSVITPGTNTSNQVAVLYQGVNCTEVPVAIHADQLTPTWRVYSTGSNVFQTRAGCLIGAEHVNNSYECDIPIGAGICASYQTQTNSPRRARSVASQSIIAYTMSLGAENSVAYSNNSIAIPTNFTISVTTEILPVSMTKTSVDCTMYICGDSTECSNLLLQYGSFCTQLNRALTGIAVEQDKNTQEVFAQVKQIYKTPPIKDFGGFNFSQILPDPSKPSKRSFIEDLLFNKVTLADAGFIKQYGDCLGDIAARDLICAQKFNGLTVLPPLLTDEMIAQYTSALLAGTITSGWTFGAGAALQIPFAMQMAYRFNGIGVTQNVLYENQKLIANQFNSAIGKIQDSLSSTATALGKLQDVVNQNAQALNTLVKQLSSNFGAISSVLNDILSRLDPPEAEVQIDRLITGRLQSLQTYVTQQLIRAAEIRASANLAATKMSECVLGQSKRVDFCGKGYHLMSFPQSAPHGVVFLHVTYVPAQEKNFTTAPAICHDGKAHFPREGVFVSNGTHWFVTQRNFYEPQIITTDNTFVSGNCDVVIGIVNNTVYDPLQPELDSFKEELDKYFKNHTSPDVDLGDISGINASVVNIQKEIDRLNEVAKNLNESLIDLQELGKYEQYIKGGGGSDIIKLLNEQVNKEMQSSNLYMSMSSWCYTHSLDGAGLFLFDHAAEEYEHAKKLIIFLNENNVPVQLTSISAPEHKFEGLTQIFQKAYEHEQHISESINNIVDHAIKSKDHATFNFLQWYVAEQHEEEVLFKDILDKIELIGNENHGLYLADQYVKGIAKSRKS

SEQ ID NO: 4722 - protein, 1379 aa, Artificial Sequence
  SARS-CoV-2/Belgium/BC-03016/2020__EPI_ISL_415157 spike protein (1-1211)(K986P_V987P) Ferritin construct
MFVFLVLLPLVSSQCVNLTTRTQLPPAYTNSFTRGVYYPDKVFRSSVLHSTQDLFLPFFSNVTWFHAIHVSGTNGTKRFDNPVLPFNDGVYFASTEKSNIIRGWIFGTTLDSKTQSLLIVNNATNVVIKVCEFQFCNDPFLGVYYHKNNKSWMESEFRVYSSANNCTFEYVSQPFLMDLEGKQGNFKNLREFVFKNIDGYFKIYSKHTPINLVRDLPQGFSALEPLVDLPIGINITRFQTLLALHRSYLTPGDSSSGWTAGAAAYYVGYLQPRTFLLKYNENGTITDAVDCALDPLSETKCTLKSFTVEKGIYQTSNFRVQPTESIVRFPNITNLCPFGEVFNATRFASVYAWNRKRISNCVADYSVLYNSASFSTFKCYGVSPTKLNDLCFTNVYADSFVIRGDEVRQIAPGQTGKIADYNYKLPDDFTGCVIAWNSNNLDSKVGGNYNYLYRLFRKSNLKPFERDISTEIYQAGSTPCNGVEGFNCYFPLQSYGFQPTNGVGYQPYRVVVLSFELLHAPATVCGPKKSTNLVKNKCVNFNFNGLTGTGVLTESNKKFLPFQQFGRDIADTTDAVRDPQTLEILDITPCSFGGVSVITPGTNTSNQVAVLYQGVNCTEVPVAIHADQLTPTWRVYSTGSNVFQTRAGCLIGAEHVNNSYECDIPIGAGICASYQTQTNSPRRARSVASQSIIAYTMSLGAENSVAYSNNSIAIPTNFTISVTTEILPVSMTKTSVDCTMYICGDSTECSNLLLQYGSFCTQLNRALTGIAVEQDKNTQEVFAQVKQIYKTPPIKDFGGFNFSQILPDPSKPSKRSFIEDLLFNKVTLADAGFIKQYGDCLGDIAARDLICAQKFNGLTVLPPLLTDEMIAQYTSALLAGTITSGWTFGAGAALQIPFAMQMAYRFNGIGVTQNVLYENQKLIANQFNSAIGKIQDSLSSTAPALGKLQDVVNQNAQALNTLVKQLSSNFGAISSVLNDILSRLDPPEAEVQIDRLITGRLQSLQTYVTQQLIRAAEIRASANLAATKMSECVLGQSKRVDFCGKGYHLMSFPQSAPHGVVFLHVTYVPAQEKNFTTAPAICHDGKAHFPREGVFVSNGTHWFVTQRNFYEPQIITTDNTFVSGNCDVVIGIVNNTVYDPLQPELDSFKEELDKYFKNHTSPDVDLGDISGINASVVNIQKEIDRLNEVAKNLNESLIDLQELGKYEQYIKGGGGSDIIKLLNEQVNKEMQSSNLYMSMSSWCYTHSLDGAGLFLFDHAAEEYEHAKKLIIFLNENNVPVQLTSISAPEHKFEGLTQIFQKAYEHEQHISESINNIVDHAIKSKDHATFNFLQWYVAEQHEEEVLFKDILDKIELIGNENHGLYLADQYVKGIAKSRKS

SEQ ID NO: 4723 - protein, 1379 aa, Artificial Sequence
  SARS-CoV-2/Germany/BavPat3/2020__EPI_ISL_414521 spike protein (1-1211)(K986P_V987P) Ferritin construct
MFVFLVLLPLVSSQCVNLTTRTQLPPAYTNSFTRGVYYPDKVFRSSVLHSTQDLFLPFFSNVTWFHAIHVSGTNGTKRFDNPVLPFNDGVYFASTEKSNIIRGWIFGTTLDSKTQSLLIVNNATNVVIKVCEFQFCNDPFLGVYYHKNNKSWMESEFRVYSSANNCTFEYVSQPFLMDLEGKQGNFKNLREFVFKNIDGYFKIYSKHTPINLVRDLPQGFSALEPLVDLPIGINITRFQTLLALHRSYLTPGDSSSGWTAGAAAYYVGYLQPRTFLLKYNENGTITDAVDCALDPLSETKCTLKSFTVEKGIYQTSNFRVQPTESIVRFPNITNLCPFGEVFNATRFASVYAWNRKRISNCVADYSVLYNSASFSTFKCYGVSPTKLNDLCFTNVYADSFVIRGDEVRQIAPGQTGKIADYNYKLPDDFTGCVIAWNSNNLDSKVGGNYNYLYRLFRKSNLKPFERDISTEIYQAGSTPCNGVEGFNCYFPLQSYGFQPTNGVGYQPYRVVVLSFELLHAPATVCGPKKSTNLVKNKCVNFNFNGLTGTGVLTESNKKFLPFQQFGRDIADTTDAVRDPQTLEILDITPCSFGGVSVITPGTNTSNQVAVLYQDVNCTEVPVAIHADQLTPTWRVYSTGSNVFQTRAGCLIGAEHVNNSYECDIPIGAGICASYQTQTNSPRRARSVASQSIIAYTMSLGAENSVAYSNNSIAIPTNFTISVTTEILPVSMTKTSVDCTMYICGDSTECSNLLLQYGSFCTQLNRALTGIAVEQDKNTQQVFAQVKQIYKTPPIKDFGGFNFSQILPDPSKPSKRSFIEDLLFNKVTLADAGFIKQYGDCLGDIAARDLICAQKFNGLTVLPPLLTDEMIAQYTSALLAGTITSGWTFGAGAALQIPFAMQMAYRFNGIGVTQNVLYENQKLIANQFNSAIGKIQDSLSSTASALGKLQDVVNQNAQALNTLVKQLSSNFGAISSVLNDILSRLDPPEAEVQIDRLITGRLQSLQTYVTQQLIRAAEIRASANLAATKMSECVLGQSKRVDFCGKGYHLMSFPQSAPHGVVFLHVTYVPAQEKNFTTAPAICHDGKAHFPREGVFVSNGTHWFVTQRNFYEPQIITTDNTFVSGNCDVVIGIVNNTVYDPLQPELDSFKEELDKYFKNHTSPDVDLGDISGINASVVNIQKEIDRLNEVAKNLNESLIDLQELGKYEQYIKGGGGSDIIKLLNEQVNKEMQSSNLYMSMSSWCYTHSLDGAGLFLFDHAAEEYEHAKKLIIFLNENNVPVQLTSISAPEHKFEGLTQIFQKAYEHEQHISESINNIVDHAIKSKDHATFNFLQWYVAEQHEEEVLFKDILDKIELIGNENHGLYLADQYVKGIAKSRKS

SEQ ID NO: 4724 - protein, 1379 aa, Artificial Sequence
  SARS-CoV-2/France/HF1805/2020__EPI_ISL_414628 spike protein (1-1211)(K986P_V987P) Ferritin construct
MFVFLVLLPLVSSQCVNLTTRTQLPPAYTNSFTRGVYYPDKVFRSSVLHSTQDLFLPFFSNVTWFHAIHVSGTNGTKRFDNPVLPFNDGVYFASTEKSNIIRGWIFGTTLDSKTQSLLIVNNATNVVIKVCEFQFCNDPFLGVYYHKNNKSWMESEFRVYSSANNCTFEYVSQPFLMDLEGKQGNFKNLREFVFKNIDGYFKIYSKHTPINLVRDLPQGFSALEPLVDLPIGINITRFQTLLALHRSYLTPGDSSSGWTAGAAAYYVGYLQPRTFLLKYNENGTITDAVDCALDPLSETKCTLKSFTVEKGIYQTSNFRVQPTESIVRFPNITNLCPFGEVFNATRFASVYAWNRKRISNCVADYSVLYNSASFSTFKCYGVSPTKLNDLCFTNVYADSFVIRGDEVRQIAPGQTGKIADYNYKLPDDFTGCVIAWNSNNLDSKVGGNYNYLYRLFRKSNLKPFERDISTEIYQAGSTPCNGVEGFNCYFPLQSYGFQPTNGVGYQPYRVVVLSFELLHAPATVCGPKKSTNLVKNKCVNFNFNGLTGTGVLTESNKKFLPFQQFGRDIADTTDAVRDPQTLEILDITPCSFGGVSVITPGTNTSNQVAVLYQGVNCTEVPVAIHADQLTPTWRVYSTGSNVFQTRAGCLIGAEHVNNSYECDIPIGAGICASYQTQTNSPRRARSVASQSIIAYTMSLGAENSVAYSNNSIAIPTNFTISVTTEILPVSMTKTSVDCTMYICGDSTECSNLLLQYGSFCTQLNRALTGIAVEQDKNTQEVFAQVKQIYKTPPIKDFGGFNFSQILPDPSKPSKRSFIEDLLFNKVTLADAGFIKQYGDCLGDIAARDLICAQKFNGLTVLPPLLTDEMIAQYTSALLAGTITSGWTFGAGAALQIPFAMQMAYRFNGIGVTQNVLYENQKLIANQFNSAIGKIQDSLSSTASALGKLQDVVNQNAQALNTLVKQLSSNFGAISSVLNDILSRLDPPEAEVQIDRLITGRLQSLQTYVTQQLIRAAEIRASANLAATKMSECVLGQSKRVDFCGKGYHLMSFPQSAPHGVVFLHVTYVPAQEKNFTTAPAICHDGKAHFPREGVFVSNGTHWFVTQRNFYEPQIITTDNTFVSGNCDVVIGVVNNTVYDPLQPELDSFKEELDKYFKNHTSPDVDLGDISGINASVVNIQKEIDRLNEVAKNLNESLIDLQELGKYEQYIKGGGGSDIIKLLNEQVNKEMQSSNLYMSMSSWCYTHSLDGAGLFLFDHAAEEYEHAKKLIIFLNENNVPVQLTSISAPEHKFEGLTQIFQKAYEHEQHISESINNIVDHAIKSKDHATFNFLQWYVAEQHEEEVLFKDILDKIELIGNENHGLYLADQYVKGIAKSRKS

SEQ ID NO: 4725 - protein, 1379 aa, Artificial Sequence
  SARS-CoV-2/Netherlands/ZuidHolland_9/2020__EPI_ISL_414445 spike protein (1-1211)(K986P_V987P) Ferritin construct
MFVFLVLLPLVSSQCVNLTTRTQLPPAYTNSFTRGVYYPDKVFRSSVLHSTQDLFLPFFSNVTWFHAIHVSGTNGTKRFDNPVLPFNDGVYFASTEKSNIIRGWIFGTTLDSKTQSLLIVNNATNVVIKVCEFQFCNDPFLGVYYHKNNKSWMESEFRVYSSANNCTFEYVSQPFLMDLEGKQGNFKNLREFVFKNIDGYFKIYSKHTPINLVRDLPQGFSALEPLVDLPIGINITRFQTLLALHRSYLTPGDSSSGWTAGAAAYYVGYLQPRTFLLKYNENGTITDAVDCALDPLSETKCTLKSFTVEKGIYQTSNFRVQPTESIVRFPNITNLCPFGEVFNATRFASVYAWNRKRISNCVADYSVLYNSASFSTFKCYGVSPTKLNDLCFTNVYADSFVIRGDEVRQIAPGQTGKIADYNYKLPDDFTGCVIAWNSNNLDSKVGGNYNYLYRLFRKSNLKPFERDISTEIYQAGSTPCNGVEGFNCYFPLQSYGFQPTNGVGYQPYRVVVLSFELLHAPATVCGPKKSTNLVKNKCVNFNFNGLTGTGVLTESNKKFLPFQQFGRDIADTTDAVRDPQTLEILDITPCSFGGVSVITPGTNTSNQVAVLYQGVNCTEVPVAIHADQLTPTWRVYSTGSNVFQTRAGCLIGAEHVNNSYECDIPIGAGICASYQTQTNSPRRARSVASQSIIAYTMSLGAENSVAYSNNSIAIPTNFTISVTTEILPVSMTKTSVDCTMYICGDSTECSNLLLQYGSFCTQLNRALTGIAVEQDKNTQEVFAQVKQIYKTPPIKDFGGFNFSQILPDPSKPSKRSFIEDLLFNKVTLADAGFIKQYGDCLGDIAARDLICVQKFNGLTVLPPLLTDEMIAQYTSALLAGTITSGWTFGAGAALQIPFAMQMAYRFNGIGVTQNVLYENQKLIANQFNSAIGKIQDSLSSTASALGKLQDVVNQNAQALNTLVKQLSSNFGAISSVLNDILSRLDPPEAEVQIDRLITGRLQSLQTYVTQQLIRAAEIRASANLAATKMSECVLGQSKRVDFCGKGYHLMSFPQSAPHGVVFLHVTYVPAQEKNFTTAPAICHDGKAHFPREGVFVSNGTHWFVTQRNFYEPQIITTDNTFVSGNCDVVIGIVNNTVYDPLQPELDSFKEELDKYFKNHTSPDVDLGDISGINASVVNIQKEIDRLNEVAKNLNESLIDLQELGKYEQYIKGGGGSDIIKLLNEQVNKEMQSSNLYMSMSSWCYTHSLDGAGLFLFDHAAEEYEHAKKLIIFLNENNVPVQLTSISAPEHKFEGLTQIFQKAYEHEQHISESINNIVDHAIKSKDHATFNFLQWYVAEQHEEEVLFKDILDKIELIGNENHGLYLADQYVKGIAKSRKS

SEQ ID NO: 4726 - protein, 1379 aa, Artificial Sequence
  SARS-CoV-2/Finland/FIN03032020A/2020__EPI_ISL_413602 spike protein (1-1211)(K986P_V987P) Ferritin construct
MFVFLVLLPLVSSQCVNLTTRTQLPPAYTNSFTRGVYYPDKVFRSSVLHSTQDLFLPFFSNVTWFHAIHVSGTNGTKRFDNPVLPFNDGVYFASTEKSNIIRGWIFGTTLDSKTQSLLIVNNATNVVIKVCEFQFCNDPFLGVYYHKNNKSWMESEFRVYSSANNCTFEYVSQPFLMDLEGKQGNFKNLREFVFKNIDGYFKIYSKHTPINLVRDLPQGFSALEPLVDLPIGINITRFQTLLALHRSYLTPGDSSSGWTAGAAAYYVGYLQPRTFLLKYNENGTITDAVDCALDPLSETKCTLKSFTVEKGIYQTSNFRVQPTESIVRFPNITNLCPFGEVFNATRFASVYAWNRKRISNCVADYSVLYNSASFSTFKCYGVSPTKLNDLCFTNVYADSFVIRGDEVRQIAPGQTGKIADYNYKLPDDFTGCVISWNSNNLDSKVGGNYNYLYRLFRKSNLKPFERDISTEIYQAGSTPCNGVEGFNCYFPLQSYGFQPTNGVGYQPYRVVVLSFELLHAPATVCGPKKSTNLVKNKCVNFNFNGLTGTGVLTESNKKFLPFQQFGRDIADTTDAVRDPQTLEILDITPCSFGGVSVITPGTNTSNQVAVLYQGVNCTEVPVAIHADQLTPTWRVYSTGSNVFQTRAGCLIGAEHVNNSYECDIPIGAGICASYQTQTNSPRRARSVASQSIIAYTMSLGAENSVAYSNNSIAIPTNFTISVTTEILPVSMTKTSVDCTMYICGDSTECSNLLLQYGSFCTQLNRALTGIAVEQDKNTQEVFAQVKQIYKTPPIKDFGGFNFSQILPDPSKPSKRSFIEDLLFNKVTLADAGFIKQYGDCLGDIAARDLICAQKFNGLTVLPPLLTDEMIAQYTSALLAGTITSGWTFGAGAALQIPFAMQMAYRFNGIGVTQNVLYENQKLIANQFNSAIGKIQDSLSSTASALGKLQDVVNQNAQALNTLVKQLSSNFGAISSVLNDILSRLDPPEAEVQIDRLITGRLQSLQTYVTQQLIRAAEIRASANLAATKMSECVLGQSKRVDFCGKGYHLMSFPQSAPHGVVFLHVTYVPAQEKNFTTAPAICHDGKAHFPREGVFVSNGTHWFVTQRNFYEPQIITTDNTFVSGNCDVVIGIVNNTVYDPLQPELDSFKEELDKYFKNHTSPDVDLGDISGINASVVNIQKEIDRLNEVAKNLNESLIDLQELGKYEQYIKGGGGSDIIKLLNEQVNKEMQSSNLYMSMSSWCYTHSLDGAGLFLFDHAAEEYEHAKKLIIFLNENNVPVQLTSISAPEHKFEGLTQIFQKAYEHEQHISESINNIVDHAIKSKDHATFNFLQWYVAEQHEEEVLFKDILDKIELIGNENHGLYLADQYVKGIAKSRKS

SEQ ID NO: 4727 - protein, 1379 aa, Artificial Sequence
  SARS-CoV-2/France/GE1977/2020__EPI_ISL_414632 spike protein (1-1211)(K986P_V987P) Ferritin construct
MFVFLVLLPLVSSQCVNLTTRTQLPPAYTNSFTRGVYYPDKVFRSSVLHSTQDLFLPFFSNVTWFHAIHVSGTNGTKRFDNPVLPFNDGVYFASTEKSNIIRGWIFGTTLDSKTQSLLIVNNATNVVIKVCEFQFCNDPFLGVYYHKNNKSWMESEFRVYSSANNCTFEYVSQPFLMDLEGKQGNFKNLREFVFKNIDGYFKIYSKHTPINLVRDLPQGFSALEPLVDLPIGINITRFQTLLALHRSYLTPGDSSSGWTAGAAAYYVGYLQPRTFLLKYNENGTITDAVDCALDPLSETKCTLKSFTVEKGIYQTSNFRVQPTESIVRFPNITNLCPFGEVFNATRFASVYAWNRKRISNCVADYSVLYNSASFSTFKCYGVSPTKLNDLCFTNVYADSFVIRGDEVRQIAPGQTGKIADYNYKLPDDFTGCVIAWNSNNLDSKVGGNYNYLYRLFRKSNLKPFERDISTEIYQAGSTPCNGVEGFNCYFPLQSYGFQPTNGVGYQPYRVVVLSFELLHAPATVCGPKKSTNLVKNKCVNFNFNGLTGTGVLTESNKKFLPFQQFGRDIADTTDAVRDPQTLEILDITPCSFGGVSVITPGTNTSNQVAVLYQGVNCTEVPVAIHADQLTPTWRVYSTGSNVFQTRAGCLIGAEHVNNSYECDIPIGAGICASYQTQTNSPRRARSVASQSIIAYTMSLGAENSVAYSNNSIAIPTNFTISVTTEILPVSMTKTSVDCTMYICGDSTECSNLLLQYGSFCTQLNRALTGIAVEQDKNTQEVFAQVKQIYKTPPIKDFGGFNFSQILPDPSKPSKRSFIEDLLFNKVTLADAGFIKQYGDCLGDIAARDLICAQKFNGLTVLPPLLTDEMIAQYTSALLAGTITSGWTFGAGAALQIPFAMQMAYRFNGIGVTQNVLYENQKLIANQFNSAIGKIQDSLFSTASALGKLQDVVNQNAQALNTLVKQLSSNFGAISSVLNDILSRLDPPEAEVQIDRLITGRLQSLQTYVTQQLIRAAEIRASANLAATKMSECVLGQSKRVDFCGKGYHLMSFPQSAPHGVVFLHVTYVPAQEKNFTTAPAICHDGKAHFPREGVFVSNGTHWFVTQRNFYEPQIITTDNTFVSGNCDVVIGIVNNTVYDPLQPELDSFKEELDKYFKNHTSPDVDLGDISGINASVVNIQKEIDRLNEVAKNLNESLIDLQELGKYEQYIKGGGGSDIIKLLNEQVNKEMQSSNLYMSMSSWCYTHSLDGAGLFLFDHAAEEYEHAKKLIIFLNENNVPVQLTSISAPEHKFEGLTQIFQKAYEHEQHISESINNIVDHAIKSKDHATFNFLQWYVAEQHEEEVLFKDILDKIELIGNENHGLYLADQYVKGIAKSRKS

SEQ ID NO: 4728 - protein, 1379 aa, Artificial Sequence
  SARS-CoV-2/Finland/FIN-313/2020__EPI_ISL_414641 spike protein (1-1211)(K986P_V987P) Ferritin construct
MFVFLVLLPLVSSQCVNLTTRTQLPPAYTNSFTRGVYYPDKVFRSSVLHSTQDLFLPFFSNVTWFHAIHVSGTNGTKRFDNPVLPFNDGVYFASTEKSNIIRGWIFGTTLDSKTQSLLIVNNATNVVIKVCEFQFCNDPFLGVYYHKNNKSWMESEFRVYSSANNCTFEYVSQPFLMDLEGKQGNFKNLREFVFKNIDGYFKIYSKHTPINLVRDLPQGFSALEPLVDLPIGINITRFKTLLALHRSYLTPGDSSSGWTAGAAAYYVGYLQPRTFLLKYNENGTITDAVDCALDPLSETKCTLKSFTVEKGIYQTSNFRVQPTESIVRFPNITNLCPFGEVFNATRFASVYAWNRKRISNCVADYSVLYNSASFSTFKCYGVSPTKLNDLCFTNVYADSFVIRGDEVRQIAPGQTGKIADYNYKLPDDFTGCVIAWNSNNLDSKVGGNYNYLYRLFRKSNLKPFERDISTEIYQAGSTPCNGVEGFNCYFPLQSYGFQPTNGVGYQPYRVVVLSFELLHAPATVCGPKKSTNLVKNKCVNFNFNGLTGTGVLTESNKKFLPFQQFGRDIADTTDAVRDPQTLEILDITPCSFGGVSVITPGTNTSNQVAVLYQGVNCTEVPVAIHADQLTPTWRVYSTGSNVFQTRAGCLIGAEHVNNSYECDIPIGAGICASYQTQTNSPRRARSVASQSIIAYTMSLGAENSVAYSNNSIAIPTNFTISVTTEILPVSMTKTSVDCTMYICGDSTECSNLLLQYGSFCTQLNRALTGIAVEQDKNTQEVFAQVKQIYKTPPIKDFGGFNFSQILPDPSKPSKRSFIEDLLFNKVTLADAGFIKQYGDCLGDIAARDLICAQKFNGLTVLPPLLTDEMIAQYTSALLAGTITSGWTFGAGAALQIPFAMQMAYRFNGIGVTQNVLYENQKLIANQFNSAIGKIQDSLSSTASALGKLQDVVNQNAQALNTLVKQLSSNFGAISSVLNDILSRLDPPEAEVQIDRLITGRLQSLQTYVTQQLIRAAEIRASANLAATKMSECVLGQSKRVDFCGKGYHLMSFPQSAPHGVVFLHVTYVPAQEKNFTTAPAICHDGKAHFPREGVFVSNGTHWFVTQRNFYEPQIITTDNTFVSGNCDVVIGIVNNTVYDPLQPELDSFKEELDKYFKNHTSPDVDLGDISGINASVVNIQKEIDRLNEVAKNLNESLIDLQELGKYEQYIKGGGGSDIIKLLNEQVNKEMQSSNLYMSMSSWCYTHSLDGAGLFLFDHAAEEYEHAKKLIIFLNENNVPVQLTSISAPEHKFEGLTQIFQKAYEHEQHISESINNIVDHAIKSKDHATFNFLQWYVAEQHEEEVLFKDILDKIELIGNENHGLYLADQYVKGIAKSRKS

SEQ ID NO: 4729 - protein, 1379 aa, Artificial Sequence
  SARS-CoV-2/Netherlands/ZuidHolland_2/2020__EPI_ISL_414556 spike protein (1-1211)(K986P_V987P) Ferritin construct
MFVFLVLLPLVSSQCVNLTTRTQLPPAYTNSFTRGVYYPDKVFRSSVLHSTQDLFLPFFSNVTWFHAIHVSGTNGTKRFDNPVLPFNDGVYFASTEKSNIIRGWIFGTTLDSKTQSLLIVNNATNVVIKVCEFQFCNDPFLGVYYHKNNKSWMESEFRVYSSANNCTFEYVSQPFLMDLEGKQGNFKNLREFVFKNIDGYFKIYSKHTPINLVRDLPQGFSALEPLVDLPIGINITRFQTLLALHRSYLTPGDSSSGWTAGAAAYYVGYLQPRTFLLKYNENGTITDAVDCALDPLSETKCTLKSFTVEKGIYQTSNFRVQPTESIVRFPNITNLCPFGEVFNATRFASVYAWNRKRISNCVADYSVLYNSASFSTFKCYGVSPTKLNDLCFTNVYADSFVIRGDEVRQIAPGQTGKIADYNYKLPDDFTGCVIAWNSNNLDSKVGGNYNYLYRLFRKSNLKPFERDISTEIYQAGSTPCNGVEGFNCYFPLQSYGFQPTNGVGYQPYRVVVLSFELLHAPATVCGPKKSTNLVKNKCVNFNFNGLTGTGVLTESNKKFLPFQQFGRDIADTTDAVRDPQTLEILDITPCSFGGVSVITPGTNTSNQVAVLYQGVNCTEVPVAIHADQLTPTWRVYSTGSNVFQTRAGCLIGAEHVNNSYECDIPIGAGICASYQTQTNSPRRARSVASQSIIAYTMSLGAENSVAYSNNSIAIPTNFTISVTTEILPVSMTKTSVDCTMYICGDSTECSNLLLQYGSFCTQLNRALTGIALEQDKNTQEVFAQVKQIYKTPPIKDFGGFNFSQILPDPSKPSKRSFIEDLLFNKVTLADAGFIKQYGDCLGDIAARDLICAQKFNGLTVLPPLLTDEMIAQYTSALLAGTITSGWTFGAGAALQIPFAMQMAYRFNGIGVTQNVLYENQKLIANQFNSAIGKIQDSLSSTASALGKLQDVVNQNAQALNTLVKQLSSNFGAISSVLNDILSRLDPPEAEVQIDRLITGRLQSLQTYVTQQLIRAAEIRASANLAATKMSECVLGQSKRVDFCGKGYHLMSFPQSAPHGVVFLHVTYVPAQEKNFTTAPAICHDGKAHFPREGVFVSNGTHWFVTQRNFYEPQIITTDNTFVSGNCDVVIGIVNNTVYDPLQPELDSFKEELDKYFKNHTSPDVDLGDISGINASVVNIQKEIDRLNEVAKNLNESLIDLQELGKYEQYIKGGGGSDIIKLLNEQVNKEMQSSNLYMSMSSWCYTHSLDGAGLFLFDHAAEEYEHAKKLIIFLNENNVPVQLTSISAPEHKFEGLTQIFQKAYEHEQHISESINNIVDHAIKSKDHATFNFLQWYVAEQHEEEVLFKDILDKIELIGNENHGLYLADQYVKGIAKSRKS

SEQ ID NO: 4730 - protein, 1379 aa, Artificial Sequence
  SARS-CoV-2/USA/WA-UW31/2020__EPI_ISL_414618 spike protein (1-1211)(K986P_V987P) Ferritin construct
MFVFLVLLPLVSSQCVNLTTRTQLPPAYTNSFTRGVYYPDKVFRSSVLHSTQDLFLPFFSNVTWFHAIHVSGTNGTKRFDNPVLPFNDGVYFASTEKSNIIRGWIFGTTLDSKTQSLLIVNNATNVVIKVCEFQFCNDPFLGVYYHKNNKSWMESEFRVYSSANNCTFEYVSQPFLMDLEGKQGNFKNLREFVFKNIDGYFKIYSKHTPINLVRDLPQGFSALEPLVDLPIGINITRFQTLLALHRSYLTPGDSSSGWTAGAAAYYVGYLQPRTFLLKYNENGTITDAVDCALDPLSETKCTLKSFTVEKGIYQTSNFRVQPTESIVRFPNITNLCPFGEVFNATRFASVYAWNRKRISNCVADYSVLYNSASFSTFKCYGVSPTKLNDLCFTNVYADSFVIRGDEVRQIAPGQTGKIADYNYKLPDDFTGCVIAWNSNNLDSKVGGNYNYLYRLFRKSNLKPFERDISTEIYQAGSTPCNGAEGFNCYFPLQSYGFQPTNGVGYQPYRVVVLSFELLHAPATVCGPKKSTNLVKNKCVNFNFNGLTGTGVLTESNKKFLPFQQFGRDIADTTDAVRDPQTLEILDITPCSFGGVSVITPGTNTSNQVAVLYQDVNCTEVPVAIHADQLTPTWRVYSTGSNVFQTRAGCLIGAEHVNNSYECDIPIGAGICASYQTQTNSPRRARSVASQSIIAYTMSLGAENSVAYSNNSIAIPTNFTISVTTEILPVSMTKTSVDCTMYICGDSTECSNLLLQYGSFCTQLNRALTGIAVEQDKNTQEVFAQVKQIYKTPPIKDFGGFNFSQILPDPSKPSKRSFIEDLLFNKVTLADAGFIKQYGDCLGDIAARDLICAQKFNGLTVLPPLLTDEMIAQYTSALLAGTITSGWTFGAGAALQIPFAMQMAYRFNGIGVTQNVLYENQKLIANQFNSAIGKIQDSLSSTASALGKLQDVVNQNAQALNTLVKQLSSNFGAISSVLNDILSRLDPPEAEVQIDRLITGRLQSLQTYVTQQLIRAAEIRASANLAATKMSECVLGQSKRVDFCGKGYHLMSFPQSAPHGVVFLHVTYVPAQEKNFTTAPAICHDGKAHFPREGVFVSNGTHWFVTQRNFYEPQIITTDNTFVSGNCDVVIGIVNNTVYDPLQPELDSFKEELDKYFKNHTSPDVDLGDISGINASVVNIQKEIDRLNEVAKNLNESLIDLQELGKYEQYIKGGGGSDIIKLLNEQVNKEMQSSNLYMSMSSWCYTHSLDGAGLFLFDHAAEEYEHAKKLIIFLNENNVPVQLTSISAPEHKFEGLTQIFQKAYEHEQHISESINNIVDHAIKSKDHATFNFLQWYVAEQHEEEVLFKDILDKIELIGNENHGLYLADQYVKGIAKSRKS

SEQ ID NO: 4731 - protein, 1379 aa, Artificial Sequence
  SARS-CoV-2/South Korea/SNU01/2020__EPI_ISL_411929 spike protein (1-1211)(K986P_V987P) Ferritin construct
MFVFLVLLPLVSSQCVNLTTRTQLPPAYTNSFTRGVYYPDKVFRSSVLHSTQDLFLPFFSNVTWFHAIHVSGTNGTKRFDNPVLPFNDGVYFASTEKSNIIRGWIFGTTLDSKTQSLLIVNNATNVVIKVCEFQFCNDPFLGVYYHKNNKSWMESEFRVYSSANNCTFEYVSQPFLMDLEGKQGNFKNLREFVFKNIDGYFKIYSKHTPINLVRDLPQGFWALEPLVDLPIGINITRFQTLLALHRSYLTPGDSSSGWTAGAAAYYVGYLQPRTFLLKYNENGTITDAVDCALDPLSETKCTLKSFTVEKGIYQTSNFRVQPTESIVRFPNITNLCPFGEVFNATRFASVYAWNRKRISNCVADYSVLYNSASFSTFKCYGVSPTKLNDLCFTNVYADSFVIRGDEVRQIAPGQTGKIADYNYKLPDDFTGCVIAWNSNNLDSKVGGNYNYLYRLFRKSNLKPFERDISTEIYQAGSTPCNGVEGFNCYFPLQSYGFQPTNGVGYQPYRVVVLSFELLHAPATVCGPKKSTNLVKNKCVNFNFNGLTGTGVLTESNKKFLPFQQFGRDIADTTDAVRDPQTLEILDITPCSFGGVSVITPGTNTSNQVAVLYQDVNCTEVPVAIHADQLTPTWRVYSTGSNVFQTRAGCLIGAEHVNNSYECDIPIGAGICASYQTQTNSPRRARSVASQSIIAYTMSLGAENSVAYSNNSIAIPTNFTISVTTEILPVSMTKTSVDCTMYICGDSTECSNLLLQYGSFCTQLNRALTGIAVEQDKNTQEVFAQVKQIYKTPPIKDFGGFNFSQILPDPSKPSKRSFIEDLLFNKVTLADAGFIKQYGDCLGDIAARDLICAQKFNGLTVLPPLLTDEMIAQYTSALLAGTITSGWTFGAGAALQIPFAMQMAYRFNGIGVTQNVLYENQKLIANQFNSAIGKIQDSLSSTASALGKLQDVVNQNAQALNTLVKQLSSNFGAISSVLNDILSRLDPPEAEVQIDRLITGRLQSLQTYVTQQLIRAAEIRASANLAATKMSECVLGQSKRVDFCGKGYHLMSFPQSAPHGVVFLHVTYVPAQEKNFTTAPAICHDGKAHFPREGVFVSNGTHWFVTQRNFYEPQIITTDNTFVSGNCDVVIGIVNNTVYDPLQPELDSFKEELDKYFKNHTSPDVDLGDISGINASVVNIQKEIDRLNEVAKNLNESLIDLQELGKYEQYIKGGGGSDIIKLLNEQVNKEMQSSNLYMSMSSWCYTHSLDGAGLFLFDHAAEEYEHAKKLIIFLNENNVPVQLTSISAPEHKFEGLTQIFQKAYEHEQHISESINNIVDHAIKSKDHATFNFLQWYVAEQHEEEVLFKDILDKIELIGNENHGLYLADQYVKGIAKSRKS

SEQ ID NO: 4732 - protein, 1379 aa, Artificial Sequence
  SARS-CoV-2/China/WF0004/2020__EPI_ISL_413694 spike protein (1-1211)(K986P_V987P) Ferritin construct
MFVFLVLLPLVSSQCVNLTTRTQLPPAYTNSFTRGVYYPDKVFRSSVLHSTQDLFLPFFSNVTWFHAIHVSGTNGTKRFDNPVLPFNDGVYFASTEKSNIIRGWIFGTTLDSKTQSLLIVNNATNVVIKVCEFQFCNDPFLGVYYHKNNKSWTESEFRVYSSANNCTFEYVSQPFLMDLEGKQGNFKNLREFVFKNIDGYFKIYSKHTPINLVRDLPQGFSALEPLVDLPIGINITRFQTLLALHRSYLTPGDSSSGWTAGAAAYYVGYLQPRTFLLKYNENGTITDAVDCALDPLSETKCTLKSFTVEKGIYQTSNFRVQPTESIVRFPNITNLCPFGEVFNATRFASVYAWNRKRISNCVADYSVLYNSASFSTFKCYGVSPTKLNDLCFTNVYADSFVIRGDEVRQIAPGQTGKIADYNYKLPDDFTGCVIAWNSNNLDSKVGGNYNYLYRLFRKSNLKPFERDISTEIYQAGSTPCNGVEGFNCYFPLQSYGFQPTNGVGYQPYRVVVLSFELLHAPATVCGPKKSTNLVKNKCVNFNFNGLTGTGVLTESNKKFLPFQQFGRDIADTTDAVRDPQTLEILDITPCSFGGVSVITPGTNTSNQVAVLYQDVNCTEVPVAIHADQLTPTWRVYSTGSNVFQTRAGCLIGAEHVNNSYECDIPIGAGICASYQTQTNSPRRARSVASQSIIAYTMSLGAENSVAYSNNSIAIPTNFTISVTTEILPVSMTKTSVDCTMYICGDSTECSNLLLQYGSFCTQLNRALTGIAVEQDKNTQEVFAQVKQIYKTPPIKDFGGFNFSQILPDPSKPSKRSFIEDLLFNKVTLADAGFIKQYGDCLGDIAARDLICAQKFNGLTVLPPLLTDEMIAQYTSALLAGTITSGWTFGAGAALQIPFAMQMAYRFNGIGVTQNVLYENQKLIANQFNSAIGKIQDSLSSTASALGKLQDVVNQNAQALNTLVKQLSSNFGAISSVLNDILSRLDPPEAEVQIDRLITGRLQSLQTYVTQQLIRAAEIRASANLAATKMSECVLGQSKRFDFCGKGYHLMSFPQSAPHGVVFLHVTYVPAQEKNFTTAPAICHDGKAHFPREGVFVSNGTHWFVTQRNFYEPQIITTDNTFVSGNCDVVIGIVNNTVYDPLQPELDSFKEELDKYFKNHTSPDVDLGDISGINASVVNIQKEIDRLNEVAKNLNESLIDLQELGKYEQYIKGGGGSDIIKLLNEQVNKEMQSSNLYMSMSSWCYTHSLDGAGLFLFDHAAEEYEHAKKLIIFLNENNVPVQLTSISAPEHKFEGLTQIFQKAYEHEQHISESINNIVDHAIKSKDHATFNFLQWYVAEQHEEEVLFKDILDKIELIGNENHGLYLADQYVKGIAKSRKS

SEQ ID NO: 4733 - protein, 1379 aa, Artificial Sequence
  SARS-CoV-2/China/WF0028/2020__EPI_ISL_413791 spike protein (1-1211)(K986P_V987P) Ferritin construct
MFVFLVLLPLVSSQCVNLTTRTQLPPAYTNSFTRGVYYPDKVFRSSVLHSTQDLFLPFFSNVTWFHAIHVSGTNGTKRFDNPVLPFNDGVYFASTEKSNIIRGWIFGTTLDSKTQSLLIVNNATNVVIKVCEFQFCNDPFLGVYYHKNNKSWMESEFRVYSSANNCTFEYVSQPFLMDLEGKQGNFKNLREFVFKNIDGYFKIYSKHTPINLVRDLPQGFSALEPLVDLPIGINITRFQTLLALHRSYLTPGDSSSGWTAGAAAYYVGYLQPRTFLLKYNENGTITDAVDCALDPLSETKCTLKSFTVEKGIYQTSNFRVQPTESIVRFPNITNLCPFGEVFNATRFASVYAWNRKRISNCVADYSVLYNSASFSTFKCYGVSPTKLNDLCFTNVYADSFVIRGDEVRQIAPGQTGKIADYNYKLPDDFTGCVIAWNSNNLDSKVGGNYNYLYRLFRKSNLKPFERDISTEIYQAGSTPCNGVEGFNCYFPLQSYGFQPTNGVGYQPYRVVVLSFELLHAPATVCGPKKSTNLVKNKCVNFNFNGLTGTGVLTESNKKFLPFQQFGRDIADTTDAVRDPQTLEILDITPCSFGGVSVITPGTNTSNQVAVLYQDVNCTEVPVAIHADQLTPTWRVYSTGSNVFQTRAGCLIGAEHVNNSYECDIPIGAGICASYQTQTNSPRRARSVASQSIIAYTMSLGAENSVAYSNNSIAIPTNFTISVTTEILPVSMTKTSVDCTMYICGDSTECSNLLLQYGSFCTQLNRALTGIAVEQDKNTQEVFAQVKQIYKTPPIKDFGGFNFSQILPDPSKPSKRSFIEDLLFNKVTLADAGFIKQYGDCLGDIAARDLICAQKFNGLTVLPPLLTDEMIAQYTSALLAGTITSGWTFGAGAALQIPFAMQMAYRFNGIGVTQNVLYENQKLIANQFNSAIGKIQDSLSSTASALGKLQDVVNQNAQALNTLVKQLSSNFGAISSVLNDILSRLDPPEAEVQIDRLITGRLQSLQTYVTQQLIRAAEIRASANLAATKMSECVLGQSKRVDFCGKGYHLMSFPQSAPHGVVFLHVTYVPAQEKNFTTAPAICHDGKAHFPREGVFVSNGTHWFVTQRNFYEPQIITTDNTFVSGNCDVVIGIVNNTVYDPLQPELESFKEELDKYFKNHTSPDVDLGDISGINASVVNIQKEIDRLNEVAKNLNESLIDLQELGKYEQYIKGGGGSDIIKLLNEQVNKEMQSSNLYMSMSSWCYTHSLDGAGLFLFDHAAEEYEHAKKLIIFLNENNVPVQLTSISAPEHKFEGLTQIFQKAYEHEQHISESINNIVDHAIKSKDHATFNFLQWYVAEQHEEEVLFKDILDKIELIGNENHGLYLADQYVKGIAKSRKS

SEQ ID NO: 4734 - protein, 1379 aa, Artificial Sequence
  SARS-CoV-2/2019-nCoV/USA-CruiseA-18/2020__MT159716.1 spike protein (1-1211)(K986P_V987P) Ferritin construct
MFVFLVLLPLVSSQCVNLTTRTQLPPAYTNSFTRGVYYPDKVFRSSVLHSTQDLFLPFFSNVTWFHAIHVSGTNGTKRFDNPVLPFNDGVYFASTEKSNIIRGWIFGTTLDSKTQSLLIVNNATNVVIKVCEFQFCNDPFLGVYYHKNNKSWMESELRVYSSANNCTFEYVSQPFLMDLEGKQGNFKNLREFVFKNIDGYFKIYSKHTPINLVRDLPQGFSALEPLVDLPIGINITRFQTLLALHRSYLTPGDSSSGWTAGAAAYYVGYLQPRTFLLKYNENGTITDAVDCALDPLSETKCTLKSFTVEKGIYQTSNFRVQPTESIVRFPNITNLCPFGEVFNATRFASVYAWNRKRISNCVADYSVLYNSASFSTFKCYGVSPTKLNDLCFTNVYADSFVIRGDEVRQIAPGQTGKIADYNYKLPDDFTGCVIAWNSNNLDSKVGGNYNYLYRLFRKSNLKPFERDISTEIYQAGSTPCNGVEGFNCYFPLQSYGFQPTNGVGYQPYRVVVLSFELLHAPATVCGPKKSTNLVKNKCVNFNFNGLTGTGVLTESNKKFLPFQQFGRDIADTTDAVRDPQTLEILDITPCSFGGVSVITPGTNTSNQVAVLYQDVNCTEVPVAIHADQLTPTWRVYSTGSNVFQTRAGCLIGAEHVNNSYECDIPIGAGICASYQTQTNSPRRARSVASQSIIAYTMSLGAENSVAYSNNSIAIPTNFTISVTTEILPVSMTKTSVDCTMYICGDSTECSNLLLQYGSFCTQLNRALTGIAVEQDKNTQEVFAQVKQIYKTPPIKDFGGFNFSQILPDPSKPSKRSFIEDLLFNKVTLADAGFIKQYGDCLGDIAARDLICAQKFNGLTVLPPLLTDEMIAQYTSALLAGTITSGWTFGAGAALQIPFAMQMAYRFNGIGVTQNVLYENQKLIANQFNSAIGKIQDSLSSTASALGKLQDVVNQNAQALNTLVKQLSSNFGAISSVLNDILSRLDPPEAEVQIDRLITGRLQSLQTYVTQQLIRAAEIRASANLAATKMSECVLGQSKRVDFCGKGYHLMSFPQSAPHGVVFLHVTYVPAQEKNFTTAPAICHDGKAHFPREGVFVSNGTHWFVTQRNFYEPQIITTDNTFVSGNCDVVIGIVNNTVYDPLQPELDSFKEELDKYFKNHTSPDVDLGDISGINASVVNIQKEIDRLNEVAKNLNESLIDLQELGKYEQYIKGGGGSDIIKLLNEQVNKEMQSSNLYMSMSSWCYTHSLDGAGLFLFDHAAEEYEHAKKLIIFLNENNVPVQLTSISAPEHKFEGLTQIFQKAYEHEQHISESINNIVDHAIKSKDHATFNFLQWYVAEQHEEEVLFKDILDKIELIGNENHGLYLADQYVKGIAKSRKS

SEQ ID NO: 4735 - protein, 1379 aa, Artificial Sequence
  SARS-CoV-2/SARS-CoV-2/Yunnan-01/human/2020/CHN__MT049951.1 spike protein (1-1211)(K986P_V987P) Ferritin construct
MFVFLVLLPLVSSQCVNLTTRTQLPPANTNSFTRGVYYPDKVFRSSVLHSTQDLFLPFFSNVTWFHAIHVSGTNGTKRFDNPVLPFNDGVYFASTEKSNIIRGWIFGTTLDSKTQSLLIVNNATNVVIKVCEFQFCNDPFLGVYYHKNNKSWMESEFRVYSSANNCTFEYVSQPFLMDLEGKQGNFKNLREFVFKNIDGYFKIYSKHTPINLVRDLPQGFSALEPLVDLPIGINITRFQTLLALHRSYLTPGDSSSGWTAGAAAYYVGYLQPRTFLLKYNENGTITDAVDCALDPLSETKCTLKSFTVEKGIYQTSNFRVQPTESIVRFPNITNLCPFGEVFNATRFASVYAWNRKRISNCVADYSVLYNSASFSTFKCYGVSPTKLNDLCFTNVYADSFVIRGDEVRQIAPGQTGKIADYNYKLPDDFTGCVIAWNSNNLDSKVGGNYNYLYRLFRKSNLKPFERDISTEIYQAGSTPCNGVEGFNCYFPLQSYGFQPTNGVGYQPYRVVVLSFELLHAPATVCGPKKSTNLVKNKCVNFNFNGLTGTGVLTESNKKFLPFQQFGRDIADTTDAVRDPQTLEILDITPCSFGGVSVITPGTNTSNQVAVLYQDVNCTEVPVAIHADQLTPTWRVYSTGSNVFQTRAGCLIGAEHVNNSYECDIPIGAGICASYQTQTNSPRRARSVASQSIIAYTMSLGAENSVAYSNNSIAIPTNFTISVTTEILPVSMTKTSVDCTMYICGDSTECSNLLLQYGSFCTQLNRALTGIAVEQDKNTQEVFAQVKQIYKTPPIKDFGGFNFSQILPDPSKPSKRSFIEDLLFNKVTLADAGFIKQYGDCLGDIAARDLICAQKFNGLTVLPPLLTDEMIAQYTSALLAGTITSGWTFGAGAALQIPFAMQMAYRFNGIGVTQNVLYENQKLIANQFNSAIGKIQDSLSSTASALGKLQDVVNQNAQALNTLVKQLSSNFGAISSVLNDILSRLDPPEAEVQIDRLITGRLQSLQTYVTQQLIRAAEIRASANLAATKMSECVLGQSKRVDFCGKGYHLMSFPQSAPHGVVFLHVTYVPAQEKNFTTAPAICHDGKAHFPREGVFVSNGTHWFVTQRNFYEPQIITTDNTFVSGNCDVVIGIVNNTVYDPLQPELDSFKEELDKYFKNHTSPDVDLGDISGINASVVNIQKEIDRLNEVAKNLNESLIDLQELGKYEQYIKGGGGSDIIKLLNEQVNKEMQSSNLYMSMSSWCYTHSLDGAGLFLFDHAAEEYEHAKKLIIFLNENNVPVQLTSISAPEHKFEGLTQIFQKAYEHEQHISESINNIVDHAIKSKDHATFNFLQWYVAEQHEEEVLFKDILDKIELIGNENHGLYLADQYVKGIAKSRKS

SEQ ID NO: 4736 - protein, 1379 aa, Artificial Sequence
  SARS-CoV-2/USA/WA-UW292/2020__EPI_ISL_418077 spike protein (1-1211)(K986P_V987P) Ferritin construct
MFVFLVLLPLVSSQCVNLTTRTQLPPAYTNSFTRGVYYPDKVFRSSVLHSTQDLFLPFFSNVTWFHAIHVSGTNGTKRFDNPVLPFNDGVYFASTEKSNIIRGWIFGTTLDSKTQSLLIVNNATNVVIKVCEFQFCNDPFLGVYYHKNNKSWMESEFRVYSSANNCTFEYVSQPFLMDLEGKQGNFKNLREFVFKNIDGYFKIYSKHTPINLVRDLPQGFSALEPLVDLPIGINITRFQTLLALHRSYLTPGDSSSGWTAGAAAYYVGYLQPRTFLLKYNENGTITDAVDCALDPLSETKCTLKSFTVEKGIYQTSNFRVQPTESIVRFPNITNLCPFGEVFNATRFASVYAWNRKRISNCVADYSVLYNSASFSTFKCYGVSPTKLNDLCFTNVYADSFVIRGDEVRQIAPGQTGKIADYNYKLPDDFTGCVIAWNSNNLDSKVGGNYNYLYRLFRKSNLKPFERDISTEIYQASSTPCNGVEGFNCYFPLQSYGFQPTNGVGYQPYRVVVLSFELLHAPATVCGPKKSTNLVKNKCVNFNFNGLTGTGVLTESNKKFLPFQQFGRDIADTTDAVRDPQTLEILDITPCSFGGVSVITPGTNTSNQVAVLYQDVNCTEVPVAIHADQLTPTWRVYSTGSNVFQTRAGCLIGAEHVNNSYECDIPIGAGICASYQTQTNSPRRARSVASQSIIAYTMSLGAENSVAYSNNSIAIPTNFTISVTTEILPVSMTKTSVDCTMYICGDSTECSNLLLQYGSFCTQLNRALTGIAVEQDKNTQEVFAQVKQIYKTPPIKDFGGFNFSQILPDPSKPSKRSFIEDLLFNKVTLADAGFIKQYGDCLGDIAARDLICAQKFNGLTVLPPLLTDEMIAQYTSALLAGTITSGWTFGAGAALQIPFAMQMAYRFNGIGVTQNVLYENQKLIANQFNSAIGKIQDSLSSTASALGKLQDVVNQNAQALNTLVKQLSSNFGAISSVLNDILSRLDPPEAEVQIDRLITGRLQSLQTYVTQQLIRAAEIRASANLAATKMSECVLGQSKRVDFCGKGYHLMSFPQSAPHGVVFLHVTYVPAQEKNFTTAPAICHDGKAHFPREGVFVSNGTHWFVTQRNFYEPQIITTDNTFVSGNCDVVIGIVNNTVYDPLQPELDSFKEELDKYFKNHTSPDVDLGDISGINASVVNIQKEIDRLNEVAKNLNESLIDLQELGKYEQYIKGGGGSDIIKLLNEQVNKEMQSSNLYMSMSSWCYTHSLDGAGLFLFDHAAEEYEHAKKLIIFLNENNVPVQLTSISAPEHKFEGLTQIFQKAYEHEQHISESINNIVDHAIKSKDHATFNFLQWYVAEQHEEEVLFKDILDKIELIGNENHGLYLADQYVKGIAKSRKS

SEQ ID NO: 4737 - protein, 1379 aa, Artificial Sequence
  SARS-CoV-2/Iceland/192/2020__EPI_ISL_417819 spike protein (1-1211)(K986P_V987P) Ferritin construct
MFVFFVLLPLVSSQCVNLTTRTQLPPAYTNSFTRGVYYPDKVFRSSVLHSTQDLFLPFFSNVTWFHAIHVSGTNGTKRFDNPVLPFNDGVYFASTEKSNIIRGWIFGTTLDSKTQSLLIVNNATNVVIKVCEFQFCNDPFLGVYYHKNNKSWMESEFRVYSSANNCTFEYVSQPFLMDLEGKQGNFKNLREFVFKNIDGYFKIYSKHTPINLVRDLPQGFSALEPLVDLPIGINITRFQTLLALHRSYLTPGDSSSGWTAGAAAYYVGYLQPRTFLLKYNENGTITDAVDCALDPLSETKCTLKSFTVEKGIYQTSNFRVQPTESIVRFPNITNLCPFGEVFNATRFASVYAWNRKRISNCVADYSVLYNSASFSTFKCYGVSPTKLNDLCFTNVYADSFVIRGDEVRQIAPGQTGKIADYNYKLPDDFTGCVIAWNSNNLDSKVGGNYNYLYRLFRKSNLKPFERDISTEIYQAGSTPCNGVEGFNCYFPLQSYGFQPTNGVGYQPYRVVVLSFELLHAPATVCGPKKSTNLVKNKCVNFNFNGLTGTGVLTESNKKFLPFQQFGRDIADTTDAVRDPQTLEILDITPCSFGGVSVITPGTNTSNQVAVLYQGVNCTEVPVAIHADQLTPTWRVYSTGSNVFQTRAGCLIGAEHVNNSYECDIPIGAGICASYQTQTNSPRRARSVASQSIIAYTMSLGAENSVAYSNNSIAIPTNFTISVTTEILPVSMTKTSVDCTMYICGDSTECSNLLLQYGSFCTQLNRALTGIAVEQDKNTQEVFAQVKQIYKTPPIKDFGGFNFSQILPDPSKPSKRSFIEDLLFNKVTLADAGFIKQYGDCLGDIAARDLICAQKFNGLTVLPPLLTDEMIAQYTSALLAGTITSGWTFGAGAALQIPFAMQMAYRFNGIGVTQNVLYENQKLIANQFNSAIGKIQDSLSSTASALGKLQDVVNQNAQALNTLVKQLSSNFGAISSVLNDILSRLDPPEAEVQIDRLITGRLQSLQTYVTQQLIRAAEIRASANLAATKMSECVLGQSKRVDFCGKGYHLMSFPQSAPHGVVFLHVTYVPAQEKNFTTAPAICHDGKAHFPREGVFVSNGTHWFVTQRNFYEPQIITTDNTFVSGNCDVVIGIVNNTVYDPLQPELDSFKEELDKYFKNHTSPDVDLGDISGINASVVNIQKEIDRLNEVAKNLNESLIDLQELGKYEQYIKGGGGSDIIKLLNEQVNKEMQSSNLYMSMSSWCYTHSLDGAGLFLFDHAAEEYEHAKKLIIFLNENNVPVQLTSISAPEHKFEGLTQIFQKAYEHEQHISESINNIVDHAIKSKDHATFNFLQWYVAEQHEEEVLFKDILDKIELIGNENHGLYLADQYVKGIAKSRKS

SEQ ID NO: 4738 - protein, 1379 aa, Artificial Sequence
  SARS-CoV-2/Belgium/ULG-6939/2020__EPI_ISL_417020 spike protein (1-1211)(K986P_V987P) Ferritin construct
MFVFLVLLPLVSSQCVNLTTRTQLPPAYTNSFTRGVYYPDKVFRSSVLHSTQDLFLPFFSNVTWFHAIHVSGTNGTKRFDNPVLPFNDGVYFASTEKSNIIRGWIFGTTLDSKTQSLLIVNNATNVVIKVCEFQFCNDPFLGVYYHKNNKSWMESEFRVYSSANNCTFEYVSQPFLMDLEGKQGNFKNLREFVFKNIDGYFKIYSKHTPINLVRDLPQGFSALEPLVDLPIGINITRFQTLLALHRSYLTPGDSSSGWTAGAAAYYVGYLQPRTFLLKYNENGTITDAVDCALDPLSETKCTLKSFTVEKGIYQTSNFRVQPTESIVRFPNITNLCPFGEVFNATRFASVYAWNRKRISNCVADYSVLYNSASFSTFKCYGVSPTKLNDLCFTNVYADSFVIRGDEVRQIAPGQTGKIADYNYKLPDDFTGCVIAWNSNNLDSKVGGNYNYLYRLFRKSNLKPFERDISTEIYQAGSTPCNGVEGFNCYFPLQSYGFQPTNGVGYQPYRVVVLSFELLHAPATVCGPKKSTNLVKNKCVNFNFNGLTGTGVLTESNKKFLPFQQFGRDIADTTDAVRDPQTLEILDITPCSFGGVSVITPGTNTSNQVAVLYQGVNCTEVPVAIHADQLTPTWRVYSTGSNVFQTRAGCLIGAEHVNNSYECDIPIGAGICASYQTQTNSPRRARSVASQSIIAYTMSLGAENSVVYSNNSIAIPTNFTISVTTEILPVSMTKTSVDCTMYICGDSTECSNLLLQYGSFCTQLNRALTGIAVEQDKNTQEVFAQVKQIYKTPPIKDFGGFNFSQILPDPSKPSKRSFIEDLLFNKVTLADAGFIKQYGDCLGDIAARDLICAQKFNGLTVLPPLLTDEMIAQYTSALLAGTITSGWTFGAGAALQIPFAMQMAYRFNGIGVTQNVLYENQKLIANQFNSAIGKIQDSLSSTASALGKLQDVVNQNAQALNTLVKQLSSNFGAISSVLNDILSRLDPPEAEVQIDRLITGRLQSLQTYVTQQLIRAAEIRASANLAATKMSECVLGQSKRVDFCGKGYHLMSFPQSAPHGVVFLHVTYVPAQEKNFTTAPAICHDGKAHFPREGVFVSNGTHWFVTQRNFYEPQIITTDNTFVSGNCDVVIGIVNNTVYDPLQPELDSFKEELDKYFKNHTSPDVDLGDISGINASVVNIQKEIDRLNEVAKNLNESLIDLQELGKYEQYIKGGGGSDIIKLLNEQVNKEMQSSNLYMSMSSWCYTHSLDGAGLFLFDHAAEEYEHAKKLIIFLNENNVPVQLTSISAPEHKFEGLTQIFQKAYEHEQHISESINNIVDHAIKSKDHATFNFLQWYVAEQHEEEVLFKDILDKIELIGNENHGLYLADQYVKGIAKSRKS

SEQ ID NO: 4739 - protein, 1379 aa, Artificial Sequence
  SARS-CoV-2/France/HF2496/2020__EPI_ISL_418231 spike protein (1-1211)(K986P_V987P) Ferritin construct
MFVFLVLLPLVSSQCVNLTTRTQLPPAYTNSFTRGVYYPDKVFRSSVLHSTQDLFLPFFSNVTWFHAIHVSGTNGTKRFDNPVLPFNDGVYFASTEKSNIIRGWIFGTTLDSKTQSLLIVNNATNVVIKVCEFQFCNDPFLGVYYHKNNKSWMESEFRVYSSANNCTFEYVSQPFLMDLEGKQGNFKNLREFVFKNIDGYFKIYSKHTPINLVRDLPQGFSALEPLVDLPIGINITRFQTLLALHRSYLTPGDSSSGWTAGAAAYYVGYLQPRTFLLKYNENGTITDAVDCALDPLSETKCTLKSFTVEKGIYQTSNFRVQPTESIVRFPNITNLCPFGEVFNATRFASVYAWNRKRISNCVADYSVLYNSASFSTFKCYGVSPTKLNDLCFTNVYADSFVIRGDEVRQIAPGQTGKIADYNYKLPDDFTGCVIAWNSNNLDSKVGGNYNYLYRLFRKSNLKPFERDISTEIYQAGSTPCNGVEGFNCYFPLQSYGFQPTNGVGYQPYRVVVLSFELLHAPATVCGPKKSTNLVKNKCVNFNFNGLTGTGVLTESNKKFLPFQQFGRDIADTTDAVRDPQTLEILDITPCSFGGVSVITPGTNTSNQVAVLYQGVNCTEVPVAIHADQLTPTWRVYSTGSNVFQTRAGCLIGAEHVNNSYECDIPIGAGICASYQTQTNSPRRARSVASQSIIAYTMSLGAENSVAYSNNSIAIPTNFTISVTTEILPVSMTKTSVDCTMYICGDSTECSNLLLQYGSFCTQLNRALTGIAVEQDKNTQEVFAQVKQIYKTPPIKDFGGFNFSQILPDPSKPSKRSFIEDLLFNKVTLADAGFIKQYGDCLGDIVARDLICAQKFNGLTVLPPLLTDEMIAQYTSALLAGTITSGWTFGAGAALQIPFAMQMAYRFNGIGVTQNVLYENQKLIANQFNSAIGKIQDSLSSTASALGKLQDVVNQNAQALNTLVKQLSSNFGAISSVLNDILSRLDPPEAEVQIDRLITGRLQSLQTYVTQQLIRAAEIRASANLAATKMSECVLGQSKRVDFCGKGYHLMSFPQSAPHGVVFLHVTYVPAQEKNFTTAPAICHDGKAHFPREGVFVSNGTHWFVTQRNFYEPQIITTDNTFVSGNCDVVIGIVNNTVYDPLQPELDSFKEELDKYFKNHTSPDVDLGDISGINASVVNIQKEIDRLNEVAKNLNESLIDLQELGKYEQYIKGGGGSDIIKLLNEQVNKEMQSSNLYMSMSSWCYTHSLDGAGLFLFDHAAEEYEHAKKLIIFLNENNVPVQLTSISAPEHKFEGLTQIFQKAYEHEQHISESINNIVDHAIKSKDHATFNFLQWYVAEQHEEEVLFKDILDKIELIGNENHGLYLADQYVKGIAKSRKS

SEQ ID NO: 4740 - protein, 1379 aa, Artificial Sequence
  SARS-CoV-2/USA/WA-UW291/2020__EPI_ISL_418076 spike protein (1-1211)(K986P_V987P) Ferritin construct
MFVFLVLLPLVSSQCVNLTTRTQLPPAYTNSFTRGVYYPDKVFRSSVLHSTQDLFLPFFSNVTWFHAIHVSGTNGTKRFDNPVLPFNDGVYFASTEKSNIIRGWIFGTTLDSKTQSLLIVNNATNVVIKVCEFQFCNDPFLGVYYHKNNKSWMESEFRVYSSANNCTFEYVSQPFLMDLEGKQGNFKNLREFVFKNIDGYFKIYSKHTPINLVRDLPQGFSALEPLVDLPIGINITRFQTLLALHRSYLTPGDSSSGWTAGAAAYYVGYLQPRTFLLKYNENGTITDAVDCALDPLSETKCTLKSFTVEKGIYQTSNFRVQPTESIVRFPNITNLCPFGEVFNATRFASVYAWNRKRISNCVADYSVLYNSASFSTFKCYGVSPTKLNDLCFTNVYADSFVIRGDEVRQIAPGQTGKIADYNYKLPDDFTGCVIAWNSNNLDSKVGGNYNYLYRLFRKSNLKPFERDISTEIYQAGSTPCNGVEGFNCYFPLQSYGFQPTNGVGYQPYRVVVLSFELLHAPATVCGPKKSTNLVKNKCVNFNFNGLTGTGVLTESNKKFLPFQQFGRDIADTTDAVRDPQTLEILDITPCSFGGVSVITPGTNTSNQVAVLYQGVNCTEVPVAIHADQLTPTWRVYSTGSNVFQTRAGCLIGAEHVNNSYECDIPIGAGICASYQTQTNSPRRARSVASQSIIAYTMSLGAENSVAYSNNSIAIPTNFTISVTTEILPVSMTKTSVDCTMYICGDSTECSNLLLQYGSFCTQLNRALTGIAVEQDKNTQEVFAQVKQIYKTPPIKDFGGFNFSQILPDPSKPSKRSFIEDLLFNKVTLADAGFIKQYGDCLGDIAARDLICAQKFNGLTVLPPLLTDEMIAQYTSALLAGTITSGWTFGAGAALQIPFAMQMAYRFNGIGVTQNVLYENQKLIANQFNSAIGKIQYSLSSTASALGKLQDVVNQNAQALNTLVKQLSSNFGAISSVLNDILSRLDPPEAEVQIDRLITGRLQSLQTYVTQQLIRAAEIRASANLAATKMSECVLGQSKRVDFCGKGYHLMSFPQSAPHGVVFLHVTYVPAQEKNFTTAPAICHDGKAHFPREGVFVSNGTHWFVTQRNFYEPQIITTDNTFVSGNCDVVIGIVNNTVYDPLQPELDSFKEELDKYFKNHTSPDVDLGDISGINASVVNIQKEIDRLNEVAKNLNESLIDLQELGKYEQYIKGGGGSDIIKLLNEQVNKEMQSSNLYMSMSSWCYTHSLDGAGLFLFDHAAEEYEHAKKLIIFLNENNVPVQLTSISAPEHKFEGLTQIFQKAYEHEQHISESINNIVDHAIKSKDHATFNFLQWYVAEQHEEEVLFKDILDKIELIGNENHGLYLADQYVKGIAKSRKS

SEQ ID NO: 4741 - protein, 1379 aa, Artificial Sequence; identical to SEQ ID NO: 4704
  SARS-CoV-2/Portugal/PT0034/2020__EPI_ISL_418019 spike protein (1-1211)(K986P_V987P) Ferritin construct

SEQ ID NO: 4742 - protein, 1379 aa, Artificial Sequence
  SARS-CoV-2/Iceland/202/2020__EPI_ISL_417750 spike protein (1-1211)(K986P_V987P) Ferritin construct
MFVFLVLLPLVSSQCVNLTTRTQLPPAYTNSFTRGVYYPDKVFRSSVLHSTQDLFLPFFSNVTWFHAIHVSGTNGTKRFDNPVLPFNDGVYFASTEKSNIIRGWIFGTTLDSKTQSLLIVNNATNVVIKVCEFQFCNDPFLGVYYHKNNKSWMESEFRVYSSANNCTFEYVSQPFLMDLEGKQGNFKNLREFVFKNIDGYFKIYSKHTPINLVRDLPQGFSALEPLVDLPIGINITRFQTLLALHRSYLTPGDSSSGWTAGAAAYYVGYLQPRTFLLKYNENGTITDAVDCALDPLSETKCTLKSFTVEKGIYQTSNFRVQPTESIVRFPNITNLCPFGEVFNATRFASVYAWNRKRISNCVADYSVLYNSASFSTFKCYGVSPTKLNDLCFTNVYADSFVIRGDEVRQIAPGQTGKIADYNYKLPDDFTGCVIAWNSNNLDSKVGGNYNYLYRLFRKSNLKPFERDISTEIYQAGSTPCNGVEGFNCYFPLQSYGFQPTNGVGYQPYRVVVLSFELLHAPATVCGPKKSTNLVKNKCVNFNFNGLTGTGVLTESNKKFLPFQQFGRDIADTTDAVRDPQTLEILDITPCSFGGVSVITPGTNTSNQVAVLYQDVNCTEVPVAIHADQLTPTWRVYSTGSNVFQTRAGCLIGAEHVNNSYECDIPIGAGICASYQTQTNSPRRARSVASQSIIAYTMSLGAENSVAYSNNSIAIPTNFTISVTTEILPVSMTKTSVDCTMYICGDSTECSNLLLQYGSFCTQLNRALTGIAVEQDKNTQEVFAQVKQIYKTPPIKDFGGFNFSQILPDPSKPSKRSFIEDLLFNKVTLADAGFIKQYGDCLGDIAARDLICAQKFNGLTVLPPLLTDEMIAQYTSALLAGTITSGWTFGAGAALQIPFAMQMAYRFNGIGVTQNVLYENQKLIANQFNSAIGKIQDSLSSTASALGKLQDVVNQNAQALNTLVKQLSSNFGAISSVLNDILSRLDPPEAEVQIDRLITGRLQSLQTYVTQQLIRAAEIRASANLAATKMSECVLGQSKRVDFCGKGYHLMSFPQSAPHGVVFLHVTYVPAQEKNFTTAPAICHDGKAHFPREGVFVSNGTHWFVTQRNFYEPQIITTDNTFVSGNCDVVIGIVNNTVYDPLQPELDSFKEELDKYFKNHTSPDVDLGDIPGINASVVNIQKEIDRLNEVAKNLNESLIDLQELGKYEQYIKGGGGSDIIKLLNEQVNKEMQSSNLYMSMSSWCYTHSLDGAGLFLFDHAAEEYEHAKKLIIFLNENNVPVQLTSISAPEHKFEGLTQIFQKAYEHEQHISESINNIVDHAIKSKDHATFNFLQWYVAEQHEEEVLFKDILDKIELIGNENHGLYLADQYVKGIAKSRKS

SEQ ID NO: 4743 - protein, 1379 aa, Artificial Sequence
  SARS-CoV-2/USA/WA-UW261/2020__EPI_ISL_418046 spike protein (1-1211)(K986P_V987P) Ferritin construct
MFVFLVLLPLVSSQCVNLTTRTQLPPAYTNSFTRGVYYPDKVFRSSVLHSTQDLFLPFFSNVTWFHAIHVSGTNGTKRFDNPVLPFNDGVYFASTEKSNIIRGWIFGTTLDSKTQSLLIVNNATNVVIKVCEFQFCNDPFLGVYYHKNNKSWMESEFRVYSSANNCTFEYVSQPFLMDLEGKQGNFKNLREFVFKNIDGYFKIYSKHTPINLVRDLPQGFSALEPLVDLPIGINITRFQTLLALHRSYLTPGDSSSGWTAGAAAYYVGYLQPRTFLLKYNENGTITDAVDCALDPLSETKCTLKSFTVEKGIYQTSNFRVQPTESIVRFPNITNLCPFGEVFNATRFTSVYAWNRKRISNCVADYSVLYNSASFSTFKCYGVSPTKLNDLCFTNVYADSFVIRGDEVRQIAPGQTGKIADYNYKLPDDFTGCVIAWNSNNLDSKVGGNYNYLYRLFRKSNLKPFERDISTEIYQAGSTPCNGVEGFNCYFPLQSYGFQPTNGVGYQPYRVVVLSFELLHAPATVCGPKKSTNLVKNKCVNFNFNGLTGTGVLTESNKKFLPFQQFGRDIADTTDAVRDPQTLEILDITPCSFGGVSVITPGTNTSNQVAVLYQDVNCTEVPVAIHADQLTPTWRVYSTGSNVFQTRAGCLIGAEHVNNSYECDIPIGAGICASYQTQTNSPRRARSVASQSIIAYTMSLGAENSVAYSNNSIAIPTNFTISVTTEILPVSMTKTSVDCTMYICGDSTECSNLLLQYGSFCTQLNRALTGIAVEQDKNTQEVFAQVKQIYKTPPIKDFGGFNFSQILPDPSKPSKRSFIEDLLFNKVTLADAGFIKQYGDCLGDIAARDLICAQKFNGLTVLPPLLTDEMIAQYTSALLAGTITSGWTFGAGAALQIPFAMQMAYRFNGIGVTQNVLYENQKLIANQFNSAIGKIQDSLSSTASALGKLQDVVNQNAQALNTLVKQLSSNFGAISSVLNDILSRLDPPEAEVQIDRLITGRLQSLQTYVTQQLIRAAEIRASANLAATKMSECVLGQSKRVDFCGKGYHLMSFPQSAPHGVVFLHVTYVPAQEKNFTTAPAICHDGKAHFPREGVFVSNGTHWFVTQRNFYEPQIITTDNTFVSGNCDVVIGIVNNTVYDPLQPELDSFKEELDKYFKNHTSPDVDLGDISGINASVVNIQKEIDRLNEVAKNLNESLIDLQELGKYEQYIKGGGGSDIIKLLNEQVNKEMQSSNLYMSMSSWCYTHSLDGAGLFLFDHAAEEYEHAKKLIIFLNENNVPVQLTSISAPEHKFEGLTQIFQKAYEHEQHISESINNIVDHAIKSKDHATFNFLQWYVAEQHEEEVLFKDILDKIELIGNENHGLYLADQYVKGIAKSRKS

SEQ ID NO: 4744 - protein, 1379 aa, Artificial Sequence
  SARS-CoV-2/Portugal/PT0035/2020__EPI_ISL_418020 spike protein (1-1211)(K986P_V987P) Ferritin construct
MFVFLVLLPLVSSQCVNLTTRTQLPPAYTNSFTRGVYYPDKVFRSSVLHSTQDLFLPFFSNVTWFHAIHVSGTNGTKRFDNPVLPFNDGVYFASTEKSNIIRGWIFGTTLDSKTQSLLIVNNATNVVIKVCEFQFCNDPFLGVYYHKNNKSWMESEFRVYSSANNCTFEYVSQPFLMDLEGKQGNFKNLREFVFKNIDGYFKIYSKHTPINLVRDLPQGFSALEPLVDLPIGINITRFQTLLALHRSYLTPGDSSSGWTAGAAAYYVGYLQPRTFLLKYNENGTITDAVDCALDPLSETKCTLKSFTVEKGIYQTSNFRVQPTESIVRFPNITNLCPFGEVFNATRFASVYAWNRKRISNCVADYSVLYNSASFSTFKCYGVSPTKLNDLCFTNVYADSFVIRGDEVRQIAPGQTGKIADYNYKLPDDFTGCVIAWNSNNLDSKVGGNYNYLYRLFRKSNLKPFERDISTEIYQAGSTPCNGVEGFNCYFPLQSYGFQPTNGVGYQPYRVVVLSFELLHAPATVCGPKKSTNLVKNKCVNFNFNGLTGTGVLTESNKKFLPFQQFGRDIADTTDAVRDPQTLEILDITPCSFGGVSVITPGTNTSNQVAVLYQDVNCTEVPVAIHADQLTPTWRVYSTGSNVFQTRAGCLIGAEHVNNSYECDIPIGAGICASYQTQTNSPRRARSVASQSIIAYTMSLGAENSVAYSNNSIAIPTNFTISVTTEILPVSMTKTSVDCTMYICGDSTECSNLLLQYGSFCTQLNRALTGIAVEQDKNTQEVFAQVKQIYKTPPIKDFGGFNFSQILPDPSKPSKRSFIEDLLFNKVTLADAGFIKQYGDCLGDISARDLICAQKFNGLTVLPPLLTDEMIAQYTSALLAGTITSGWTFGAGAALQIPFAMQMAYRFNGIGVTQNVLYENQKLIANQFNSAIGKIQDSLSSTASALGKLQDVVNQNAQALNTLVKQLSSNFGAISSVLNDILSRLDPPEAEVQIDRLITGRLQSLQTYVTQQLIRAAEIRASANLAATKMSECVLGQSKRVDFCGKGYHLMSFPQSAPHGVVFLHVTYVPAQEKNFTTAPAICHDGKAHFPREGVFVSNGTHWFVTQRNFYEPQIITTDNTFVSGNCDVVIGIVNNTVYDPLQPELDSFKEELDKYFKNHTSPDVDLGDISGINASVVNIQKEIDRLNEVAKNLNESLIDLQELGKYEQYIKGGGGSDIIKLLNEQVNKEMQSSNLYMSMSSWCYTHSLDGAGLFLFDHAAEEYEHAKKLIIFLNENNVPVQLTSISAPEHKFEGLTQIFQKAYEHEQHISESINNIVDHAIKSKDHATFNFLQWYVAEQHEEEVLFKDILDKIELIGNENHGLYLADQYVKGIAKSRKS

SEQ ID NO: 4745 - protein, 1379 aa, Artificial Sequence
  SARS-CoV-2/USA/NY-NYUMC7/2020__EPI_ISL_418192 spike protein (1-1211)(K986P_V987P) Ferritin construct
MFVFLVLLPLVSSQCVNLTTRTQLPPAYTNSFTRGVYYPDKVFRSSVLHSTQDLFLPFFSNVTWFHAIHVSGTNGTKRFDNPVLPFNDGVYFASTEKSNIIRGWIFGTTLDSKTQSLLIVNNATNVVIKVCEFQFCNDPFLGVYHHKNNKSWMESEFRVYSSANNCTFEYVSQPFLMDLEGKQGNFKNLREFVFKNIDGYFKIYSKHTPINLVRDLPQGFSALEPLVDLPIGINITRFQTLLALHRSYLTPGDSSSGWTAGAAAYYVGYLQPRTFLLKYNENGTITDAVDCALDPLSETKCTLKSFTVEKGIYQTSNFRVQPTESIVRFPNITNLCPFGEVFNATRFASVYAWNRKRISNCVADYSVLYNSASFSTFKCYGVSPTKLNDLCFTNVYADSFVIRGDEVRQIAPGQTGKIADYNYKLPDDFTGCVIAWNSNNLDSKVGGNYNYLYRLFRKSNLKPFERDISTEIYQAGSTPCNGVEGFNCYFPLQSYGFQPTNGVGYQPYRVVVLSFELLHAPATVCGPKKSTNLVKNKCVNFNFNGLTGTGVLTESNKKFLPFQQFGRDIADTTDAVRDPQTLEILDITPCSFGGVSVITPGTNTSNQVAVLYQGVNCTEVPVAIHADQLTPTWRVYSTGSNVFQTRAGCLIGAEHVNNSYECDIPIGAGICASYQTQTNSPRRARSVASQSIIAYTMSLGAENSVAYSNNSIAIPTNFTISVTTEILPVSMTKTSVDCTMYICGDSTECSNLLLQYGSFCTQLNRALTGIAVEQDKNTQEVFAQVKQIYKTPPIKDFGGFNFSQILPDPSKPSKRSFIEDLLFNKVTLADAGFIKQYGDCLGDIAARDLICAQKFNGLTVLPPLLTDEMIAQYTSALLAGTITSGWTFGAGAALQIPFAMQMAYRFNGIGVTQNVLYENQKLIANQFNSAIGKIQDSLSSTASALGKLQDVVNQNAQALNTLVKQLSSNFGAISSVLNDILSRLDPPEAEVQIDRLITGRLQSLQTYVTQQLIRAAEIRASANLAATKMSECVLGQSKRVDFCGKGYHLMSFPQSAPHGVVFLHVTYVPAQEKNFTTAPAICHDGKAHFPREGVFVSNGTHWFVTQRNFYEPQIITTDNTFVSGNCDVVIGIVNNTVYDPLQPELDSFKEELDKYFKNHTSPDVDLGDISGINASVVNIQKEIDRLNEVAKNLNESLIDLQELGKYEQYIKGGGGSDIIKLLNEQVNKEMQSSNLYMSMSSWCYTHSLDGAGLFLFDHAAEEYEHAKKLIIFLNENNVPVQLTSISAPEHKFEGLTQIFQKAYEHEQHISESINNIVDHAIKSKDHATFNFLQWYVAEQHEEEVLFKDILDKIELIGNENHGLYLADQYVKGIAKSRKS

SEQ ID NO: 4746 - protein, 1379 aa, Artificial Sequence
  SARS-CoV-2/Iceland/189/2020__EPI_ISL_417709 spike protein (1-1211)(K986P_V987P) Ferritin construct
MFVFLVLLPLVSSQCVNLTTRTQLPPAYTNSFTRGVYYPDKVFRSSVLHSTQDLFLPFFSNVTWFHAIHVSGTNGTKRFDNPVLPFNDGVYFASTEKSNIIRGWIFGTTLDSKTQSLLIVNNATNVVIKVCEFQFCNDPFLGVYYHKNNKSWMESEFRVYSSANNCTFEYVSQPFLMDLEGKQGNFKNLREFVFKNIDGYFKIYSKHTPINLVRDLPQGFSALEPLVDLPIGINITRFQTLLALHRSYLTPGDSSSGWTAGAAAYYVGYLQPRTFLLKYNENGTITDAVDCALDPLSETKCTLKSFTVEKGIYQTSNFRVQPTESIVRFPNITNLCPFGEVFNATRFASVYAWNRKRISNCVADYSVLYNSASFSTFKCYGVSPTKLNDLCFTNVYADSFVIRGDEVRQIAPGQTGKIADYNYKLPDDFTGCVIAWNSNNLDSKVGGNYNYLYRLFRKSNLKPFERDISTEIYQAGSTPCNGVEGFNCYFPLQSYGFQPTNGVGYQPYRVVVLSFELLHAPATVCGPKKSTNLVKNKCVNFNFNGLTGTGVLTESNKKFLPFQQFGRDIADTTDAVRDPQTLEILDITPCSFGGVSVITPGTNTSNQVAVLYQGVNCTEVPVAIHADQLTPTWRVYSTGSNVFQTRAGCLIGAEHVNNSYECDIPIGAGICASYQTQTNSPRRARSVASQSIIAYTMSLGAENSVAYSNNSIAIPTNFTISVTTEILPVSMTKTSVDCTMYICGDSTECSNLLLQYGSFCTQLNRALTGIAVEQDKNTQEVFAQVKQIYKTPPIKDFGGFNFSQILPDPSKPSKRSFIEDLLFNKVTLADAGFTKQYGDCLGDIAARDLICAQKFNGLTVLPPLLTDEMIAQYTSALLAGTITSGWTFGAGAALQIPFAMQMAYRFNGIGVTQNVLYENQKLIANQFNSAIGKIQDSLSSTASALGKLQDVVNQNAQALNTLVKQLSSNFGAISSVLNDILSRLDPPEAEVQIDRLITGRLQSLQTYVTQQLIRAAEIRASANLAATKMSECVLGQSKRVDFCGKGYHLMSFPQSAPHGVVFLHVTYVPAQEKNFTTAPAICHDGKAHFPREGVFVSNGTHWFVTQRNFYEPQIITTDNTFVSGNCDVVIGIVNNTVYDPLQPELDSFKEELDKYFKNHTSPDVDLGDISGINASVVNIQKEIDRLNEVAKNLNESLIDLQELGKYEQYIKGGGGSDIIKLLNEQVNKEMQSSNLYMSMSSWCYTHSLDGAGLFLFDHAAEEYEHAKKLIIFLNENNVPVQLTSISAPEHKFEGLTQIFQKAYEHEQHISESINNIVDHAIKSKDHATFNFLQWYVAEQHEEEVLFKDILDKIELIGNENHGLYLADQYVKGIAKSRKS

SEQ ID NO: 4747 - protein, 1379 aa, Artificial Sequence
  SARS-CoV-2/Australia/NSW56/2020__EPI_ISL_417408 spike protein (1-1211)(K986P_V987P) Ferritin construct
MFVFLVLLPLVSSQCVNLTTRTQLPPAYTNSFTRGVYYPDKVFRSSVLHSTQDLFLPFFSNVTWFHAIHVSGTNGTKRFDNPVLPFNDGVYFASTEKSNIIRGWIFGTTLDSKTQSLLIVNNATNVVIKVCEFQFCNDPFLGVYYHKNNKSWMESEFRVYSSANNCTFEYVSQPFLMDLEGKQGNFKNLREFVFKNIDGYFKIYSKHTPINLVRDLPQGFSALEPLVDLPIGINITRFQTLLALHRSYLTPGDSSSGWTAGAAAYYVGYLQPRTFLLKYNENGTITDAVDCALDPLSETKCTLKSFTVEKGIYQTSNFRVQPTESIVRFPNITNLCPFGEVFNATRFASVYAWNRKRISNCVADYSVLYNSASFSTFKCYGVSPTKLNDLCFTNVYADSFVIRGDEVRQIAPGQTGKIADYNYKLPDDFTGCVIAWNSNNLDSKVGGNYNYLYRLFRKSNLKPFERDISTEIYQAGSTPCNGVEGFNCYFPLQSYGFQPTNGVGYQPYRVVVLSFELLHAPATVCGPKKSTNLVKNKCVNFNFNGLTGTGVLTESNKKFLPFQQFGRDIADTTDAVRDPQTLEILDITPCSFGGVSVITPGTNTSNQVAVLYQDVNCTEVPVAIHADQLTPTWRVYSTGSNVFQTRAGCLIGAEHVNNSYECDIPIGAGICASYQTQTNSPRRARSVASQSIIAYTMSLGAENSVAYSNNSIAIPTNFTISVTTEILPVSMTKTSVDCTMYICGDSTECSNLLLQYGSFCTQLNRALTGIAVEQDKNTQEVFAQVKQIYKTPPIKDFGGFNFSQILPDSSKPSKRSFIEDLLFNKVTLADAGFIKQYGDCLGDIAARDLICAQKFNGLTVLPPLLTDEMIAQYTSALLAGTITSGWTFGAGAALQIPFAMQMAYRFNGIGVTQNVLYENQKLIANQFNSAIGKIQDSLSSTASALGKLQDVVNQNAQALNTLVKQLSSNFGAISSVLNDILSRLDPPEAEVQIDRLITGRLQSLQTYVTQQLIRAAEIRASANLAATKMSECVLGQSKRVDFCGKGYHLMSFPQSAPHGVVFLHVTYVPAQEKNFTTAPAICHDGKAHFPREGVFVSNGTHWFVTQRNFYEPQIITTDNTFVSGNCDVVIGIVNNTVYDPLQPELDSFKEELDKYFKNHTSPDVDLGDISGINASVVNIQKEIDRLNEVAKNLNESLIDLQELGKYEQYIKGGGGSDIIKLLNEQVNKEMQSSNLYMSMSSWCYTHSLDGAGLFLFDHAAEEYEHAKKLIIFLNENNVPVQLTSISAPEHKFEGLTQIFQKAYEHEQHISESINNIVDHAIKSKDHATFNFLQWYVAEQHEEEVLFKDILDKIELIGNENHGLYLADQYVKGIAKSRKS

SEQ ID NO: 4748 - protein, 1379 aa, Artificial Sequence
  SARS-CoV-2/Iceland/280/2020__EPI_ISL_417608 spike protein (1-1211)(K986P_V987P) Ferritin construct
MFVFLVLLPLVSSQCVNLTTRTQLPPAYTNSFTRGVYYPDKVFRSSVLHSTQDLFLPFFSNVTWFHAIHVSGTNGTKRFDNPVLPFNDGVYFASTEKSNIIRGWIFGTTLDSKTQSLLIVNNATNVVIKVCEFQFCNDPFLGVYYHKNNKSWMESEFRVYSSANNCTFEYVSQPFLMDLEGKQGNFKNLREFVFKNIDGYFKIYSKHTPINLVRDLPQGFSALEPLVDLPIGINITRFQTLLALHRSYLTPGDSSSGWTAGAAAYYVGYLQPRTFLLKYNENGTITDAVDCALDPLSETKCTLKSFTVEKGIYQTSNFRVQPTESIVRFPNITNLCPFGEVFNATRFASVYAWNRKRISNCVADYSVLYNSASFSTFKCYGVSPTKLNDLCFTNVYADSFVIRGDEVRQIAPGQTGKIADYNYKLPDDFTGCVIAWNSNNLDSKVGGNYNYLYRLFRKSNLKPFERDISTEIYQAGSTPCNGVEGFNCYFPLQSYGFQPTNGVGYQPYRVVVLSFELLHAPATVCGPKKSTNLVKNKCVNFNFNGLTGTGVLTESNKKFLPFQQFGRDIADTTDAVRDPQTLEILDITPCSFGGVSVITPGTNTSNQVAVLYQGVNCTEVPVAIHADQLTPTWRVYSTGSNVFQTRAGCLIGAEHVNNSYECDIPIGAGICASYHTQTNSPRRARSVASQSIIAYTMSLGAENSVAYSNNSIAIPTNFTISVTTEILPVSMTKTSVDCTMYICGDSTECSNLLLQYGSFCTQLNRALTGIAVEQDKNTQEVFAQVKQIYKTPPIKDFGGFNFSQILPDPSKPSKRSFIEDLLFNKVTLADAGFIKQYGDCLGDIAARDLICAQKFNGLTVLPPLLTDEMIAQYTSALLAGTITSGWTFGAGAALQIPFAMQMAYRFNGIGVTQNVLYENQKLIANQFNSAIGKIQDSLSSTASALGKLQDVVNQNAQALNTLVKQLSSNFGAISSVLNDILSRLDPPEAEVQIDRLITGRLQSLQTYVTQQLIRAAEIRASANLAATKMSECVLGQSKRVDFCGKGYHLMSFPQSAPHGVVFLHVTYVPAQEKNFTTAPAICHDGKAHFPREGVFVSNGTHWFVTQRNFYEPQIITTDNTFVSGNCDVVIGIVNNTVYDPLQPELDSFKEELDKYFKNHTSPDVDLGDISGINASVVNIQKEIDRLNEVAKNLNESLIDLQELGKYEQYIKGGGGSDIIKLLNEQVNKEMQSSNLYMSMSSWCYTHSLDGAGLFLFDHAAEEYEHAKKLIIFLNENNVPVQLTSISAPEHKFEGLTQIFQKAYEHEQHISESINNIVDHAIKSKDHATFNFLQWYVAEQHEEEVLFKDILDKIELIGNENHGLYLADQYVKGIAKSRKS

SEQ ID NO: 4749 - protein, 1379 aa, Artificial Sequence; identical to SEQ ID NO: 4704
  SARS-CoV-2/Iceland/247/2020__EPI_ISL_417575 spike protein (1-1211)(K986P_V987P) Ferritin construct

SEQ ID NO: 4750 - protein, 1379 aa, Artificial Sequence
  SARS-CoV-2/Iceland/238/2020__EPI_ISL_417566 spike protein (1-1211)(K986P_V987P) Ferritin construct
MFVFLVLLPLVSSQCVNLTTRTQLPPAYTNSFTRGVYYPDKVFRSSVLHSTQDLFLPFFSNVTWFHAIHVSGTNGTKRFDNPVLPFNDGVYFASTEKSNIIRGWIFGTTLDSKTQSLLIVNNATNVVIKVCEFQFCNDPFLGVYYHKNNKSWMESEFRVYSSANNCTFEYVSQPFLMDLEGKQGNFKNLREFVFKNIDGYFKIYSKHTPINLVRDLPQGFSALEPLVDLPIGINITRFQTLLALHRSYLTPGDSSSGWTAGAAAYYVGYLQPRTFLLKYNENGTITDAVDCALDPLSETKCTLKSFTVEKGIYQTSNFRVQPTESIVRFPNITNLCPFGEVFNATRFASVYAWNRKRISNCVADYSVLYNSASFSTFKCYGVSPTKLNDLCFTNVYADSFVIRGDEVRQIAPGQTGKIADYNYKLPDDFTGCVIAWNSNNLDSKVGGNYNYLYRLFRKSNLKPFERDISTEIYQAGSTPCNGVEGFNCYFPLQSYGFQPTNGVGYQPYRVVVLSFELLHAPATVCGPKKSTNLVKNKCVNFNFNGLTGTGVLTESNKKFLPFQQFGRDIADTTDAVRDPQTLEILDITPCSFGGVSVITPGTNTSNQVAVLYQGVNCTEVPVAIHADQLTPTWRVYSTGSNVFQTRAGCLIGAEHVNNSYECDIPIGAGICASYQTQTNSPRRARSVASQSIIAYTMSLGAENSVAYSNNSIAIPTNFTISVTTEILPVSMTKTSVDCTMYICGDSTECSNLLLQYGSFCTQLNRALTGIAVEQDKNTQEVFAQVKQIYKTPPIKDFGGFNFSQILPDPSKPSKRSFIEDLLFNKVTLADVGFIKQYGDCLGDIAARDLICAQKFNGLTVLPPLLTDEMIAQYTSALLAGTITSGWTFGAGAALQIPFAMQMAYRFNGIGVTQNVLYENQKLIANQFNSAIGKIQDSLSSTASALGKLQDVVNQNAQALNTLVKQLSSNFGAISSVLNDILSRLDPPEAEVQIDRLITGRLQSLQTYVTQQLIRAAEIRASANLAATKMSECVLGQSKRVDFCGKGYHLMSFPQSAPHGVVFLHVTYVPAQEKNFTTAPAICHDGKAHFPREGVFVSNGTHWFVTQRNFYEPQIITTDNTFVSGNCDVVIGIVNNTVYDPLQPELDSFKEELDKYFKNHTSPDVDLGDISGINASVVNIQKEIDRLNEVAKNLNESLIDLQELGKYEQYIKGGGGSDIIKLLNEQVNKEMQSSNLYMSMSSWCYTHSLDGAGLFLFDHAAEEYEHAKKLIIFLNENNVPVQLTSISAPEHKFEGLTQIFQKAYEHEQHISESINNIVDHAIKSKDHATFNFLQWYVAEQHEEEVLFKDILDKIELIGNENHGLYLADQYVKGIAKSRKS

SEQ ID NO: 4751 - protein, 1379 aa, Artificial Sequence
  SARS-CoV-2/Greece/16/2020__EPI_ISL_418265 spike protein (1-1211)(K986P_V987P) Ferritin construct
MFVFLVLLPLVSSQCVNLTTRTQLPPAYTNSFTRGVYYPDKVFRSSVLHSTQDLFLPFFSNVTWFHAIHVSGTNGTKRFDNPVLPFNDGVYFASTEKSNIIRGWIFGTTLDSKTQSLLIVNNATNVVIKVCEFQFCNDPFLGVYYHKNNKSWMESEFRVYSSANNCTFEYVSQPFLMDLEGKQGNFKNLREFVFKNVDGYFKIYSKHTPINLVRDLPQGFSALEPLVDLPIGINITRFQTLLALHRSYLTPGDSSSGWTAGAAAYYVGYLQPRTFLLKYNENGTITDAVDCALDPLSETKCTLKSFTVEKGIYQTSNFRVQPTESIVRFPNITNLCPFGEVFNATRFASVYAWNRKRISNCVADYSVLYNSASFSTFKCYGVSPTKLNDLCFTNVYADSFVIRGDEVRQIAPGQTGKIADYNYKLPDDFTGCVIAWNSNNLDSKVGGNYNYLYRLFRKSNLKPFERDISTEIYQAGSTPCNGVEGFNCYFPLQSYGFQPTNGVGYQPYRVVVLSFELLHAPATVCGPKKSTNLVKNKCVNFNFNGLTGTGVLTESNKKFLPFQQFGRDIADTTDAVRDPQTLEILDITPCSFGGVSVITPGTNTSNQVAVLYQDVNCTEVPVAIHADQLTPTWRVYSTGSNVFQTRAGCLIGAEHVNNSYECDIPIGAGICASYQTQTNSPRRARSVASQSIIAYTMSLGAENSVAYSNNSIAIPTNFTISVTTEILPVSMTKTSVDCTMYICGDSTECSNLLLQYGSFCTQLNRALTGIAVEQDKNTQEVFAQVKQIYKTPPIKDFGGFNFSQILPDPSKPSKRSFIEDLLFNKVTLADAGFIKQYGDCLGDIAARDLICAQKFNGLTVLPPLLTDEMIAQYTSALLAGTITSGWTFGAGAALQIPFAMQMAYRFNGIGVTQNVLYENQKLIANQFNSAIGKIQDSLSSTASALGKLQDVVNQNAQALNTLVKQLSSNFGAISSVLNDILSRLDPPEAEVQIDRLITGRLQSLQTYVTQQLIRAAEIRASANLAATKMSECVLGQSKRVDFCGKGYHLMSFPQSAPHGVVFLHVTYVPAQEKNFTTAPAICHDGKAHFPREGVFVSNGTHWFVTQRNFYEPQIITTDNTFVSGNCDVVIGIVNNTVYDPLQPELDSFKEELDKYFKNHTSPDVDLGDISGINASVVNIQKEIDRLNEVAKNLNESLIDLQELGKYEQYIKGGGGSDIIKLLNEQVNKEMQSSNLYMSMSSWCYTHSLDGAGLFLFDHAAEEYEHAKKLIIFLNENNVPVQLTSISAPEHKFEGLTQIFQKAYEHEQHISESINNIVDHAIKSKDHATFNFLQWYVAEQHEEEVLFKDILDKIELIGNENHGLYLADQYVKGIAKSRKS

SEQ ID NO: 4752 - protein, 1379 aa, Artificial Sequence
  SARS-CoV-2/Iceland/319/2020__EPI_ISL_417648 spike protein (1-1211)(K986P_V987P) Ferritin construct
MFVFLVLLPLVSSQCVNLTTRTQLPPAYTNSFTRGVYYPDKVFRSSVLHSTQDLFLPFFSNVTWFHAIHVSGTNGTKRFDNPVLPFNDGVYFASTEKSNIIRGWIFGTTLDSKTQSLLIVNNATNVVIKVCEFQFCNDPFLGVYYHKNNKSWMESEFRVYSSANNCTFEYVSQPFLIDLEGKQGNFKNLREFVFKNIDGYFKIYSKHTPINLVRDLPQGFSALEPLVDLPIGINITRFQTLLALHRSYLTPGDSSSGWTAGAAAYYVGYLQPRTFLLKYNENGTITDAVDCALDPLSETKCTLKSFTVEKGIYQTSNFRVQPTESIVRFPNITNLCPFGEVFNATRFASVYAWNRKRISNCVADYSVLYNSASFSTFKCYGVSPTKLNDLCFTNVYADSFVIRGDEVRQIAPGQTGKIADYNYKLPDDFTGCVIAWNSNNLDSKVGGNYNYLYRLFRKSNLKPFERDISTEIYQAGSTPCNGVEGFNCYFPLQSYGFQPTNGVGYQPYRVVVLSFELLHAPATVCGPKKSTNLVKNKCVNFNFNGLTGTGVLTESNKKFLPFQQFGRDIADTTDAVRDPQTLEILDITPCSFGGVSVITPGTNTSNQVAVLYQGVNCTEVPVAIHADQLTPTWRVYSTGSNVFQTRAGCLIGAEHVNNSYECDIPIGAGICASYQTQTNSPRRARSVASQSIIAYTMSLGAENSVAYSNNSIAIPTNFTISVTTEILPVSMTKTSVDCTMYICGDSTECSNLLLQYGSFCTQLNRALTGIAVEQDKNTQEVFAQVKQIYKTPPIKDFGGFNFSQILPDPSKPSKRSFIEDLLFNKVTLADAGFIKQYGDCLGDIAARDLICAQKFNGLTVLPPLLTDEMIAQYTSALLAGTITSGWTFGAGAALQIPFAMQMAYRFNGIGVTQNVLYENQKLIANQFNSAIGKIQDSLSSTASALGKLQDVVNQNAQALNTLVKQLSSNFGAISSVLNDILSRLDPPEAEVQIDRLITGRLQSLQTYVTQQLIRAAEIRASANLAATKMSECVLGQSKRVDFCGKGYHLMSFPQSAPHGVVFLHVTYVPAQEKNFTTAPAICHDGKAHFPREGVFVSNGTHWFVTQRNFYEPQIITTDNTFVSGNCDVVIGIVNNTVYDPLQPELDSFKEELDKYFKNHTSPDVDLGDISGINASVVNIQKEIDRLNEVAKNLNESLIDLQELGKYEQYIKGGGGSDIIKLLNEQVNKEMQSSNLYMSMSSWCYTHSLDGAGLFLFDHAAEEYEHAKKLIIFLNENNVPVQLTSISAPEHKFEGLTQIFQKAYEHEQHISESINNIVDHAIKSKDHATFNFLQWYVAEQHEEEVLFKDILDKIELIGNENHGLYLADQYVKGIAKSRKS

SEQ ID NO: 4753 - protein, 1379 aa, Artificial Sequence
  SARS-CoV-2/Congo/94/2020__EPI_ISL_417947 spike protein (1-1211)(K986P_V987P) Ferritin construct
MFVFLVLLPLVSSQCVNLTTRTQLPPAYTNSFTRGVYYPDKVFRSSVLHSTQDLFLPFFSNVTWFHAIHVSGTNGTKRFDNPVLPFNDGVYFASTEKSNIIRGWIFGTTLDSKTQSLLIVNNATNVVIKVCEFQFCNDPFLGVYYHKNNKSWMESEFRVYSSANNCTFEYVSQPFLMDLEGKQGNFKNLREFVFKNIDGYFKIYSKHTPINLVRDLPQGFSALEPLVDLPIGINITRFQTLLALHRSYLTPGDSSSGWTAGAAAYYVGYLQPRTFLLKYNENGTITDAVDCALDPLSETKCTLKSFTVEKGIYQTSNFRVQPTESIVRFPNITNLCPFGEVFNATRFASVYAWNRKRISNCVADYSVLYNSASFSTFKCYGVSPTKLNDLCFTNVYADSFVIRGDEVRQIAPGQTGKIADYNYKLPDDFTGCVIAWNSNNLDSKVGGNYNYLYRLFRKSNLKPFERDISTEIYQAGSTPCNGVEGFNCYFPLQSYGFQPTNGVGYQPYRVVVLSFELLHAPATVCGPKKSTNLVKNKCVNFNFNGLTGTGVLTESNKKFLPFQQFGRDIADTTDAVRDPQTLEILDITPCSFGGVSVITPGTNTSNQVAVLYQGVNCTEVPVAIHADQLTPTWRVYSTGSNVFQTRAGCLIGAEHVNNSYECDIPIGAGICASYQTQTNSPRRARSVASQSIIAYTMSLGAENSVAYSNNSIAIPTNFTISVTTEILPVSMTKTSVDCTMYICGDSTECSNLLLQYGSFCTQLNRALTGIAVEQDKNTQEVFAQVKQIYKTPPIKDFGGFNFSQILPDPSKPSKRSFIEDILFNKVTLADAGFIKQYGDCLGDIAARDLICAQKFNGLTVLPPLLTDEMIAQYTSALLAGTITSGWTFGAGAALQIPFAMQMAYRFNGIGVTQNVLYENQKLIANQFNSAIGKIQDSLSSTASALGKLQDVVNQNAQALNTLVKQLSSNFGAISSVLNDILSRLDPPEAEVQIDRLITGRLQSLQTYVTQQLIRAAEIRASANLAATKMSECVLGQSKRVDFCGKGYHLMSFPQSAPHGVVFLHVTYVPAQEKNFTTAPAICHDGKAHFPREGVFVSNGTHWFVTQRNFYEPQIITTDNTFVSGNCDVVIGIVNNTVYDPLQPELDSFKEELDKYFKNHTSPDVDLGDISGINASVVNIQKEIDRLNEVAKNLNESLIDLQELGKYEQYIKGGGGSDIIKLLNEQVNKEMQSSNLYMSMSSWCYTHSLDGAGLFLFDHAAEEYEHAKKLIIFLNENNVPVQLTSISAPEHKFEGLTQIFQKAYEHEQHISESINNIVDHAIKSKDHATFNFLQWYVAEQHEEEVLFKDILDKIELIGNENHGLYLADQYVKGIAKSRKS

SEQ ID NO: 4754 - protein, 1379 aa, Artificial Sequence
  SARS-CoV-2/Congo/158/2020__EPI_ISL_417950 spike protein (1-1211)(K986P_V987P) Ferritin construct
MFVFLVLLPLVSSQCVNLTTRTQLPPAYTNSFTRGVYYPDKVFRSSVLHSTQDLFLPFFSNVTWFHAIHVSGTNGTKRFDNPVLPFNDGVYFASTEKSNIIRGWIFGTTLDSKTQSLLIVNNATNVVIKVCEFQFCNDPFLGVYYHKNNKSWMESEFRVYSSANNCTFEYVSQPFLMDLEGKQGNFKNLREFVFKNIDGYFKIYSKHTPINLVRDLPQGFSALEPLVDLPIGINITRFQTLLALHRSYLTPGDSSSGWTAGAAAYYVGYLQPRTFLLKYNENGTITDAVDCALDPLSETKCTLKSFTVEKGIYQTSNFRVQPTESIVRFPNITNLCPFGEVFNATRFASVYAWNRKRISNCVADYSVLYNSASFSTFKCYGVSPTKLNDLCFTNVYADSFVIRGDEVRQIAPGQTGKIADYNYKLPDDFTGCVIAWNSNNLDSKVGGNYNYLYRLFRKSNLKPFERDISTEIYQAGSTPCNGVEGFNCYFPLQSYGFQPTNGVGYQPYRVVVLSFELLHAPATVCGPKKSTNLVKNKCVNFNFNGLTGTGVLTESNKKFLPFQQFGRDIADTTDAVRDPQTLEILDITPCSFGGVSVITPGTNTSNQVAVLYQDVNCTEVPVAIHADQLTPTWRVYSTGSNVFQTRAGCLIGAEHVNNSYECDIPIGAGICASYQTQTNSPRRARSVASQSIIAYTMSLGAENSVAYSNNSIAIPTNFTISVTTEILPVSMTKTSVDCTMYICGDSTECSNLLLQYGSFCTQLNRALTGIAVEQDKNTQEVFAQVKQIYKTPPIKDFGGFNFSQILPDPSKPSKRSFIEDLLFNKVTLADAGFIKQYGDCLGDIAARDLICAQKFNGLTVLPPLLTDEMIAQYTSALLAGTITSGWTFGAGAALQIPFAMQMAYRFNGIGVTQNVLYENQKLIANQFNSAIGKIQDSLSSTASALGKLQDVVNQNAQALNTLVKQLSSNFGAISSVLNDILSRLDPPEAEVQIDRLITGRLQSLQTYVTQQLIRAAEIRASANLAATKMSECVLGQSKRVDFCGKGYHLMSFPQSAPHGVVFLHVTYVPAQEKNFTTAPAICHDGKAHFPREGVFVSNGTHWFVTQRNFYEPQIITTDNTFLSGNCDVVIGIVNNTVYDPLQPELDSFKEELDKYFKNHTSPDVDLGDISGINASVVNIQKEIDRLNEVAKNLNESLIDLQELGKYEQYIKGGGGSDIIKLLNEQVNKEMQSSNLYMSMSSWCYTHSLDGAGLFLFDHAAEEYEHAKKLIIFLNENNVPVQLTSISAPEHKFEGLTQIFQKAYEHEQHISESINNIVDHAIKSKDHATFNFLQWYVAEQHEEEVLFKDILDKIELIGNENHGLYLADQYVKGIAKSRKS

SEQ ID NO: 4755 - protein, 1379 aa, Artificial Sequence
  SARS-CoV-2/USA/UT-00034/2020__EPI_ISL_417977 spike protein (1-1211)(K986P_V987P) Ferritin construct
MFVFLVLLPLVSSQCVNLTTRTQLPPAYTNSFTRGVYYPDKVFRSSVLHSTQDLFLPFFSNVTWFHAIHVSGTNGTKRFDNPVLPFNDGVYFASTEKSNIIRGWIFGTTLDSKTQSLLIVNNATNVVIKVCEFQFCNDPFLGVYYYKNNKSWMESEFRVYSSANNCTFEYVSQPFLMDLEGKQGNFKNLREFVFKNIDGYFKIYSKHTPINLVRDLPQGFSALEPLVDLPIGINITRFQTLLALHRSYLTPGDSSSGWTAGAAAYYVGYLQPRTFLLKYNENGTITDAVDCALDPLSETKCTLKSFTVEKGIYQTSNFRVQPTESIVRFPNITNLCPFGEVFNATRFASVYAWNRKRISNCVADYSVLYNSASFSTFKCYGVSPTKLNDLCFTNVYADSFVIRGDEVRQIAPGQTGKIADYNYKLPDDFTGCVIAWNSNNLDSKVGGNYNYLYRLFRKSNLKPFERDISTEIYQAGSTPCNGVEGFNCYFPLQSYGFQPTNGVGYQPYRVVVLSFELLHAPATVCGPKKSTNLVKNKCVNFNFNGLTGTGVLTESNKKFLPFQQFGRDIADTTDAVRDPQTLEILDITPCSFGGVSVITPGTNTSNQVAVLYQGVNCTEVPVAIHADQLTPTWRVYSTGSNVFQTRAGCLIGAEHVNNSYECDIPIGAGICASYQTQTNSPRRARSVASQSIIAYTMSLGAENSVAYSNNSIAIPTNFTISVTTEILPVSMTKTSVDCTMYICGDSTECSNLLLQYGSFCTQLNRALTGIAVEQDKNTQEVFAQVKQIYKTPPIKDFGGFNFSQILPDPSKPSKRSFIEDLLFNKVTLADAGFIKQYGDCLGDIAARDLICAQKFNGLTVLPPLLTDEMIAQYTSALLAGTITSGWTFGAGAALQIPFAMQMAYRFNGIGVTQNVLYENQKLIANQFNSAIGKIQDSLSSTASALGKLQDVVNQNAQALNTLVKQLSSNFGAISSVLNDILSRLDPPEAEVQIDRLITGRLQSLQTYVTQQLIRAAEIRASANLAATKMSECVLGQSKRVDFCGKGYHLMSFPQSAPHGVVFLHVTYVPAQEKNFTTAPAICHDGKAHFPREGVFVSNGTHWFVTQRNFYEPQIITTDNTFVSGNCDVVIGIVNNTVYDPLQPELDSFKEELDKYFKNHTSPDVDLGDISGINASVVNIQKEIDRLNEVAKNLNESLIDLQELGKYEQYIKGGGGSDIIKLLNEQVNKEMQSSNLYMSMSSWCYTHSLDGAGLFLFDHAAEEYEHAKKLIIFLNENNVPVQLTSISAPEHKFEGLTQIFQKAYEHEQHISESINNIVDHAIKSKDHATFNFLQWYVAEQHEEEVLFKDILDKIELIGNENHGLYLADQYVKGIAKSRKS

SEQ ID NO: 4756 - protein, 1379 aa, Artificial Sequence
  SARS-CoV-2/USA/UT-00033/2020__EPI_ISL_417976 spike protein (1-1211)(K986P_V987P) Ferritin construct
MFVFLVLLPLVSSQCVNLTTRTQLPPAYTNSFTRGVYYPDKVFRSSVLHSTQDLFLPFFSNVTWFHAIHVSGTNGTKRFDNPVLPFNDGVYFASTEKSNIIRGWIFGTTLDSKTQSLLIVNNATNVVIKVCEFQFCNDPFLGVYYHKNNKSWMESEFRVYSSANNCTFEYVSQPFLMDLEGKQGNFKNLREFVFKNIDGYFKIYSKHTPINLVRDLPQGFSALEPLVDLPIGINITRFQTLLALHRSYLTPGDSSSGLTAGAAAYYVGYLQPRTFLLKYNENGTITDAVDCALDPLSETKCTLKSFTVEKGIYQTSNFRVQPTESIVRFPNITNLCPFGEVFNATRFASVYAWNRKRISNCVADYSVLYNSASFSTFKCYGVSPTKLNDLCFTNVYADSFVIRGDEVRQIAPGQTGKIADYNYKLPDDFTGCVIAWNSNNLDSKVGGNYNYLYRLFRKSNLKPFERDISTEIYQAGSTPCNGVEGFNCYFPLQSYGFQPTNGVGYQPYRVVVLSFELLHAPATVCGPKKSTNLVKNKCVNFNFNGLTGTGVLTESNKKFLPFQQFGRDIADTTDAVRDPQTLEILDITPCSFGGVSVITPGTNTSNQVAVLYQGVNCTEVPVAIHADQLTPTWRVYSTGSNVFQTRAGCLIGAEHVNNSYECDIPIGAGICASYQTQTNSPRRARSVASQSIIAYTMSLGAENSVAYSNNSIAIPTNFTISVTTEILPVSMTKTSVDCTMYICGDSTECSNLLLQYGSFCTQLNRALTGIAVEQDKNTQEVFAQVKQIYKTPPIKDFGGFNFSQILPDPSKPSKRSFIEDLLFNKVTLADAGFIKQYGDCLGDIAARDLICAQKFNGLTVLPPLLTDEMIAQYTSALLAGTITSGWTFGAGAALQIPFAMQMAYRFNGIGVTQNVLYENQKLIANQFNSAIGKIQDSLSSTASALGKLQDVVNQNAQALNTLVKQLSSNFGAISSVLNDILSRLDPPEAEVQIDRLITGRLQSLQTYVTQQLIRAAEIRASANLAATKMSECVLGQSKRVDFCGKGYHLMSFPQSAPHGVVFLHVTYVPAQEKNFTTAPAICHDGKAHFPREGVFVSNGTHWFVTQRNFYEPQIITTDNTFVSGNCDVVIGIVNNTVYDPLQPELDSFKEELDKYFKNHTSPDVDLGDISGINASVVNIQKEIDRLNEVAKNLNESLIDLQELGKYEQYIKGGGGSDIIKLLNEQVNKEMQSSNLYMSMSSWCYTHSLDGAGLFLFDHAAEEYEHAKKLIIFLNENNVPVQLTSISAPEHKFEGLTQIFQKAYEHEQHISESINNIVDHAIKSKDHATFNFLQWYVAEQHEEEVLFKDILDKIELIGNENHGLYLADQYVKGIAKSRKS

SEQ ID NO: 4757 - protein, 1379 aa, Artificial Sequence
  SARS-CoV-2/USA/WI-13/2020__EPI_ISL_417516 spike protein (1-1211)(K986P_V987P) Ferritin construct
MFVFLVLLPLVSSQCVNLTTRTQLPPAYTNSFTRGVYYPDKVFRSSVLHSTQDLFLPFFSNVTWFHAIHVSGTNGTKRFDNPVLPFNDGVYFASTEKSNIIRGWIFGTTLDSKTQSLLIVNNATNVVIKVCEFQFCNDPFLGVYYHKNNKSWMESEFRVYSSANNCTFEYVSQPFLMDLEGKQGNFKNLREFVFKNIDGYFKIYSKHTPINLVRDLPQGFSALEPLVDLPIGINITRFQTLLALHRSYLTPGDSSSGWTAGAAAYYVGYLQPRTFLLKYNENGTITDAVDCALDPLSETKCTLKSFTVEKGIYQTSNFRVLPTESIVRFPNITNLCPFGEVFNATRFASVYAWNRKRISNCVADYSVLYNSASFSTFKCYGVSPTKLNDLCFTNVYADSFVIRGDEVRQIAPGQTGKIADYNYKLPDDFTGCVIAWNSNNLDSKVGGNYNYLYRLFRKSNLKPFERDISTEIYQAGSTPCNGVEGFNCYFPLQSYGFQPTNGVGYQPYRVVVLSFELLHAPATVCGPKKSTNLVKNKCVNFNFNGLTGTGVLTESNKKFLPFQQFGRDIADTTDAVRDPQTLEILDITPCSFGGVSVITPGTNTSNQVAVLYQGVNCTEVPVAIHADQLTPTWRVYSTGSNVFQTRAGCLIGAEHVNNSYECDIPIGAGICASYQTQTNSPRRARSVASQSIIAYTMSLGAENSVAYSNNSIAIPTNFTISVTTEILPVSMTKTSVDCTMYICGDSTECSNLLLQYGSFCTQLNRALTGIAVEQDKNTQEVFAQVKQIYKTPPIKDFGGFNFSQILPDPSKPSKRSFIEDLLFNKVTLADAGFIKQYGDCLGDIAARDLICAQKFNGLTVLPPLLTDEMIAQYTSALLAGTITSGWTFGAGAALQIPFAMQMAYRFNGIGVTQNVLYENQKLIANQFNSAIGKIQDSLSSTASALGKLQDVVNQNAQALNTLVKQLSSNFGAISSVLNDILSRLDPPEAEVQIDRLITGRLQSLQTYVTQQLIRAAEIRASANLAATKMSECVLGQSKRVDFCGKGYHLMSFPQSAPHGVVFLHVTYVPAQEKNFTTAPAICHDGKAHFPREGVFVSNGTHWFVTQRNFYEPQIITTDNTFVSGNCDVVIGIVNNTVYDPLQPELDSFKEELDKYFKNHTSPDVDLGDISGINASVVNIQKEIDRLNEVAKNLNESLIDLQELGKYEQYIKGGGGSDIIKLLNEQVNKEMQSSNLYMSMSSWCYTHSLDGAGLFLFDHAAEEYEHAKKLIIFLNENNVPVQLTSISAPEHKFEGLTQIFQKAYEHEQHISESINNIVDHAIKSKDHATFNFLQWYVAEQHEEEVLFKDILDKIELIGNENHGLYLADQYVKGIAKSRKS

SEQ ID NO: 4758 - protein, 1378 aa, Artificial Sequence
  SARS-CoV-2/India/1-27/2020__EPI_ISL_413522 spike protein (1-1210)(K985P_V986P) Ferritin construct
MFVFLVLLPLVSSQCVNLTTRTQLPPAYTNSFTRGVYYPDKVFRSSVLHSTQDLFLPFFSNVTWFHAIHVSGTNGTKRFDNPVLPFNDGVYFASTEKSNIIRGWIFGTTLDSKTQSLLIVNNATNVVIKVCEFQFCNDPFLGVYHKNNKSWMESEFRVYSSANNCTFEYVSQPFLMDLEGKQGNFKNLREFVFKNIDGYFKIYSKHTPINLVRDLPQGFSALEPLVDLPIGINITRFQTLLALHRSYLTPGDSSSGWTAGAAAYYVGYLQPRTFLLKYNENGTITDAVDCALDPLSETKCTLKSFTVEKGIYQTSNFRVQPTESIVRFPNITNLCPFGEVFNATRFASVYAWNRKRISNCVADYSVLYNSASFSTFKCYGVSPTKLNDLCFTNVYADSFVIRGDEVIQIAPGQTGKIADYNYKLPDDFTGCVIAWNSNNLDSKVGGNYNYLYRLFRKSNLKPFERDISTEIYQAGSTPCNGVEGFNCYFPLQSYGFQPTNGVGYQPYRVVVLSFELLHAPATVCGPKKSTNLVKNKCVNFNFNGLTGTGVLTESNKKFLPFQQFGRDIADTTDAVRDPQTLEILDITPCSFGGVSVITPGTNTSNQVAVLYQDVNCTEVPVAIHADQLTPTWRVYSTGSNVFQTRAGCLIGAEHVNNSYECDIPIGAGICASYQTQTNSPRRARSVASQSIIAYTMSLGAENSVAYSNNSIAIPTNFTISVTTEILPVSMTKTSVDCTMYICGDSTECSNLLLQYGSFCTQLNRALTGIAVEQDKNTQEVFAQVKQIYKTPPIKDFGGFNFSQILPDPSKPSKRSFIEDLLFNKVTLADAGFIKQYGDCLGDIAARDLICAQKFNGLTVLPPLLTDEMIAQYTSALLAGTITSGWTFGAGAALQIPFAMQMAYRFNGIGVTQNVLYENQKLIANQFNSAIGKIQDSLSSTASALGKLQDVVNQNAQALNTLVKQLSSNFGAISSVLNDILSRLDPPEAEVQIDRLITGRLQSLQTYVTQQLIRAAEIRASANLAATKMSECVLGQSKRVDFCGKGYHLMSFPQSAPHGVVFLHVTYVPAQEKNFTTAPAICHDGKAHFPREGVFVSNGTHWFVTQRNFYEPQIITTDNTFVSGNCDVVIGIVNNTVYDPLQPELDSFKEELDKYFKNHTSPDVDLGDISGINASVVNIQKEIDRLNEVAKNLNESLIDLQELGKYEQYIKGGGGSDIIKLLNEQVNKEMQSSNLYMSMSSWCYTHSLDGAGLFLFDHAAEEYEHAKKLIIFLNENNVPVQLTSISAPEHKFEGLTQIFQKAYEHEQHISESINNIVDHAIKSKDHATFNFLQWYVAEQHEEEVLFKDILDKIELIGNENHGLYLADQYVKGIAKSRKS

SEQ ID NO: 4759 - protein, 1373 aa, Artificial Sequence
  SARS-CoV-2/pangolin/Guangxi/P4L/2017__EPI_ISL_410538 spike protein (1-1205)(K980P_V981P) Ferritin construct
MFVFLFVLPLVSSQCVNLTTRTGIPPGYTNSSTRGVYYPDKVFRSSILHLTQDLFLPFFSNVTWFNTINYQGGFKKFDNPVLPFNDGVYFASTEKSNIIRGWIFGTTLDARTQSLLIVNNATNVVIKVCEFQFCTDPFLGVYYHNNNKTWVENEFRVYSSANNCTFEYISQPFLMDLEGKQGNFKNLREFVFKNVDGYFKIYSKHTPIDLVRDLPRGFAALEPLVDLPIGINITRFQTLLALHRSYLTPGNLESGWTTGAAAYYVGYLQQRTFLLSYNQNGTITDAVDCSLDPLSETKCTLKSLTVEKGIYQTSNFRVQPTISIVRFPNITNLCPFGEVFNASKFASVYAWNRKRISNCVADYSVLYNSTSFSTFKCYGVSPTKLNDLCFTNVYADSFVVKGDEVRQIAPGQTGVIADYNYKLPDDFTGCVIAWNSVKQDALTGGNYGYLYRLFRKSKLKPFERDISTEIYQAGSTPCNGQVGLNCYYPLERYGFHPTTGVNYQPFRVVVLSFELLNGPATVCGPKLSTTLVKDKCVNFNFNGLTGTGVLTTSKKQFLPFQQFGRDISDTTDAVRDPQTLEILDITPCSFGGVSVITPGTNTSNQVAVLYQDVNCTEVPMAIHAEQLTPAWRVYSAGANVFQTRAGCLVGAEHVNNSYECDIPVGAGICASYHSMSSLRSVNQRSIIAYTMSLGAENSVAYSNNSIAIPTNFTISVTTEILPVSMTKTSVDCTMYICGDSIECSNLLLQYGSFCTQLNRALTGIAVEQDKNTQEVFAQVKQIYKTPPIKDFGGFNFSQILPDPSKPSKRSFIEDLLFNKVTLADAGFIKQYGDCLGDIAARDLICAQKFNGLTVLPPLLTDEMIAQYTSALLAGTITSGWTFGAGAALQIPFAMQMAYRFNGIGVTQNVLYENQKLIANQFNSAIGKIQDSLSSTASALGKLQDVVNQNAQALNTLVKQLSSNFGAISSVLNDILSRLDPPEAEVQIDRLITGRLQSLQTYVTQQLIRAAEIRASANLAATKMSECVLGQSKRVDFCGKGYHLMSFPQSAPHGVVFLHVTYVPAQEKNFTTAPAICHEGKAHFPREGVFVSNGTHWFITQRNFYEPQIITTDNTFVSGSCDVVIGIVNNTVYDPLQPELDSFKEELDKYFKNHTSPDVDLGDISGINASVVNIQKEIDRLNEVAKNLNESPIDLQELGKYEQYIKGGGGSDIIKLLNEQVNKEMQSSNLYMSMSSWCYTHSLDGAGLFLFDHAAEEYEHAKKLIIFLNENNVPVQLTSISAPEHKFEGLTQIFQKAYEHEQHISESINNIVDHAIKSKDHATFNFLQWYVAEQHEEEVLFKDILDKIELIGNENHGLYLADQYVKGIAKSRKS

SEQ ID NO: 4760 - protein, 1373 aa, Artificial Sequence
  SARS-CoV-2/pangolin/Guangxi/P5L/2017__EPI_ISL_410540 spike protein (1-1205)(K980P_V981P) Ferritin construct
MFVFLFVLPLVSSQCVNLTTRTGIPPGYTNSSTRGVYYPDKVFRSSILHLTQDLFLPFFSNVTWFNTINYQGGFKKFDNPVLPFNDGVYFASTEKSNIIRGWIFGTTLDARTQSLLIVNNATNVVIKVCEFQFCTDPFLGVYYHNNNKTWVENEFRVYSSANNCTFEYISQPFLMDLEGKQGNFKNLREFVFKNVDGYFKIYSKHTPIDLVRDLPRGFAALEPLVDLPIGINITRFQTLLALHRSYLTPGKLESGWTTGAAAYYVGYLQQRTFLLSYNQNGTITDAVDCSLDPLSETKCTLKSLTVEKGIYQTSNFRVQPTISIVRFPNITNLCPFGEVFNASKFASVYAWNRKRISNCVADYSVLYNSTSFSTFKCYGVSPTKLNDLCFTNVYADSFVVKGDEVRQIAPGQTGVIADYNYKLPDDFTGCVIAWNSVKQDALTGGNYGYLYRLFRKSKLKPFERDISTEIYQAGSTPCNGQVGLNCYYPLERYGFHPTTGVNYQPFRVVVLSFELLNGPATVCGPKLSTTLVKDKCVNFNFNGLTGTGVLTTSKKQFLPFQQFGRDISDTTDAVRDPQTLEILDITPCSFGGVSVITPGTNTSNQVAVLYQDVNCTEVPMAIHAEQLTPAWRVYSAGANVFQTRAGCLVGAEHVNNSYECDIPVGAGICASYHSMSSFRSVNQRSIIAYTMSLGAENSVAYSNNSIAIPTNFTISVTTEILPVSMTKTSVDCTMYICGDSIECSNLLLQYGSFCTQLNRALTGIAVEQDKNTQEVFAQVKQIYKTPPIKDFGGFNFSQILPDPSKPSKRSFIEDLLFNKVTLADAGFIKQYGDCLGDIAARDLICAQKFNGLTVLPPLLTDEMIAQYTSALLAGTITSGWTFGAGAALQIPFAMQMAYRFNGIGVTQNVLYENQKLIANQFNSAIGKIQDSLSSTASALGKLQDVVNQNAQALNTLVKQLSSNFGAISSVLNDILSRLDPPEAEVQIDRLITGRLQSLQTYVTQQLIRAAEIRASANLAATKMSECVLGQSKRVDFCGKGYHLMSFPQSAPHGVVFLHVTYVPAQEKNFTTAPAICHEGKAHFPREGVFVSNGTHWFITQRNFYEPQIITTDNTFVSGSCDVVIGIVNNTVYDPLQPELDSFKEELDKYFKNHTSPDVDLGDISGINASVVNIQKEIDRLNEVAKNLNESLIDLQELGKYEQYIKGGGGSDIIKLLNEQVNKEMQSSNLYMSMSSWCYTHSLDGAGLFLFDHAAEEYEHAKKLIIFLNENNVPVQLTSISAPEHKFEGLTQIFQKAYEHEQHISESINNIVDHAIKSKDHATFNFLQWYVAEQHEEEVLFKDILDKIELIGNENHGLYLADQYVKGIAKSRKS

SEQ ID NO: 4761 - protein, 1373 aa, Artificial Sequence
  SARS-CoV-2/pangolin/Guangxi/P5E/2017__EPI_ISL_410541 spike protein (1-1205)(K980P_V981P) Ferritin construct
MFVFLFVLPLVSSQCVNLTTRTGIPPGYTNSSTRGVYYPDKVFRSSILHLTQDLFLPFFSNVTWFNTITYQGGSKKFDNPVLPFNDGVYFASTEKSNIIRGWIFGTTLDARTQSLLIVNNATNVVIKVCEFQFCTDPFLGVYYHNNNKTWVENEFRVYSSANNCTFEYISQPFLMDLEGKQGNFKNLREFVFKNVDGYFKIYSKHTPIDLVRDLPRGFAALEPLVDLPIGINITRFQTLLALHRSYLTPGKLESGWTTGAAAYYVGYLQQRTFLLSYNQNGTITDAVDCSLDPLSETKCTLKSLTVEKGIYQTSNFRVQPTISIVRFPNITNLCPFGEVFNASKFASVYAWNRKRISNCVADYSVLYNSTSFSTFKCYGVSPTKLNDLCFTNVYADSFVVKGDEVRQIAPGQTGVIADYNYKLPDDFTGCVIAWNSVKQDALTGDNYGYLYRLFRKSKLKPFERDISTEIYQAGSTPCNGQVGLNCYYPLERYGFHPTTGVNYQPFRVVVLSFELLNGPATVCGPKLSTTLVKDKCVNFNFNGLTGTGVLTTSKKQFLPFQQFGRDISDTTDAVRDPQTLEILDITPCSFGGVSVITPGTNTSNQVAVLYQDVNCTEVPMAIHAEQLTPAWRVYSAGANVFQTRAGCLVGAEHVNNSYECDIPVGAGICASYHSMSSFRSVNQRSIIAYTMSLGAENSVAYSNNSIAIPTNFTISVTTEILPVSMTKTSVDCTMYICGDSIECSNLLLQYGSFCTQLNRALTGIAVEQDKNTQEVFAQVKQIYKTPPIKDFGGFNFSQILPDPSKPSKRSFIEDLLFNKVTLADAGFIKQYGDCLGDIAARDLICAQKFNGLTVLPPLLTDEMIAQYTSALLAGTITSGWTFGAGAALQIPFAMQMAYRFNGIGVTQNVLYENQKLIANQFNSAIGKIQDSLSSTASALGKLQDVVNQNAQALNTLVKQLSSNFGAISSVLNDILSRLDPPEAEVQIDRLITGRLQSLQTYVTQQLIRAAEIRASANLAATKMSECVLGQSKRVDFCGKGYHLMSFPQSAPHGVVFLHVTYVPAQEKNFTTAPAICHEGKAHFPREGVFVSNGTHWFITQRNFYEPQIITTDNTFVSGSCDVVIGIVNNTVYDPLQPELDSFKEELDKYFKNHTSPDVDLGDISGINASVVNIQKEIDRLNEVAKNLNESLIDLQELGKYEQYIKGGGGSDIIKLLNEQVNKEMQSSNLYMSMSSWCYTHSLDGAGLFLFDHAAEEYEHAKKLIIFLNENNVPVQLTSISAPEHKFEGLTQIFQKAYEHEQHISESINNIVDHAIKSKDHATFNFLQWYVAEQHEEEVLFKDILDKIELIGNENHGLYLADQYVKGIAKSRKS

SEQ ID NO: 4762 - protein, 1371 aa, Artificial Sequence
  SARS-CoV-2/pangolin/Guangxi/P1E/2017__EPI_ISL_410539 spike protein (1-1203)(K978P_V979P) Ferritin construct
MFVFLFVLPLVSSQCVNLTTRTGIQPGYTNSSTRGVYYPDKVFRSSILHLTQDLFLPFFSNVTWFNTINYQGGFKKFDNPVLPFNDGVYFASTEKSNIIRGWIFGTTLDARTQSLLIVNNATNVVIKVCEFQFCTDPFLGVYYHNNNKTWVENEFRVYSSANNCTFEYISQPFLMDLEGKQGNFKNLREFVFKNVDGYFKIYSKHTPIDLVRDLPRGFAALEPLVDLPIGINITRFQTLLALHRSYLTPGKLESGWTTGAAAYYVGYLQQRTFLLSYNQNGTITDAVDCSLDPLSETKCTLKSLTVEKGIYQTSNFRVQPTISIVRFPNITNLCPFGEVFNASKFASVYAWNRKRISNCVADYSVLYNSTSFSTFKCYGVSPTKLNDLCFTNVYADSFVVKGDEVRQIAPGQTGVIADYNYKLPDDFTGCVIAWNSVKQDALTGGNYLYRLFRKSKLKPFERDISTEIYQAGSTPCNGQVGLNCYYPLERYGFHPTTGVNYQPFRVVVLSFELLNGPATVCGPKLSTTLVKDKCVNFNFNGLTGTGVLTTSKKQFLPFQQFGRDISDTTDAVRDPQTLEILDITPCSFGGVSVITPGTNTSNQVAVLYQDVNCTEVPMAIHAEQLTPAWRVYSAGANVFQTRAGCLVGAEHVNNSYECDIPVGAGICASYHSMSSLRSVNQRSIIAYTMSLGAENSVAYSNNSIAIPTNFTISVTTEILPVSMTKTSVDCTMYICGDSIECSNLLLQYGSFCTQLNRALTGIAVEQDKNTQEVFAQVKQIYKTPPIKDFGGFNFSQILPDPSKPSKRSFIEDLLFNKVTLADAGFIKQYGDCLGDIAARDLICAQKFNGLTVLPPLLTDEMIAQYTSALLAGTITSGWTFGAGAALQIPFAMQMAYRFNGIGVTQNVLYENQKLIANQFNSAIGKIQDSLSSTASALGKLQDVVNQNAQALNTLVKQLSSNFGAISSVLNDILSRLDPPEAEVQIDRLITGRLQSLQTYVTQQLIRAAEIRASANLAATKMSECVLGQSKRVDFCGKGYHLMSFPQSAPHGVVFLHVTYVPAQEKNFTTAPAICHEGKAHFPREGVFVSNGTHWFITQRNFYEPQIITTDNTFVSGSCDVVIGIVNNTVYDPLQPELDSFKEELDKYFKNHTSPDVDLGDISGINASVVNIQKEIDRLNEVAKNLNESLIDLQELGKYEQYIKGGGGSDIIKLLNEQVNKEMQSSNLYMSMSSWCYTHSLDGAGLFLFDHAAEEYEHAKKLIIFLNENNVPVQLTSISAPEHKFEGLTQIFQKAYEHEQHISESINNIVDHAIKSKDHATFNFLQWYVAEQHEEEVLFKDILDKIELIGNENHGLYLADQYVKGIAKSRKS

SEQ ID NO: 4763 - protein, 1379 aa, Artificial Sequence
  SARS-CoV-2/Wuhan/WIV05/2019__EPI_ISL_402128 spike protein (1-1211)(K986P_V987P_T887W_A1020W) Ferritin construct
MFVFLVLLPLVSSQCVNLTTRTQLPPAYTNSFTRGVYYPDKVFRSSVLHSTQDLFLPFFSNVTWFHAIHVSGTNGTKRFDNPVLPFNDGVYFASTEKSNIIRGWIFGTTLDSKTQSLLIVNNATNVVIKVCEFQFCNDPFLGVYYHKNNKSWMESEFRVYSSANNCTFEYVSQPFLMDLEGKQGNFKNLREFVFKNIDGYFKIYSKHTPINLVRDLPQGFSALEPLVDLPIGINITRFQTLLALHRSYLTPGDSSSGWTAGAAAYYVGYLQPRTFLLKYNENGTITDAVDCALDPLSETKCTLKSFTVEKGIYQTSNFRVQPTESIVRFPNITNLCPFGEVFNATRFASVYAWNRKRISNCVADYSVLYNSASFSTFKCYGVSPTKLNDLCFTNVYADSFVIRGDEVRQIAPGQTGKIADYNYKLPDDFTGCVIAWNSNNLDSKVGGNYNYLYRLFRKSNLKPFERDISTEIYQAGSTPCNGVEGFNCYFPLQSYGFQPTNGVGYQPYRVVVLSFELLHAPATVCGPKKSTNLVKNKCVNFNFNGLTGTGVLTESNKKFLPFQQFGRDIADTTDAVRDPQTLEILDITPCSFGGVSVITPGTNTSNQVAVLYQDVNCTEVPVAIHADQLTPTWRVYSTGSNVFQTRAGCLIGAEHVNNSYECDIPIGAGICASYQTQTNSPRRARSVASQSIIAYTMSLGAENSVAYSNNSIAIPTNFTISVTTEILPVSMTKTSVDCTMYICGDSTECSNLLLQYGSFCTQLNRALTGIAVEQDKNTQEVFAQVKQIYKTPPIKDFGGFNFSQILPDPSKPSKRSFIEDLLFNKVTLADAGFIKQYGDCLGDIAARDLICAQKFNGLTVLPPLLTDEMIAQYTSALLAGTITSGWWFGAGAALQIPFAMQMAYRFNGIGVTQNVLYENQKLIANQFNSAIGKIQDSLSSTASALGKLQDVVNQNAQALNTLVKQLSSNFGAISSVLNDILSRLDPPEAEVQIDRLITGRLQSLQTYVTQQLIRAAEIRWSANLAATKMSECVLGQSKRVDFCGKGYHLMSFPQSAPHGVVFLHVTYVPAQEKNFTTAPAICHDGKAHFPREGVFVSNGTHWFVTQRNFYEPQIITTDNTFVSGNCDVVIGIVNNTVYDPLQPELDSFKEELDKYFKNHTSPDVDLGDISGINASVVNIQKEIDRLNEVAKNLNESLIDLQELGKYEQYIKGGGGSDIIKLLNEQVNKEMQSSNLYMSMSSWCYTHSLDGAGLFLFDHAAEEYEHAKKLIIFLNENNVPVQLTSISAPEHKFEGLTQIFQKAYEHEQHISESINNIVDHAIKSKDHATFNFLQWYVAEQHEEEVLFKDILDKIELIGNENHGLYLADQYVKGIAKSRKS

SEQ ID NO: 4764 - protein, 1375 aa, Artificial Sequence
  SARS-CoV-2/bat/Yunnan/RaTG13/2013__EPI_ISL_402131 spike protein (1-1207)(K982P_V983P_T883W_A1016W) Ferritin construct
MFVFLVLLPLVSSQCVNLTTRTQLPPAYTNSSTRGVYYPDKVFRSSVLHLTQDLFLPFFSNVTWFHAIHVSGTNGIKRFDNPVLPFNDGVYFASTEKSNIIRGWIFGTTLDSKTQSLLIVNNATNVVIKVCEFQFCNDPFLGVYYHKNNKSWMESEFRVYSSANNCTFEYVSQPFLMDLEGKQGNFKNLREFVFKNIDGYFKIYSKHTPINLVRDLPPGFSALEPLVDLPIGINITRFQTLLALHRSYLTPGDSSSGWTAGAAAYYVGYLQPRTFLLKYNENGTITDAVDCALDPLSETKCTLKSFTVEKGIYQTSNFRVQPTDSIVRFPNITNLCPFGEVFNATTFASVYAWNRKRISNCVADYSVLYNSTSFSTFKCYGVSPTKLNDLCFTNVYADSFVITGDEVRQIAPGQTGKIADYNYKLPDDFTGCVIAWNSKHIDAKEGGNFNYLYRLFRKANLKPFERDISTEIYQAGSKPCNGQTGLNCYYPLYRYGFYPTDGVGHQPYRVVVLSFELLNAPATVCGPKKSTNLVKNKCVNFNFNGLTGTGVLTESNKKFLPFQQFGRDIADTTDAVRDPQTLEILDITPCSFGGVSVITPGTNASNQVAVLYQDVNCTEVPVAIHADQLTPTWRVYSTGSNVFQTRAGCLIGAEHVNNSYECDIPIGAGICASYQTQTNSRSVASQSIIAYTMSLGAENSVAYSNNSIAIPTNFTISVTTEILPVSMTKTSVDCTMYICGDSTECSNLLLQYGSFCTQLNRALTGIAVEQDKNTQEVFAQVKQIYKTPPIKDFGGFNFSQILPDPSKPSKRSFIEDLLFNKVTLADAGFIKQYGDCLGDIAARDLICAQKFNGLTVLPPLLTDEMIAQYTSALLAGTITSGWWFGAGAALQIPFAMQMAYRFNGIGVTQNVLYENQKLIANQFNSAIGKIQDSLSSTASALGKLQDVVNQNAQALNTLVKQLSSNFGAISSVLNDILSRLDPPEAEVQIDRLITGRLQSLQTYVTQQLIRAAEIRWSANLAATKMSECVLGQSKRVDFCGKGYHLMSFPQSAPHGVVFLHVTYVPAQEKNFTTAPAICHDGKAHFPREGVFVSNGTHWFVTQRNFYEPQIITTDNTFVSGSCDVVIGIVNNTVYDPLQPELDSFKEELDKYFKNHTSPDVDLGDISGINASVVNIQKEIDRLNEVAKNLNESLIDLQELGKYEQYIKGGGGSDIIKLLNEQVNKEMQSSNLYMSMSSWCYTHSLDGAGLFLFDHAAEEYEHAKKLIIFLNENNVPVQLTSISAPEHKFEGLTQIFQKAYEHEQHISESINNIVDHAIKSKDHATFNFLQWYVAEQHEEEVLFKDILDKIELIGNENHGLYLADQYVKGIAKSRKS

SEQ ID NO: 4765 - protein, 1379 aa, Artificial Sequence
  SARS-CoV-2/Wuhan/HBCDC-HB-01/2019__EPI_ISL_402132 spike protein (1-1211)(K986P_V987P_T887W_A1020W) Ferritin construct
MFVFLVLLPLVSSQCVNLTTRTQLPPAYTNSITRGVYYPDKVFRSSVLHSTQDLFLPFFSNVTWFHAIHVSGTNGTKRFDNPVLPFNDGVYFASTEKSNIIRGWIFGTTLDSKTQSLLIVNNATNVVIKVCEFQFCNDPFLGVYYHKNNKSWMESEFRVYSSANNCTFEYVSQPFLMDLEGKQGNFKNLREFVFKNIDGYFKIYSKHTPINLVRDLPQGFSALEPLVDLPIGINITRFQTLLALHRSYLTPGDSSSGWTAGAAAYYVGYLQPRTFLLKYNENGTITDAVDCALDPLSETKCTLKSFTVEKGIYQTSNFRVQPTESIVRFPNITNLCPFGEVFNATRFASVYAWNRKRISNCVADYSVLYNSASFSTFKCYGVSPTKLNDLCFTNVYADSFVIRGDEVRQIAPGQTGKIADYNYKLPDDFTGCVIAWNSNNLDSKVGGNYNYLYRLFRKSNLKPFERDISTEIYQAGSTPCNGVEGFNCYFPLQSYGFQPTNGVGYQPYRVVVLSFELLHAPATVCGPKKSTNLVKNKCVNFNFNGLTGTGVLTESNKKFLPFQQFGRDIADTTDAVRDPQTLEILDITPCSFGGVSVITPGTNTSNQVAVLYQDVNCTEVPVAIHADQLTPTWRVYSTGSNVFQTRAGCLIGAEHVNNSYECDIPIGAGICASYQTQTNSPRRARSVASQSIIAYTMSLGAENSVAYSNNSIAIPTNFTISVTTEILPVSMTKTSVDCTMYICGDSTECSNLLLQYGSFCTQLNRALTGIAVEQDKNTQEVFAQVKQIYKTPPIKDFGGFNFSQILPDPSKPSKRSFIEDLLFNKVTLADAGFIKQYGDCLGDIAARDLICAQKFNGLTVLPPLLTDEMIAQYTSALLAGTITSGWWFGAGAALQIPFAMQMAYRFNGIGVTQNVLYENQKLIANQFNSAIGKIQDSLSSTASALGKLQDVVNQNAQALNTLVKQLSSNFGAISSVLNDILSRLDPPEAEVQIDRLITGRLQSLQTYVTQQLIRAAEIRWSANLAATKMSECVLGQSKRVDFCGKGYHLMSFPQSAPHGVVFLHVTYVPAQEKNFTTAPAICHDGKAHFPREGVFVSNGTHWFVTQRNFYEPQIITTDNTFVSGNCDVVIGIVNNTVYDPLQPELDSFKEELDKYFKNHTSPDVDLGDISGINASVVNIQKEIDRLNEVAKNLNESLIDLQELGKYEQYIKGGGGSDIIKLLNEQVNKEMQSSNLYMSMSSWCYTHSLDGAGLFLFDHAAEEYEHAKKLIIFLNENNVPVQLTSISAPEHKFEGLTQIFQKAYEHEQHISESINNIVDHAIKSKDHATFNFLQWYVAEQHEEEVLFKDILDKIELIGNENHGLYLADQYVKGIAKSRKS

SEQ ID NO: 4766 - protein, 1379 aa, Artificial Sequence
  SARS-CoV-2/Guangdong/20SF028/2020__EPI_ISL_403936 spike protein (1-1211)(K986P_V987P_T887W_A1020W) Ferritin construct
MFVFLVLLPLVSSQCVNLTTRTQLPPAYTNSFTRGVYYPDKVFRSSVLYSTQDLFLPFFSNVTWFHAIHVSGTNGTKRFDNPVLPFNDGVYFASTEKSNIIRGWIFGTTLDSKTQSLLIVNNATNVVIKVCEFQFCNDPFLGVYYHKNNKSWMESEFRVYSSANNCTFEYVSQPFLMDLEGKQGNFKNLREFVFKNIDGYFKIYSKHTPINLVRDLPQGFSALEPLVDLPIGINITRFQTLLALHRSYLTPGDSSSGWTAGAAAYYVGYLQPRTFLLKYNENGTITDAVDCALDPLSETKCTLKSFTVEKGIYQTSNFRVQPTESIVRFPNITNLCPFGEVFNATRFASVYAWNRKRISNCVADYSVLYNSASFSTFKCYGVSPTKLNDLCFTNVYADSFVIRGDEVRQIAPGQTGKIADYNYKLPDDFTGCVIAWNSNNLDSKVGGNYNYLYRLFRKSNLKPFERDISTEIYQAGSTPCNGVEGFNCYFPLQSYGFQPTNGVGYQPYRVVVLSFELLHAPATVCGPKKSTNLVKNKCVNFNFNGLTGTGVLTESNKKFLPFQQFGRDIADTTDAVRDPQTLEILDITPCSFGGVSVITPGTNTSNQVAVLYQDVNCTEVPVAIHADQLTPTWRVYSTGSNVFQTRAGCLIGAEHVNNSYECDIPIGAGICASYQTQTNSPRRARSVASQSIIAYTMSLGAENSVAYSNNSIAIPTNFTISVTTEILPVSMTKTSVDCTMYICGDSTECSNLLLQYGSFCTQLNRALTGIAVEQDKNTQEVFAQVKQIYKTPPIKDFGGFNFSQILPDPSKPSKRSFIEDLLFNKVTLADAGFIKQYGDCLGDIAARDLICAQKFNGLTVLPPLLTDEMIAQYTSALLAGTITSGWWFGAGAALQIPFAMQMAYRFNGIGVTQNVLYENQKLIANQFNSAIGKIQDSLSSTASALGKLQDVVNQNAQALNTLVKQLSSNFGAISSVLNDILSRLDPPEAEVQIDRLITGRLQSLQTYVTQQLIRAAEIRWSANLAATKMSECVLGQSKRVDFCGKGYHLMSFPQSAPHGVVFLHVTYVPAQEKNFTTAPAICHDGKAHFPREGVFVSNGTHWFVTQRNFYEPQIITTDNTFVSGNCDVVIGIVNNTVYDPLQPELDSFKEELDKYFKNHTSPDVDLGDISGINASVVNIQKEIDRLNEVAKNLNESLIDLQELGKYEQYIKGGGGSDIIKLLNEQVNKEMQSSNLYMSMSSWCYTHSLDGAGLFLFDHAAEEYEHAKKLIIFLNENNVPVQLTSISAPEHKFEGLTQIFQKAYEHEQHISESINNIVDHAIKSKDHATFNFLQWYVAEQHEEEVLFKDILDKIELIGNENHGLYLADQYVKGIAKSRKS

SEQ ID NO: 4767 - protein, 1379 aa, Artificial Sequence
  SARS-CoV-2/Shenzhen/SZTH-001/2020__EPI_ISL_406592 spike protein (1-1211)(K986P_V987P_T887W_A1020W) Ferritin construct
MFVFLVLLPLVSSQCVNLTTRTQLPPAYTNSFTRGVYYPDKVFRSSVLHSTQDLFLPFFSNVTWFHAIHVSGTNGTKRFDNPVLPFNDGVYFASTEKSNIIRGWIFGTTLDSKTQSLLIVNNATNVVIKVCEFQFCNDPFLGVYYHKNNKSWMESEFRVYSSANNCTFEYVSQPFLMDLEGKQGNFKNLREFVFKNIDGYFKIYSKHTPINLVRDLPQGFSALEPLVDLPIGINITRFQTLLALHRSYLTPGDSSSGWTAGAAAYYVGYLQPRTFLLKYNENGTITDAVDCALDPLSETKCTLKSFTVEKGIYQTSNFRVQPTESIVRFPNITNLCPFGEVFNATRFASVYAWNRKRISNCVADYSVLYNSASFSTFKCYGVSPTKLNDLCFTNVYADSFVIRGDEVRQIAPGQTGKIADYNYKLPDDFTGCVIAWNSNNLDSKVGGNYNYLYRLFRKSNLKPFERDISTEIYQAGSTPCNGVEGFNCYFPLQSYGFQPTNGVGYQPYRVVVLSFELLHAPATVCGPKKSTNLVKNKCVNFNFNGLTGTGVLTESNKKFLPFQQFGRDIADTTDAVRDPQTLEILDITPCSFGGVSVITPGTNTSNQVAVLYQDVNCTEVPVAIHADQLTPTWRVYSTGSNVFQTRAGCLIGAEHVNNSYECDIPIGAGICASYQTQTNSPRRARSVASQSIIAYTMSLGAENSVAYSNNSIAIPTNFTISVTTEILPVSMTKTSVDCTMYICGDSTECSNLLLQYGSFCTQLNRALTGIAVEQDKNTQEVFAQVKQIYKTPPIKDFGGFNFSQILPDPSKPSKRSFIEDLLFNKVTLADAGFIKQYGDCLGDIAARDLICAQKFNGLTVLPPLLTDEMIAQYTSALLAGTITSGWWFGAGAALQIPFAMQMAYRFNGIGVTQNVLYENQKLIANQFNSAIGKIQDSLSSTASALGKLQDVVNQNAQALNTLVKQLSSNFGAISSVLNDILSRLDPPEAEVQIDRLITGRLQSLQTYVTQQLIRAAEIRWSANLAATKMSECVLGQSKRVDFCGKGYHLMSFPQSAPHGVVFLHVTYVPAQEKNFTTAPAICHDGKAHFPREGVFVSNGTHWFVTQRNFYEPQIITTDNTFVSGNCDVLIGIVNNTVYDPLQPELDSFKEELDKYFKNHTSPDVDLGDISGINASVVNIQKEIDRLNEVAKNLNESLIDLQELGKYEQYIKGGGGSDIIKLLNEQVNKEMQSSNLYMSMSSWCYTHSLDGAGLFLFDHAAEEYEHAKKLIIFLNENNVPVQLTSISAPEHKFEGLTQIFQKAYEHEQHISESINNIVDHAIKSKDHATFNFLQWYVAEQHEEEVLFKDILDKIELIGNENHGLYLADQYVKGIAKSRKS

SEQ ID NO: 4768 - protein, 1379 aa, Artificial Sequence
  SARS-CoV-2/Shenzhen/SZTH-004/2020__EPI_ISL_406595 spike protein (1-1211)(K986P_V987P_T887W_A1020W) Ferritin construct
MFVFLVLLPLVSSQCVNLTTRTQLPPAYTNSFTRGVYYPDKVFRSSVLHSTQDLFLPFFSNVTWFHAIHVSGTNGTKRFDNPVLPFNDGVYFASTEKSNIIRGWIFGTTLDSKTQSLLIVNNATNVVIKVCEFQFCNDPFLGVYYHKNNKSWMESEFRVYSSANNCTFEYVSQPFLMDLEGKQGNFKNLREFVFKNIDGYFKIYSKHTPINLVRDLPQGFSALEPLVDLPIGINITRFQTLLALHRSYLTPGDSSSGWTAGAAAYYVGYLQPRTFLLKYNENGTITDAVDCALDPLSETKCTLKSFTVEKGIYQTSNFRVQPTESIVRFPNITNLCPFGEVFNATRFASVYAWDRKRISNCVAYYSVLYNSASFSTFKCYGVSPTKLNDLCFTNVYADSFVIRGDEVRQIAPGQTGKIADYNYKLPDDFTGCVIAWNSNNLDSKVGGNYNYLYRLFRKSNLKPFERDISTEIYQAGSTPCNGVEGFNCYFPLQSYGFQPTNGVGYQPYRVVVLSFELLHAPATVCGPKKSTNLVKNKCVNFNFNGLTGTGVLTESNKKFLPFQQFGRDIADTTDAVRDPQTLEILDITPCSFGGVSVITPGTNTSNQVAVLYQDVNCTEVPVAIHADQLTPTWRVYSTGSNVFQTRAGCLIGAEHVNNSYECDIPIGAGICASYQTQTNSPRRARSVASQSIIAYTMSLGAENSVAYSNNSIAIPTNFTISVTTEILPVSMTKTSVDCTMYICGDSTECSNLLLQYGSFCTQLNRALTGIAVEQDKNTQEVFAQVKQIYKTPPIKDFGGFNFSQILPDPSKPSKRSFIEDLLFNKVTLADAGFIKQYGDCLGDIAARDLICAQKFNGLTVLPPLLTDEMIAQYTSALLAGTITSGWWFGAGAALQIPFAMQMAYRFNGIGVTQNVLYENQKLIANQFNSAIGKIQDSLSSTASALGKLQDVVNQNAQALNTLVKQLSSNFGAISSVLNDILSRLDPPEAEVQIDRLITGRLQSLQTYVTQQLIRAAEIRWSANLAATKMSECVLGQSKRVDFCGKGYHLMSFPQSAPHGVVFLHVTYVPAQEKNFTTAPAICHDGKAHFPREGVFVSNGTHWFVTQRNFYEPQIITTDNTFVSGNCDVVIGIVNNTVYDPLQPELDSFKEELDKYFKNHTSPDVDLGDISGINASVVNIQKEIDRLNEVAKNLNESLIDLQELGKYEQYIKGGGGSDIIKLLNEQVNKEMQSSNLYMSMSSWCYTHSLDGAGLFLFDHAAEEYEHAKKLIIFLNENNVPVQLTSISAPEHKFEGLTQIFQKAYEHEQHISESINNIVDHAIKSKDHATFNFLQWYVAEQHEEEVLFKDILDKIELIGNENHGLYLADQYVKGIAKSRKS

SEQ ID NO: 4769 - protein, 1379 aa, Artificial Sequence
  SARS-CoV-2/France/IDF0372/2020__EPI_ISL_406596 spike protein (1-1211)(K986P_V987P_T887W_A1020W) Ferritin construct
MFVFLVLLPLVSSQCVNLTTRTQLPPAYTNSFTRGVYYPDKVFRSSVLHSTQDLFLPFFSNVTWFHAIHVSGTNGTKRFDNPVLPFNDGVYFASTEKSNIIRGWIFGTTLDSKTQSLLIVNNATNVVIKVCEFQFCNDPFLGVYYHKNNKSWMESEFRVYSSANNCTFEYVSQPFLMDLEGKQGNFKNLREFVFKNIDGYFKIYSKHTPINLVRDLPQGFSALEPLVDLPIGINITRFQTLLALHRSYLTPGDSSSGWTAGAAAYYVGYLQPRTFLLKYNENGTITDAVDCALDPLSETKCTLKSFTVEKGIYQTSNFRVQPTESIVRFPNITNLCPFGEVFNATRFASVYAWNRKRISNCVADYSFLYNSASFSTFKCYGVSPTKLNDLCFTNVYADSFVIRGDEVRQIAPGQTGKIADYNYKLPDDFTGCVIAWNSNNLDSKVGGNYNYLYRLFRKSNLKPFERDISTEIYQAGSTPCNGVEGFNCYFPLQSYGFQPTNGVGYQPYRVVVLSFELLHAPATVCGPKKSTNLVKNKCVNFNFNGLTGTGVLTESNKKFLPFQQFGRDIADTTDAVRDPQTLEILDITPCSFGGVSVITPGTNTSNQVAVLYQDVNCTEVPVAIHADQLTPTWRVYSTGSNVFQTRAGCLIGAEHVNNSYECDIPIGAGICASYQTQTNSPRRARSVASQSIIAYTMSLGAENSVAYSNNSIAIPTNFTISVTTEILPVSMTKTSVDCTMYICGDSTECSNLLLQYGSFCTQLNRALTGIAVEQDKNTQEVFAQVKQIYKTPPIKDFGGFNFSQILPDPSKPSKRSFIEDLLFNKVTLADAGFIKQYGDCLGDIAARDLICAQKFNGLTVLPPLLTDEMIAQYTSALLAGTITSGWWFGAGAALQIPFAMQMAYRFNGIGVTQNVLYENQKLIANQFNSAIGKIQDSLSSTASALGKLQDVVNQNAQALNTLVKQLSSNFGAISSVLNDILSRLDPPEAEVQIDRLITGRLQSLQTYVTQQLIRAAEIRWSANLAATKMSECVLGQSKRVDFCGKGYHLMSFPQSAPHGVVFLHVTYVPAQEKNFTTAPAICHDGKAHFPREGVFVSNGTHWFVTQRNFYEPQIITTDNTFVSGNCDVVIGIVNNTVYDPLQPELDSFKEELDKYFKNHTSPDVDLGDISGINASVVNIQKEIDRLNEVAKNLNESLIDLQELGKYEQYIKGGGGSDIIKLLNEQVNKEMQSSNLYMSMSSWCYTHSLDGAGLFLFDHAAEEYEHAKKLIIFLNENNVPVQLTSISAPEHKFEGLTQIFQKAYEHEQHISESINNIVDHAIKSKDHATFNFLQWYVAEQHEEEVLFKDILDKIELIGNENHGLYLADQYVKGIAKSRKS

SEQ ID NO: 4770 - protein, 1379 aa, Artificial Sequence
  SARS-CoV-2/Australia/VIC01/2020__EPI_ISL_406844 spike protein (1-1211)(K986P_V987P_T887W_A1020W) Ferritin construct
MFVFLVLLPLVSSQCVNLTTRTQLPPAYTNSFTRGVYYPDKVFRSSVLHSTQDLFLPFFSNVTWFHAIHVSGTNGTKRFDNPVLPFNDGVYFASTEKSNIIRGWIFGTTLDSKTQSLLIVNNATNVVIKVCEFQFCNDPFLGVYYHKNNKSWMESEFRVYSSANNCTFEYVSQPFLMDLEGKQGNFKNLREFVFKNIDGYFKIYSKHTPINLVRDLPQGFSALEPLVDLPIGINITRFQTLLALHRRYLTPGDSSSGWTAGAAAYYVGYLQPRTFLLKYNENGTITDAVDCALDPLSETKCTLKSFTVEKGIYQTSNFRVQPTESIVRFPNITNLCPFGEVFNATRFASVYAWNRKRISNCVADYSVLYNSASFSTFKCYGVSPTKLNDLCFTNVYADSFVIRGDEVRQIAPGQTGKIADYNYKLPDDFTGCVIAWNSNNLDSKVGGNYNYLYRLFRKSNLKPFERDISTEIYQAGSTPCNGVEGFNCYFPLQSYGFQPTNGVGYQPYRVVVLSFELLHAPATVCGPKKSTNLVKNKCVNFNFNGLTGTGVLTESNKKFLPFQQFGRDIADTTDAVRDPQTLEILDITPCSFGGVSVITPGTNTSNQVAVLYQDVNCTEVPVAIHADQLTPTWRVYSTGSNVFQTRAGCLIGAEHVNNSYECDIPIGAGICASYQTQTNSPRRARSVASQSIIAYTMSLGAENSVAYSNNSIAIPTNFTISVTTEILPVSMTKTSVDCTMYICGDSTECSNLLLQYGSFCTQLNRALTGIAVEQDKNTQEVFAQVKQIYKTPPIKDFGGFNFSQILPDPSKPSKRSFIEDLLFNKVTLADAGFIKQYGDCLGDIAARDLICAQKFNGLTVLPPLLTDEMIAQYTSALLAGTITSGWWFGAGAALQIPFAMQMAYRFNGIGVTQNVLYENQKLIANQFNSAIGKIQDSLSSTASALGKLQDVVNQNAQALNTLVKQLSSNFGAISSVLNDILSRLDPPEAEVQIDRLITGRLQSLQTYVTQQLIRAAEIRWSANLAATKMSECVLGQSKRVDFCGKGYHLMSFPQSAPHGVVFLHVTYVPAQEKNFTTAPAICHDGKAHFPREGVFVSNGTHWFVTQRNFYEPQIITTDNTFVSGNCDVVIGIVNNTVYDPLQPELDSFKEELDKYFKNHTSPDVDLGDISGINASVVNIQKEIDRLNEVAKNLNESLIDLQELGKYEQYIKGGGGSDIIKLLNEQVNKEMQSSNLYMSMSSWCYTHSLDGAGLFLFDHAAEEYEHAKKLIIFLNENNVPVQLTSISAPEHKFEGLTQIFQKAYEHEQHISESINNIVDHAIKSKDHATFNFLQWYVAEQHEEEVLFKDILDKIELIGNENHGLYLADQYVKGIAKSRKS

SEQ ID NO: 4771 - protein, 1379 aa, Artificial Sequence
  SARS-CoV-2/Germany/BavPat1/2020__EPI_ISL_406862 spike protein (1-1211)(K986P_V987P_T887W_A1020W) Ferritin construct
MFVFLVLLPLVSSQCVNLTTRTQLPPAYTNSFTRGVYYPDKVFRSSVLHSTQDLFLPFFSNVTWFHAIHVSGTNGTKRFDNPVLPFNDGVYFASTEKSNIIRGWIFGTTLDSKTQSLLIVNNATNVVIKVCEFQFCNDPFLGVYYHKNNKSWMESEFRVYSSANNCTFEYVSQPFLMDLEGKQGNFKNLREFVFKNIDGYFKIYSKHTPINLVRDLPQGFSALEPLVDLPIGINITRFQTLLALHRSYLTPGDSSSGWTAGAAAYYVGYLQPRTFLLKYNENGTITDAVDCALDPLSETKCTLKSFTVEKGIYQTSNFRVQPTESIVRFPNITNLCPFGEVFNATRFASVYAWNRKRISNCVADYSVLYNSASFSTFKCYGVSPTKLNDLCFTNVYADSFVIRGDEVRQIAPGQTGKIADYNYKLPDDFTGCVIAWNSNNLDSKVGGNYNYLYRLFRKSNLKPFERDISTEIYQAGSTPCNGVEGFNCYFPLQSYGFQPTNGVGYQPYRVVVLSFELLHAPATVCGPKKSTNLVKNKCVNFNFNGLTGTGVLTESNKKFLPFQQFGRDIADTTDAVRDPQTLEILDITPCSFGGVSVITPGTNTSNQVAVLYQGVNCTEVPVAIHADQLTPTWRVYSTGSNVFQTRAGCLIGAEHVNNSYECDIPIGAGICASYQTQTNSPRRARSVASQSIIAYTMSLGAENSVAYSNNSIAIPTNFTISVTTEILPVSMTKTSVDCTMYICGDSTECSNLLLQYGSFCTQLNRALTGIAVEQDKNTQEVFAQVKQIYKTPPIKDFGGFNFSQILPDPSKPSKRSFIEDLLFNKVTLADAGFIKQYGDCLGDIAARDLICAQKFNGLTVLPPLLTDEMIAQYTSALLAGTITSGWWFGAGAALQIPFAMQMAYRFNGIGVTQNVLYENQKLIANQFNSAIGKIQDSLSSTASALGKLQDVVNQNAQALNTLVKQLSSNFGAISSVLNDILSRLDPPEAEVQIDRLITGRLQSLQTYVTQQLIRAAEIRWSANLAATKMSECVLGQSKRVDFCGKGYHLMSFPQSAPHGVVFLHVTYVPAQEKNFTTAPAICHDGKAHFPREGVFVSNGTHWFVTQRNFYEPQIITTDNTFVSGNCDVVIGIVNNTVYDPLQPELDSFKEELDKYFKNHTSPDVDLGDISGINASVVNIQKEIDRLNEVAKNLNESLIDLQELGKYEQYIKGGGGSDIIKLLNEQVNKEMQSSNLYMSMSSWCYTHSLDGAGLFLFDHAAEEYEHAKKLIIFLNENNVPVQLTSISAPEHKFEGLTQIFQKAYEHEQHISESINNIVDHAIKSKDHATFNFLQWYVAEQHEEEVLFKDILDKIELIGNENHGLYLADQYVKGIAKSRKS

SEQ ID NO: 4772 - protein, 1379 aa, Artificial Sequence
  SARS-CoV-2/Wuhan/HBCDC-HB-02/2020__EPI_ISL_412978 spike protein (1-1211)(K986P_V987P_T887W_A1020W) Ferritin construct
MFVFLVLLPLVSSQCVNLTTRTQLPPAYTNSFTRGVYYPDKVFRSSVLHSTQDLFLPFFSNVTWFHAIHVSGTNGTKRFDNPVLPFNDGVYFASTEKSNIIRGWIFGTTLDSKTQSLLIVNNATNVVIKVCEFQFCNDPFLGVYYHKNNKSWMESEFRVYSSANNCTFEYVSQPFLMDLEGKQGNFKNLREFVFKNIDGYFKIYSKHTPINLVRDLPQGFSALEPLVDLPIGINITRFQTLLALHRSYLTPGDSSSGWTAGAAAYYVGYLQPRTFLLKYNENGTITDAVDCALDPLSETKCTLKSFTVEKGIYQTSNFRVQPTESIVRFPNITNLCPFGEVFNATRFASVYAWNRKRISNCVADYSVLYNSASFSTFKCYGVSPTKLNDLCFTNVYADSFVIRGDEVRQIAPGQTGKIADYNYKLPDDFTGCVIAWNSNNLDSKVGGNYNYLYRLFRKSNLKPFERDISTEIYQAGSTPCNGVEGFNCYFPLQSYGFQPTNGVGYQPYRVVVLSFELLHAPATVCGPKKSTNLVKNKCVNFNFNGLTGTGVLTESNKKFLPFQQFGRDIADTTDAVRDPQTLEILDITPCSFGGVSVITPGTNTSNQVAVLYQDVNCTEVPVAIHADQLTPTWRVYSTGSNVFQTRAGCLIGAEHVNNSYECDIPIGAGICASYQTQTNSPRRARSVASQSIIAYTMSLGAENSVAYSNNSIAIPTNFTISVTTEILPVSMTKTSVDCTMYICGDSTECSNFLLQYGSFCTQLNRALTGIAVEQDKNTQEVFAQVKQIYKTPPIKDFGGFNFSQILPDPSKPSKRSFIEDLLFNKVTLADAGFIKQYGDCLGDIAARDLICAQKFNGLTVLPPLLTDEMIAQYTSALLAGTITSGWWFGAGAALQIPFAMQMAYRFNGIGVTQNVLYENQKLIANQFNSAIGKIQDSLSSTASALGKLQDVVNQNAQALNTLVKQLSSNFGAISSVLNDILSRLDPPEAEVQIDRLITGRLQSLQTYVTQQLIRAAEIRWSANLAATKMSECVLGQSKRVDFCGKGYHLMSFPQSAPHGVVFLHVTYVPAQEKNFTTAPAICHDGKAHFPREGVFVSNGTHWFVTQRNFYEPQIITTDNTFVSGNCDVVIGIVNNTVYDPLQPELDSFKEELDKYFKNHTSPDVDLGDISGINASVVNIQKEIDRLNEVAKNLNESLIDLQELGKYEQYIKGGGGSDIIKLLNEQVNKEMQSSNLYMSMSSWCYTHSLDGAGLFLFDHAAEEYEHAKKLIIFLNENNVPVQLTSISAPEHKFEGLTQIFQKAYEHEQHISESINNIVDHAIKSKDHATFNFLQWYVAEQHEEEVLFKDILDKIELIGNENHGLYLADQYVKGIAKSRKS

SEQ ID NO: 4773 - protein, 1379 aa, Artificial Sequence
  SARS-CoV-2/Australia/QLD02/2020__EPI_ISL_407896 spike protein (1-1211)(K986P_V987P_T887W_A1020W) Ferritin construct
MFVFLVLLPLVSSQCVNLTTRTQLPPAYTNSFTRGVYYPDKVFRSSVLHSTQDLFLPFFSNVTWFHAIHVSGTNGTKRFDNPVLPFNDGVYFASTEKSNIIRGWIFGTTLDSKTQSLLIVNNATNVVIKVCEFQFCNDPFLGVYYHKNNKSWMESEFRVYSSANNCTFEYVSQPFLMDLEGKQGNFKNLREFVFKNIDGYFKIYSKHTPINLVRDLPQGFSALEPLVDLPIGINITRFQTLLALHRSYLTPGDSSSGWTAGAAAYYVGYLQPRTFLLKYNENGTITDAVDCALDPLSETKCTLKSFTVEKGIYQTSNFRVQPTESIVRFPNITNLCPFGEVFNATRFASVYAWNRKRISNCVADYSVLYNSASFSTFKCYGVSPTKLNDLCFTNVYADSFVIRGDEVRQIAPGQTGKIADYNYKLPDDFTGCVIAWNSNNLDSKVGGNYNYLYRLFRKSNLKPFERDISTEIYQAGSTPCNGVEGFNCYFPLQSYGFQPTNGVGYQPYRVVVLSFELLHAPATVCGPKKSTNLVKNKCVNFNFNGLTGTGVLTESNKKFLPFQQFGRDIADTTDAVRDPQTLEILDITPCSFGGVSVITPGTNTSNQVAVLYQDVNCTEVPVAIHADQLTPTWRVYSTGSNVFQTRAGCLIGAEHVNNSYECDIPIGAGICASYQTQTNSPRRARSVASQSIIAYTMSLGAENSVAYSNNSIAIPTNFTISVTTEILPVSMTKTSVDCTMYICGDSTECSNLLLQYGSFCTQLNRALTGIAVEQDKNTQEVFAQVKQIYKTPPIKDFGGFNFSQILPDPSKPSKRSFIEDLLFNKVTLADAGFIKQYGDCLGDIAARDLICAQKFNGLTVLPPLLTDEMIAQYTSALLAGTITSGWWFGAGAALQIPFAMQMAYRFNGIGVTQNVLYENQKLIANQFNSAIGKIQDSLSSTASALGKLQDVVNQNAQALNTLVKQLSSNFGAISSVLNDILSRLDPPEAEVQIDRLITGRLQSLQTYVTQQLIRAAEIRWSANLAATKMSECVLGQSKRVDFCGKGYHLMSFPQSAPHGVVFLHVTYVPAQEKNFTTAPAICHDGKAHFPREGVFVSNGTHWFVTQRNFYEPQIITTDNTFVSGNCDVVIGIVNNTVYDPLQLELDSFKEELDKYFKNHTSPDVDLGDISGINASVVNIQKEIDRLNEVAKNLNESLIDLQELGKYEQYIKGGGGSDIIKLLNEQVNKEMQSSNLYMSMSSWCYTHSLDGAGLFLFDHAAEEYEHAKKLIIFLNENNVPVQLTSISAPEHKFEGLTQIFQKAYEHEQHISESINNIVDHAIKSKDHATFNFLQWYVAEQHEEEVLFKDILDKIELIGNENHGLYLADQYVKGIAKSRKS

SEQ ID NO: 4774 - protein, 1379 aa, Artificial Sequence
  SARS-CoV-2/India/1-31/2020__EPI_ISL_413523 spike protein (1-1211)(K986P_V987P_T887W_A1020W) Ferritin construct
MFVFLVLLPLVSSQCVNLTTRTQLPPAYTNSFTRGVYYPDKVFRSSVLHSTQDLFLPFFSNVTWFHAIHVSGTNGTKRFDNPVLPFNDGVYFASTEKSNIIRGWIFGTTLDSKTQSLLIVNNATNVVIKVCEFQFCNDPFLGVYYHKNNKSWMESEFRVYSSANNCTFEYVSQPFLMDLEGKQGNFKNLREFVFKNIDGYFKIYSKHTPINLVRDLPQGFSALEPLVDLPIGINITRFQTLLALHRSYLTPGDSSSGWTAGAAAYYVGYLQPRTFLLKYNENGTITDAVDCALDPLSETKCTLKSFTVEKGIYQTSNFRVQPTESIVRFPNITNLCPFGEVFNATRFASVYAWNRKRISNCVADYSVLYNSASFSTFKCYGVSPTKLNDLCFTNVYADSFVIRGDEVRQIAPGQTGKIADYNYKLPDDFTGCVIAWNSNNLDSKVGGNYNYLYRLFRKSNLKPFERDISTEIYQAGSTPCNGVEGFNCYFPLQSYGFQPTNGVGYQPYRVVVLSFELLHAPATVCGPKKSTNLVKNKCVNFNFNGLTGTGVLTESNKKFLPFQQFGRDIADTTDAVRDPQTLEILDITPCSFGGVSVITPGTNTSNQVAVLYQDVNCTEVPVAIHADQLTPTWRVYSTGSNVFQTRAGCLIGAEHVNNSYECDIPIGAGICASYQTQTNSPRRARSVASQSIIAYTMSLGAENSVAYSNNSIAIPTNFTISVTTEILPVSMTKTSVDCTMYICGDSTECSNLLLQYGSFCTQLNRALTGIAVEQDKNTQEVFAQVKQIYKTPPIKDFGGFNFSQILPDPSKPSKRSFIEDLLFNKVTLADAGFIKQYGDCLGDIAARDLICAQKFNGLTVLPPLLTDEMIAQYTSALLAGTITSGWWFGAGAALQIPFAMQMAYRFNGIGVTQNVLYENQKLIANQFNSVIGKIQDSLSSTASALGKLQDVVNQNAQALNTLVKQLSSNFGAISSVLNDILSRLDPPEAEVQIDRLITGRLQSLQTYVTQQLIRAAEIRWSANLAATKMSECVLGQSKRVDFCGKGYHLMSFPQSAPHGVVFLHVTYVPAQEKNFTTAPAICHDGKAHFPREGVFVSNGTHWFVTQRNFYEPQIITTDNTFVSGNCDVVIGIVNNTVYDPLQPELDSFKEELDKYFKNHTSPDVDLGDISGINASVVNIQKEIDRLNEVAKNLNESLIDLQELGKYEQYIKGGGGSDIIKLLNEQVNKEMQSSNLYMSMSSWCYTHSLDGAGLFLFDHAAEEYEHAKKLIIFLNENNVPVQLTSISAPEHKFEGLTQIFQKAYEHEQHISESINNIVDHAIKSKDHATFNFLQWYVAEQHEEEVLFKDILDKIELIGNENHGLYLADQYVKGIAKSRKS

SEQ ID NO: 4775 - protein, 1379 aa, Artificial Sequence
  SARS-CoV-2/Guangdong/GD2020087-P0008/2020__EPI_ISL_413863 spike protein (1-1211)(K986P_V987P_T887W_A1020W) Ferritin construct
MFVFLVLLPLVSSQCVNLTTRTQLPPAYTNSFTRGVYYPDKVFRSSVLHSTQDLFLPFFSNVTWFHAIHVSGTNGTKRFDNPVLPFNDGVYFASTEKSNIIRGWIFGTTLDSKTQSLLIVNNATNVVIKVCEFQFCNDPFLGVYYHKNNKSWMESEFRVYSSANNCTFEYVSQPFLMDLEGKQGNFKNLREFVFKNIDGYFKIYSKHTPINLVRDLPQGFSALEPLVDLPIGINITRFQTLLALHRSYLTPGDSSSGWTAGAAAYYVGYLQPRTFLLKYNENGTITDAVDCALDPLSETKCTLKSFTVEKGIYQTSNFRVQPTESIVRFPNITNLCPFGEVFNATRFASVYAWNRKRISNCVADYSVLYNSASFSTFKCYGVSPTKLNDLCFTNVYADSFVIRGDEVREIAPGQTGKIADYNYKLPDDFTGCVIAWNSNNLDSKVGGNYNYLYRLFRKSNLKPFERDISTEIYQAGSTPCNGVEGFNCYFPLQSYGFQPTNGVGYQPYRVVVLSFELLHAPATVCGPKKSTNLVKNKCVNFNFNGLTGTGVLTESNKKFLPFQQFGRDIADTTDAVRDPQTLEILDITPCSFGGVSVITPGTNTSNQVAVLYQDVNCTEVPVAIHADQLTPTWRVYSTGSNVFQTRAGCLIGAEHVNNSYECDIPIGAGICASYQTQTNSPRRARSVASQSIIAYTMSLGAENSVAYSNNSIAIPTNFTISVTTEILPVSMTKTSVDCTMYICGDSTECSNLLLQYGSFCTQLNRALTGIAVEQDKNTQEVFAQVKQIYKTPPIKDFGGFNFSQILPDPSKPSKRSFIEDLLFNKVTLADAGFIKQYGDCLGDIAARDLICAQKFNGLTVLPPLLTDEMIAQYTSALLAGTITSGWWFGAGAALQIPFAMQMAYRFNGIGVTQNVLYENQKLIANQFNSAIGKIQDSLSSTASALGKLQDVVNQNAQALNTLVKQLSSNFGAISSVLNDILSRLDPPEAEVQIDRLITGRLQSLQTYVTQQLIRAAEIRWSANLAATKMSECVLGQSKRVDFCGKGYHLMSFPQSAPHGVVFLHVTYVPAQEKNFTTAPAICHDGKAHFPREGVFVSNGTHWFVTQRNFYEPQIITTDNTFVSGNCDVVIGIVNNTVYDPLQPELDSFKEELDKYFKNHTSPDVDLGDISGINASVVNIQKEIDRLNEVAKNLNESLIDLQELGKYEQYIKGGGGSDIIKLLNEQVNKEMQSSNLYMSMSSWCYTHSLDGAGLFLFDHAAEEYEHAKKLIIFLNENNVPVQLTSISAPEHKFEGLTQIFQKAYEHEQHISESINNIVDHAIKSKDHATFNFLQWYVAEQHEEEVLFKDILDKIELIGNENHGLYLADQYVKGIAKSRKS

SEQ ID NO: 4776 - protein, 1379 aa, Artificial Sequence
  SARS-CoV-2/Sweden/01/2020__EPI_ISL_411951 spike protein (1-1211)(K986P_V987P_T887W_A1020W) Ferritin construct
MFVFLVLLPLVSSQCVNLTTRTQLPPAYTNSFTRGVYYPDKVFRSSVLHSTQDLFLPFFSNVTWFHAIHVSGTNGTKRFDNPVLPFNDGVYFASTEKSNIIRGWIFGTTLDSKTQSLLIVNNATNVVIKVCEFQFCNDPFLGVYYHKNNKSWMESEFRVYSSANNCTFEYVSQPFLMDLEGKQGNFKNLREFVFKNIDGYFKIYSKHTPINLVRDLPQGFSALEPLVDLPIGINITRFQTLLALHRSYLTPGDSSSGWTAGAAAYYVGYLQPRTFLLKYNENGTITDAVDCALDPLSETKCTLKSFTVEKGIYQTSNFRVQPTESIVRFPNITNLCPFGEVFNATRFASVYAWNRKRISNCVADYSVLYNSASFSTFKCYGVSPTKLNDLCFTNVYADSFVIRGDEVRQIAPGQTGKIADYNYKLPDDFTGCVIAWNSNNLDSKVGGNYNYLYRLFRKSNLKPFERDISTEIYQAGSTPCNGVEGFNCYFPLQSYGFQPTNGVGYQPYRVVVLSFELLHAPATVCGPKKSTNLVKNKCVNFNFNGLTGTGVLTESNKKFLPFQQFGRDIADTTDAVRDPQTLEILDITPCSFGGVSVITPGTNTSNQVAVLYQDVNCTEVPVAIHADQLTPTWRVYSTGSNVFQTRAGCLIGAEHVNNSYECDIPIGAGICASYQTQTNSPRRARSVASQSIIAYTMSLGAENSVAYSNNSIAIPTNFTISVTTEILPVSMTKTSVDCTMYICGDSTECSNLLLQYGSFCTQLNRALTGIAVEQDKNTQEVFAQVKQIYKTPPIKDCGGFNFSQILPDPSKPSKRSFIEDLLFNKVTLADAGFIKQYGDCLGDIAARDLICAQKFNGLTVLPPLLTDEMIAQYTSALLAGTITSGWWFGAGAALQIPFAMQMAYRFNGIGVTQNVLYENQKLIANQFNSAIGKIQDSLSSTASALGKLQDVVNQNAQALNTLVKQLSSNFGAISSVLNDILSRLDPPEAEVQIDRLITGRLQSLQTYVTQQLIRAAEIRWSANLAATKMSECVLGQSKRVDFCGKGYHLMSFPQSAPHGVVFLHVTYVPAQEKNFTTAPAICHDGKAHFPREGVFVSNGTHWFVTQRNFYEPQIITTDNTFVSGNCDVVIGIVNNTVYDPLQPELDSFKEELDKYFKNHTSPDVDLGDISGINASVVNIQKEIDRLNEVAKNLNESLIDLQELGKYEQYIKGGGGSDIIKLLNEQVNKEMQSSNLYMSMSSWCYTHSLDGAGLFLFDHAAEEYEHAKKLIIFLNENNVPVQLTSISAPEHKFEGLTQIFQKAYEHEQHISESINNIVDHAIKSKDHATFNFLQWYVAEQHEEEVLFKDILDKIELIGNENHGLYLADQYVKGIAKSRKS

SEQ ID NO: 4777 - protein, 1379 aa, Artificial Sequence
  SARS-CoV-2/Tianmen/HBCDC-HB-07/2020__EPI_ISL_412983 spike protein (1-1211)(K986P_V987P_T887W_A1020W) Ferritin construct
MFVFLVLLPLVSSQCVNLTTRTQLPPAYTNSFTRGVYYPDKVFRSSVLHSTQDLFLPFFSNVTWFHAIHVSGTNGTKRFDNPVLPFNDGVYFASTEKSNIIRGWIFGTTLDSKTQSLLIVNNATNVVIKVCEFQFCNDPFLGVYYHKNNKSWMESEFRVYSSANNCTFEYVSQPFLMDLEGKQGNFKNLREFVFKNIDGYFKIYSKHTPINLVRDLPQGFSALEPLVDLPIGINITRFQTLLALHRSYLTPGDSSSGWTAGAAAYYVGYLQPRTFLLKYNENGTITDAVDCALDPLSETKCTLKSFTVEKGIYQTSNFRVQPTESIVRFPNITNLCPFGEVFNATRFASVYAWNRKRISNCVADYSVLYNSASFSTFKCYGVSPTKLNDLCFTNVYADSFVIRGDEVRQIAPGQTGKIADYNYKLPDDFTGCVIAWNSNNLDSKVGGNYNYLYRLFRKSNLKPFERDISTEIYQAGSTPCNGVEGFNCYFPLQSYGFQPTNGVGYQPYRVVVLSFELLHAPATVCGPKKSTNLVKNKCVNFNFNGLTGTGVLTESNKKFLPFQQFGRDIADTTDAVRDPQTLEILDITPCSFGGVSVITPGTNTSNQVAVLYQDLNCTEVPVAIHADQLTPTWRVYSTGSNVFQTRAGCLIGAEHVNNSYECDIPIGAGICASYQTQTNSPRRARSVASQSIIAYTMSLGAENSVAYSNNSIAIPTNFTISVTTEILPVSMTKTSVDCTMYICGDSTECSNLLLQYGSFCTQLNRALTGIAVEQDKNTQEVFAQVKQIYKTPPIKDFGGFNFSQILPDPSKPSKRSFIEDLLFNKVTLADAGFIKQYGDCLGDIAARDLICAQKFNGLTVLPPLLTDEMIAQYTSALLAGTITSGWWFGAGAALQIPFAMQMAYRFNGIGVTQNVLYENQKLIANQFNSAIGKIQDSLSSTASALGKLQDVVNQNAQALNTLVKQLSSNFGAISSVLNDILSRLDPPEAEVQIDRLITGRLQSLQTYVTQQLIRAAEIRWSANLAATKMSECVLGQSKRVDFCGKGYHLMSFPQSAPHGVVFLHVTYVPAQEKNFTTAPAICHDGKAHFPREGVFVSNGTHWFVTQRNFYEPQIITTDNTFVSGNCDVVIGIVNNTVYDPLQPELDSFKEELDKYFKNHTSPDVDLGDISGINASVVNIQKEIDRLNEVAKNLNESLIDLQELGKYEQYIKGGGGSDIIKLLNEQVNKEMQSSNLYMSMSSWCYTHSLDGAGLFLFDHAAEEYEHAKKLIIFLNENNVPVQLTSISAPEHKFEGLTQIFQKAYEHEQHISESINNIVDHAIKSKDHATFNFLQWYVAEQHEEEVLFKDILDKIELIGNENHGLYLADQYVKGIAKSRKS

SEQ ID NO: 4778 - protein, 1379 aa, Artificial Sequence
  SARS-CoV-2/Hong Kong/case42_VM20002493/2020__EPI_ISL_414527 spike protein (1-1211)(K986P_V987P_T887W_A1020W) Ferritin construct
MFVFLVLLPLVSSQCVNLTTRTQLPPAYTNSFTRGVYYPDKVFRSSVLHSTQDLFLPFFSNVTWFHAIHVSGTNGTKRFDNPVLPFNDGVYFASTEKSNIIRGWIFGTTLDSKTQSLLIVNNATNVVIKVCEFQFCNDPFLGVYYHKNNKSWMESEFRVYSSANNCTFEYVSQPFLMDLEGKQGNFKNLREFVFKNIDGYFKIYSKHTPINLVRDLPQGFSALEPLVDLPIGINITRFQTLLALHRSYLTPGDSSSGWTAGAAAYYVGYLQPRTFLLKYNENGTITDAVDCALDPLSETKCTLKSFTVEKGIYQTSNFRVQPTESIVRFPNITNLCPFGEVFNATRFASVYAWNRKRISNCVADYSVLYNSASFSTFKCYGVSPTKLNDLCFTNVYADSFVIRGDEVRQIAPGQTGKIADYNYKLPDDFTGCVIAWNSNNLDSKVGGNYNYLYRLFRKSNLKPFERDISTEIYQAGSTPCNGVEGFNCYFPLQSYGFQPTNGVGYQPYRVVVLSFELLHAPATVCGPKKSTNLVKNKCVNFNFNGLTGTGVLTESNKKFLPFQQFGRDIADTTDAVRDPQTLEILDITPCSFGGVSVITPGTNTSNQVAVLYQDVNCTEVPVAIHADQLTPTWRVYSTGSNVFQTRAGCLIGAEHVNNSYECDIPIGAGICASYQTQTNSPRRARSVASQSIIAYTMSLGAENSVAYSNNSIAIPTNFAISVTTEILPVSMTKTSVDCTMYICGDSTECSNLLLQYGSFCTQLNRALTGIAVEQDKNTQEVFAQVKQIYKTPPIKDFGGFNFSQILPDPSKPSKRSFIEDLLFNKVTLADAGFIKQYGDCLGDIAARDLICAQKFNGLTVLPPLLTDEMIAQYTSALLAGTITSGWWFGAGAALQIPFAMQMAYRFNGIGVTQNVLYENQKLIANQFNSAIGKIQDSLSSTASALGKLQDVVNQNAQALNTLVKQLSSNFGAISSVLNDILSRLDPPEAEVQIDRLITGRLQSLQTYVTQQLIRAAEIRWSANLAATKMSECVLGQSKRVDFCGKGYHLMSFPQSAPHGVVFLHVTYVPAQEKNFTTAPAICHDGKAHFPREGVFVSNGTHWFVTQRNFYEPQIITTDNTFVSGNCDVVIGIVNNTVYDPLQPELDSFKEELDKYFKNHTSPDVDLGDISGINASVVNIQKEIDRLNEVAKNLNESLIDLQELGKYEQYIKGGGGSDIIKLLNEQVNKEMQSSNLYMSMSSWCYTHSLDGAGLFLFDHAAEEYEHAKKLIIFLNENNVPVQLTSISAPEHKFEGLTQIFQKAYEHEQHISESINNIVDHAIKSKDHATFNFLQWYVAEQHEEEVLFKDILDKIELIGNENHGLYLADQYVKGIAKSRKS

SEQ ID NO: 4779 - protein, 1379 aa, Artificial Sequence
  SARS-CoV-2/USA/CruiseA-23/2020__EPI_ISL_414482 spike protein (1-1211)(K986P_V987P_T887W_A1020W) Ferritin construct
MFVFLVLLPLVSSQCVNLTTRTQLPPAYTNSFTRGVYYPDKVFRSSVLHSTQDLFLPFFSNVTWFHAIHVSGTNGTKRFDNPVLPFNDGVYFASTEKSNIIRGWIFGTTLDSKTQSLLIVNNATNVVIKVCEFQFCNDPFLGVYYHKNNKSWMESEFRVYSSANNCTFEYVSQPFLMDLEVKQGNFKNLREFVFKNIDGYFKIYSKHTPINLVRDLPQGFSALEPLVDLPIGINITRFQTLLALHRSYLTPGDSSSGWTAGAAAYYVGYLQPRTFLLKYNENGTITDAVDCALDPLSETKCTLKSFTVEKGIYQTSNFRVQPTESIVRFPNITNLCPFGEVFNATRFASVYAWNRKRISNCVADYSVLYNSASFSTFKCYGVSPTKLNDLCFTNVYADSFVIRGDEVRQIAPGQTGKIADYNYKLPDDFTGCVIAWNSNNLDSKVGGNYNYLYRLFRKSNLKPFERDISTEIYQAGSTPCNGVEGFNCYFPLQSYGFQPTNGVGYQPYRVVVLSFELLHAPATVCGPKKSTNLVKNKCVNFNFNGLTGTGVLTESNKKFLPFQQFGRDIADTTDAVRDPQTLEILDITPCSFGGVSVITPGTNTSNQVAVLYQDVNCTEVPVAIHADQLTPTWRVYSTGSNVFQTRAGCLIGAEHVNNSYECDIPIGAGICASYQTQTNSPRRARSVASQSIIAYTMSLGAENSVAYSNNSIAIPTNFTISVTTEILPVSMTKTSVDCTMYICGDSTECSNLLLQYGSFCTQLNRALTGIAVEQDKNTQEVFAQVKQIYKTPPIKDFGGFNFSQILPDPSKPSKRSFIEDLLFNKVTLADAGFIKQYGDCLGDIAARDLICAQKFNGLTVLPPLLTDEMIAQYTSALLAGTITSGWWFGAGAALQIPFAMQMAYRFNGIGVTQNVLYENQKLIANQFNSAIGKIQDSLSSTASALGKLQDVVNQNAQALNTLVKQLSSNFGAISSVLNDILSRLDPPEAEVQIDRLITGRLQSLQTYVTQQLIRAAEIRWSANLAATKMSECVLGQSKRVDFCGKGYHLMSFPQSAPHGVVFLHVTYVPAQEKNFTTAPAICHDGKAHFPREGVFVSNGTHWFVTQRNFYEPQIITTDNTFVSGNCDVVIGIVNNTVYDPLQPELDSFKEELDKYFKNHTSPDVDLGDISGINASVVNIQKEIDRLNEVAKNLNESLIDLQELGKYEQYIKGGGGSDIIKLLNEQVNKEMQSSNLYMSMSSWCYTHSLDGAGLFLFDHAAEEYEHAKKLIIFLNENNVPVQLTSISAPEHKFEGLTQIFQKAYEHEQHISESINNIVDHAIKSKDHATFNFLQWYVAEQHEEEVLFKDILDKIELIGNENHGLYLADQYVKGIAKSRKS

SEQ ID NO: 4780 - protein, 1379 aa, Artificial Sequence
  SARS-CoV-2/Hong Kong/case85_VM20002868/2020__EPI_ISL_414519 spike protein (1-1211)(K986P_V987P_T887W_A1020W) Ferritin construct
MFVFLVLVPLVSSQCVNLTTRTQLPPAYTNSFTRGVYYPDKVFRSSVLHSTQDLFLPFFSNVTWFHAIHVSGTNGTKRFDNPVLPFNDGVYFASTEKSNIIRGWIFGTTLDSKTQSLLIVNNATNVVIKVCEFQFCNDPFLGVYYHKNNKSWMESEFRVYSSANNCTFEYVSQPFLMDLEGKQGNFKNLREFVFKNIDGYFKIYSKHTPINLVRDLPQGFSALEPLVDLPIGINITRFQTLLALHRSYLTPGDSSSGWTAGAAAYYVGYLQPRTFLLKYNENGTITDAVDCALDPLSETKCTLKSFTVEKGIYQTSNFRVQPTESIVRFPNITNLCPFGEVFNATRFASVYAWNRKRISNCVADYSVLYNSASFSTFKCYGVSPTKLNDLCFTNVYADSFVIRGDEVRQIAPGQTGKIADYNYKLPDDFTGCVIAWNSNNLDSKVGGNYNYLYRLFRKSNLKPFERDISTEIYQAGSTPCNGVEGFNCYFPLQSYGFQPTNGVGYQPYRVVVLSFELLHAPATVCGPKKSTNLVKNKCVNFNFNGLTGTGVLTESNKKFLPFQQFGRDIADTTDAVRDPQTLEILDITPCSFGGVSVITPGTNTSNQVAVLYQDVNCTEVPVAIHADQLTPTWRVYSTGSNVFQTRAGCLIGAEHVNNSYECDIPIGAGICASYQTQTNSPRRARSVASQSIIAYTMSLGAENSVAYSNNSIAIPTNFTISVTTEILPVSMTKTSVDCTMYICGDSTECSNLLLQYGSFCTQLNRALTGIAVEQDKNTQEVFAQVKQIYKTPPIKDFGGFNFSQILPDPSKPSKRSFIEDLLFNKVTLADAGFIKQYGDCLGDIAARDLICAQKFNGLTVLPPLLTDEMIAQYTSALLAGTITSGWWFGAGAALQIPFAMQMAYRFNGIGVTQNVLYENQKLIANQFNSAIGKIQDSLSSTASALGKLQDVVNQNAQALNTLVKQLSSNFGAISSVLNDILSRLDPPEAEVQIDRLITGRLQSLQTYVTQQLIRAAEIRWSANLAATKMSECVLGQSKRVDFCGKGYHLMSFPQSAPHGVVFLHVTYVPAQEKNFTTAPAICHDGKAHFPREGVFVSNGTHWFVTQRNFYEPQIITTDNTFVSGNCDVVIGIVNNTVYDPLQPELDSFKEELDKYFKNHTSPDVDLGDISGINASVVNIQKEIDRLNEVAKNLNESLIDLQELGKYEQYIKGGGGSDIIKLLNEQVNKEMQSSNLYMSMSSWCYTHSLDGAGLFLFDHAAEEYEHAKKLIIFLNENNVPVQLTSISAPEHKFEGLTQIFQKAYEHEQHISESINNIVDHAIKSKDHATFNFLQWYVAEQHEEEVLFKDILDKIELIGNENHGLYLADQYVKGIAKSRKS

SEQ ID NO: 4781 - protein, 1379 aa, Artificial Sequence; identical to SEQ ID NO: 4771
  SARS-CoV-2/England/200990660/2020__EPI_ISL_414523 spike protein (1-1211)(K986P_V987P_T887W_A1020W) Ferritin construct

SEQ ID NO: 4782 - protein, 1379 aa, Artificial Sequence
  SARS-CoV-2/Australia/NSW09/2020__EPI_ISL_413595 spike protein (1-1211)(K986P_V987P_T887W_A1020W) Ferritin construct
MFVFLVLLPLVSSQCVNLTTRTQLPPAYTNSFTRGVYYPDKVFRSSVLHSTQDLFLPFFSNVTWFHAIHVSGTNGTKRFDNPVLPFNDGVYFASTEKSNIIRGWIFGTTLDSKTQSLLIVNNATNVVIKVCEFQFCNDPFLGVYYHKNNKSWMESEFRVYSSANNCTFEYVSQPFLMDLEGKQGNFKNLREFVFKNIDGYFKIYSKHTPINLVRDLPQGFSALEPLVDLPIGINITRFQTLLALHRSYLTPGDSSSGWTAGAAAYYVGYLQPRTFLLKYNENGTITDAVDCALDPLSETKCTLKSFTVEKGIYQTSNFRVQPTESIVRFPNITNLCPFGEVFNATRFASVYAWNRKRISNCVADYSVLYNSASFSTFKCYGVSPTKLNDLCFTNVYADSFVIRGDEVRQIAPGQTGKIADYNYKLPDDFTGCVIAWNSNNLDSKVGGNYNYLYRLFRKSNLKPFERDISTEIYQAGSTPCNGVEGFNCYFPLQSYGFQPTNGVGYQPYRVVVLSFELLHAPATVCGPKKSTNLVKNKCVNFNFNGLTGTGVLTESNKKFLPFQQFGRDIADTTDAVRDPQTLEILDITPCSFGGVSVITPGTNTSNQVAVLYQDVNCTEVPVAIHADQLTPTWRVYSTGSNVFQTRAGCLIGAEHVNNSYECDIPIGAGICASYQTQTNSPRRARSVASQSIIAYTMSLGAENSVAYSNNSIAIPTNFTISVTTEILPVSMTKTSVDCTMYICGDSTECSNLLLQYGSFCTQLNRALTGIAVEQDKNTQEVFAQVKQIYKTPPIKDFGGFNFSQILPDPSKPSKRSFIEDLLFNKVTLADAGFIKQYGDCLGDIAARDLICAQKFNGLTVLPPLLTDEMIAQYTSALLAGTITSGWWFGAGAALQIPFAMQMAYRFNGIGVTQNVLYENQKLIANQFNSAIGKIQDSLSFTASALGKLQDVVNQNAQALNTLVKQLSSNFGAISSVLNDILSRLDPPEAEVQIDRLITGRLQSLQTYVTQQLIRAAEIRWSANLAATKMSECVLGQSKRVDFCGKGYHLMSFPQSAPHGVVFLHVTYVPAQEKNFTTAPAICHDGKAHFPREGVFVSNGTHWFVTQRNFYEPQIITTDNTFVSGNCDVVIGIVNNTVYDPLQPELDSFKEELDKYFKNHTSPDVDLGDISGINASVVNIQKEIDRLNEVAKNLNESLIDLQELGKYEQYIKGGGGSDIIKLLNEQVNKEMQSSNLYMSMSSWCYTHSLDGAGLFLFDHAAEEYEHAKKLIIFLNENNVPVQLTSISAPEHKFEGLTQIFQKAYEHEQHISESINNIVDHAIKSKDHATFNFLQWYVAEQHEEEVLFKDILDKIELIGNENHGLYLADQYVKGIAKSRKS

SEQ ID NO: 4783 - protein, 1379 aa, Artificial Sequence; identical to SEQ ID NO: 4763
  SARS-CoV-2/Australia/NSW10/2020__EPI_ISL_413596 spike protein (1-1211)(K986P_V987P_T887W_A1020W) Ferritin construct

SEQ ID NO: 4784 - protein, 1379 aa, Artificial Sequence
  SARS-CoV-2/Switzerland/1000477797/2020__EPI_ISL_413023 spike protein (1-1211)(K986P_V987P_T887W_A1020W) Ferritin construct
MFVFLVLLPLVSSQCVNLTTRTQLPPAYTNSFTRGVYYPDKVFRSSVLHSTQDLFLPFFSNVTWFHAIHVSGTNGTKRFDNPVLPFNDGVYFASTEKSNIIRGWIFGTTLDSKTQSLLIVNNATNVVIKVCEFQFCNDPFLGVYYHKNNKSWMESEFRVYSSANNCTFEYVSQPFLMDLEGKQGNFKNLREFVFKNIDGYFNIYSKHTPINLVRDLPQGFSALEPLVDLPIGINITRFQTLLALHRSYLTPGDSSSGWTAGAAAYYVGYLQPRTFLLKYNENGTITDAVDCALDPLSETKCTLKSFTVEKGIYQTSNFRVQPTESIVRFPNITNLCPFGEVFNATRFASVYAWNRKRISNCVADYSVLYNSASFSTFKCYGVSPTKLNDLCFTNVYADSFVIRGDEVRQIAPGQTGKIADYNYKLPDDFTGCVIAWNSNNLDSKVGGNYNYLYRLFRKSNLKPFERDISTEIYQAGSTPCNGVEGFNCYFPLQSYGFQPTNGVGYQPYRVVVLSFELLHAPATVCGPKKSTNLVKNKCVNFNFNGLTGTGVLTESNKKFLPFQQFGRDIADTTDAVRDPQTLEILDITPCSFGGVSVITPGTNTSNQVAVLYQGVNCTEVPVAIHADQLTPTWRVYSTGSNVFQTRAGCLIGAEHVNNSYECDIPIGAGICASYQTQTNSPRRARSVASQSIIAYTMSLGAENSVAYSNNSIAIPTNFTISVTTEILPVSMTKTSVDCTMYICGDSTECSNLLLQYGSFCTQLNRALTGIAVEQDKNTQEVFAQVKQIYKTPPIKDFGGFNFSQILPDPSKPSKRSFIEDLLFNKVTLADAGFIKQYGDCLGDIAARDLICAQKFNGLTVLPPLLTDEMIAQYTSALLAGTITSGWWFGAGAALQIPFAMQMAYRFNGIGVTQNVLYENQKLIANQFNSAIGKIQDSLSSTASALGKLQDVVNQNAQALNTLVKQLSSNFGAISSVLNDILSRLDPPEAEVQIDRLITGRLQSLQTYVTQQLIRAAEIRWSANLAATKMSECVLGQSKRVDFCGKGYHLMSFPQSAPHGVVFLHVTYVPAQEKNFTTAPAICHDGKAHFPREGVFVSNGTHWFVTQRNFYEPQIITTDNTFVSGNCDVVIGIVNNTVYDPLQPELDSFKEELDKYFKNHTSPDVDLGDISGINASVVNIQKEIDRLNEVAKNLNESLIDLQELGKYEQYIKGGGGSDIIKLLNEQVNKEMQSSNLYMSMSSWCYTHSLDGAGLFLFDHAAEEYEHAKKLIIFLNENNVPVQLTSISAPEHKFEGLTQIFQKAYEHEQHISESINNIVDHAIKSKDHATFNFLQWYVAEQHEEEVLFKDILDKIELIGNENHGLYLADQYVKGIAKSRKS

SEQ ID NO: 4785 - protein, 1379 aa, Artificial Sequence
  SARS-CoV-2/Belgium/BA-02291/2020__EPI_ISL_415159 spike protein (1-1211)(K986P_V987P_T887W_A1020W) Ferritin construct
MFVFLVLLPLVSSQCVNLTTRTQLPPAYTNSFTRGVYYPDKVFRSSVLHSTQDLFLPFFSNVTWFHAIHVSGTNGTKRFDNPVLPFNDGVYFASTEKSNIIRGWIFGTTLDSKTQSLLIVNNATNVVIKVCEFQFCNDPFLGVYYHKNNKSWMESEFRVYSSANNCTFEYVSQPFLMDLEGKQGNFKNLREFVFKNIDGYFKIYSKHTPINLVRDLPQGFSALEPLVDLPIGINITRFQTLLALHRSYLTPGDSSSGWTAGAAAYYVGYLQPRTFLLKYNENGTITDAVDCALDPLSETKCTLKSFTVEKGIYQTSNFRVQPTESIVRFPNITNLCPFGEVFNATRFASVYAWNRKRISNCVADYSVLYNSASFSTFKCYGVSPTKLNDLCFTNVYADSFVIRGDEVRQIAPGQTGKIADYNYKLPDDFTGCVIAWNSNNLDSKVGGNYNYLYRLFRRSNLKPFERDISTEIYQAGSTPCNGVEGFNCYFPLQSYGFQPTNGVGYQPYRVVVLSFELLPAPATVCGPKKSTNLVKNKCVNFNFNGLTGTGVLTESNKKFLPFQQFGRDIADTTDAVRDPQTLEILDITPCSFGGVSVITPGTNTSNQVAVLYQGVNCTEVPVAIHADQLTPTWRVYSTGSNVFQTRAGCLIGAEHVNNSYECDIPIGAGICASYQTQTNSPRRARSVASQSIIAYTMSLGAENSVAYSNNSIAIPTNFTISVTTEILPVSMTKTSVDCTMYICGDSTECSNLLLQYGSFCTQLNRALTGIAVEQDKNTQEVFAQVKQIYKTPPIKDFGGFNFSQILPDPSKPSKRSFIEDLLFNKVTLADAGFIKQYGDCLGDIAARDLICAQKFNGLTVLPPLLTDEMIAQYTSALLAGTITSGWWFGAGAALQIPFAMQMAYRFNGIGVTQNVLYENQKLIANQFNSAIGKIQDSLSSAAPALGKLQDVVNQNAQALNTLVKQLSSNFGAISSVLNDILSRLDPPEAEVQIDRLITGRLQSLQTYVTQQLIRAAEIRWSANLAATKMSECVLGQSKRVDFCGKGYHLMSFPQSAPHGVVFLHVTYVPAQEKNFTTAPAICHDGKAHFPREGVFVSNGTHWFVTQRNFYEPQIITTDNTFVSGNCDVVIGIVNNTVYDPLQPELDSFKEELDKYFKNHTSPDVDLGDISGINASVVNIQKEIDRLNEVAKNLNESLIDLQELGKYEQYIKGGGGSDIIKLLNEQVNKEMQSSNLYMSMSSWCYTHSLDGAGLFLFDHAAEEYEHAKKLIIFLNENNVPVQLTSISAPEHKFEGLTQIFQKAYEHEQHISESINNIVDHAIKSKDHATFNFLQWYVAEQHEEEVLFKDILDKIELIGNENHGLYLADQYVKGIAKSRKS

SEQ ID NO: 4786 - protein, 1379 aa, Artificial Sequence
  SARS-CoV-2/USA/WA8-UW5/2020__EPI_ISL_413486 spike protein (1-1211)(K986P_V987P_T887W_A1020W) Ferritin construct
MFVFLVLLPLVSSQCVNLTTRTQLPPAYTNSFTRGVYYPDKVFRSSVLHSTQDLFLPFFSNVTWFHAIHVSGTNGTKRFDNPVLPFNDGVYFASTEKSNIIRGWIFGTTLDSKTQSLLIVNNATNVVIKVCEFQFCNDPFLGVYYHKNNKSWMESEFRVYSSANNCTFEYVSQPFLMDLEGKQGNFKNLREFVFKNIDGYFKIYSKHTPINLVRDLPQGFSALEPLVDLPIGINITRFQTLLALHRSYLTPGDSSSGWTAGAAAYYVGYLQPRTFLLKYNENGTITDAVDCALDPLSETKCTLKSFTVEKGIYQTSNFRVQPTESIVRFPNITNLCPFGEVFNATRFASVYAWNRKRISNCVADYSVLYNSASFSTFKCYGVSPTKLNDLCFTNVYADSFVIRGDEVRQIAPGQTGKIADYNYKLPDDFTGCVIAWNSNNLDSKVGGNYNYLYRLFRKSNLKPFERDISTEIYQAGSTPCNGVEGFNCYFPLQSYGFQPTNGVGYQPYRVVVLSFELLHAPATVCGPKKSTNLVKNKCVNFNFNGLTGTGVLTESNKKFLPFQQFGRDIADTTDAVRDPQTLEILDITPCSFGGVSVITPGTNTSNQVAVLYQDVNCTEVPVAIHADQLTPTWRVYSTGSNVFQTRAGCLIGAEYVNNSYECDIPIGAGICASYQTQTNSPRRARSVASQSIIAYTMSLGAENSVAYSNNSIAIPTNFTISVTTEILPVSMTKTSVDCTMYICGDSTECSNLLLQYGSFCTQLNRALTGIAVEQDKNTQEVFAQVKQIYKTPPIKDFGGFNFSQILPDPSKPSKRSFIEDLLFNKVTLADAGFIKQYGDCLGDIAARDLICAQKFNGLTVLPPLLTDEMIAQYTSALLAGTITSGWWFGAGAALQIPFAMQMAYRFNGIGVTQNVLYENQKLIANQFNSAIGKIQDSLSSTASALGKLQDVVNQNAQALNTLVKQLSSNFGAISSVLNDILSRLDPPEAEVQIDRLITGRLQSLQTYVTQQLIRAAEIRWSANLAATKMSECVLGQSKRVDFCGKGYHLMSFPQSAPHGVVFLHVTYVPAQEKNFTTAPAICHDGKAHFPREGVFVSNGTHWFVTQRNFYEPQIITTDNTFVSGNCDVVIGIVNNTVYDPLQPELDSFKEELDKYFKNHTSPDVDLGDISGINASVVNIQKEIDRLNEVAKNLNESLIDLQELGKYEQYIKGGGGSDIIKLLNEQVNKEMQSSNLYMSMSSWCYTHSLDGAGLFLFDHAAEEYEHAKKLIIFLNENNVPVQLTSISAPEHKFEGLTQIFQKAYEHEQHISESINNIVDHAIKSKDHATFNFLQWYVAEQHEEEVLFKDILDKIELIGNENHGLYLADQYVKGIAKSRKS

SEQ ID NO: 4787 - protein, 1379 aa, Artificial Sequence
  SARS-CoV-2/England/20102000506/2020__EPI_ISL_415147 spike protein (1-1211)(K986P_V987P_T887W_A1020W) Ferritin construct
MFVFLVLLPLVSSQCVNLTTRTQLPPAYTNSFTRGVYYPDKVFRSSVLHSTQDLFLPFFSNVTWFHAIHVSGTNGTKRFDNPVLPFNDGVYFASTEKSNIIRGWIFGTTLDSKTQSLLIVNNATNVVIKVCEFQFCNDPFLGVYYHKNNKSWMESEFRVYSSANNCTFEYVSQPFLMDLEGKQGNFKNLREFVFKNIDGYFKIYSKHTPINLVRDLPQGFSALEPLVDLPIGINITRFQTLLALHRSYLTPGDSSSGWTAGAAAYYVGYLQPRTFLLKYNENGTITDAVDCALDPLSETKCTLKSFTVEKGIYQTSNFRVQPTESIVRFPNITNLCPFGEVFNATRFASVYAWNRKRISNCVADYSVLYNSASFSTFKCYGVSPTKLNDLCFTNVYADSFVIRGDEVRQIAPGQTGKIADYNYKLPDDFTGCVIAWNSNNLDSKVGGNYNYLYRLFRKSNLKPFERDISTEIYQAGSTPCNGVEGFNCYFPLQSYGFQPTNGVGYQPYRVVVLSFELLHAPATVCGPKKSTNLVKNKCVNFNFNGLTGTGVLTESNKKFLPFQQFGRDIADTTDAVRDPQTLEILDITPCSFGGVSVITPGTNTSNQVAVLYQGVNCTEVPVAIHADQLTPTWRVYSTGSNVFQTRAGCLIGAEHVNNSYECDIPIGAGICASYQTQTNSPRRARSVASQSIIAYTMSLGAENSVAYSNNSIAIPTNFTISVTTEILPVSMTKTSVDCTMYICGDSTECSNLLLQYGSFCTQLNRALTGIAVEQDKNTQEVFAQVKQIYKTPPIKDFGGFNFSQILPDPSKPSKRSFIEDLLFNKVTLADAGFIKQYGYCLGDIAARDLICAQKFNGLTVLPPLLTDEMIAQYTSALLAGTITSGWWFGAGAALQIPFAMQMAYRFNGIGVTQNVLYENQKLIANQFNSAIGKIQDSLSSTASALGKLQDVVNQNAQALNTLVKQLSSNFGAISSVLNDILSRLDPPEAEVQIDRLITGRLQSLQTYVTQQLIRAAEIRWSANLAATKMSECVLGQSKRVDFCGKGYHLMSFPQSAPHGVVFLHVTYVPAQEKNFTTAPAICHDGKAHFPREGVFVSNGTHWFVTQRNFYEPQIITTDNTFVSGNCDVVIGIVNNTVYDPLQPELDSFKEELDKYFKNHTSPDVDLGDISGINASVVNIQKEIDRLNEVAKNLNESLIDLQELGKYEQYIKGGGGSDIIKLLNEQVNKEMQSSNLYMSMSSWCYTHSLDGAGLFLFDHAAEEYEHAKKLIIFLNENNVPVQLTSISAPEHKFEGLTQIFQKAYEHEQHISESINNIVDHAIKSKDHATFNFLQWYVAEQHEEEVLFKDILDKIELIGNENHGLYLADQYVKGIAKSRKS

SEQ ID NO: 4788 - protein, 1379 aa, Artificial Sequence
  SARS-CoV-2/Belgium/VAG-03013/2020__EPI_ISL_415155 spike protein (1-1211)(K986P_V987P_T887W_A1020W) Ferritin construct
MFVFLVLLPLVSSQCVNLTTRTQLPPAYTNSFTRGVYYPDKVFRSSVLHSTQDLFLPFFSNVTWFHAIHVSGTNGTKRFDNPVLPFNDGVYFASTEKSNIIRGWIFGTTLDSKTQSLLIVNNATNVVIKVCEFQFCNDPFLGVYYHKNNKSWMESEFRVYSSANNCTFEYVSQPFLMDLEGKQGNFKNLREFVFKNIDGYFKIYSKHTPINLVRDLPQGFSALEPLVDLPIGINITRFQTLLALHRSYLTPGDSSSGWTAGAAAYYVGYLQPRTFLLKYNENGTITDAVDCALDPLSETKCTLKSFTVEKGIYQTSNFRVQPTESIVRFPNITNLCPFGEVFNATRFASVYAWNRKRISNCVADYSVLYNSASFSTFKCYGVSPTKLNDLCFTNVYADSFVIRGDEVRQIAPGQTGKIADYNYKLPDDFTGCVIAWNSNNLDSKVGGNYNYLYRLFRKSNLKPFERDISTEIYQAGSTPCNGVEGFNCYFPLQSYGFQPTNGVGYQPYRVVVLSFELLHAPATVCGPKKSTNLVKNKCVNFNFNGLTGTGVLTESNKKFLPFQQFGRDIADTTDAVRDPQTLEILDITPCSFGGVSVITPGTNTSNQVAVLYQGVNCTEVPVAIHADQLTPTWRVYSTGSNVFQTRAGCLIGAEHVNNSYECDIPIGAGICASYQTQTNSPRRARSVASQSIIAYTMSLGAENSVAYSNNSIAIPTNFTISVTTEILPVSMTKTSVDCTMYICGDSTECSNLLLQYGSFCTQLNRALTGIAVEQDKNTQEVFAQVKQIYKTPPIKDFGGFNFSQILPDPSKPSKRSFIEDLLFNKVTLADAGFIKQYGDCLGDIAARDLICAQKFNGLTVLPPLLTDEMIAQYTSALLAGTITSGWWFGAGAALQIPFAMQMAYRFNGIGVTQNVLYENQKLIANQFNSAIGKIQDSLSSTATALGKLQDVVNQNAQALNTLVKQLSSNFGAISSVLNDILSRLDPPEAEVQIDRLITGRLQSLQTYVTQQLIRAAEIRWSANLAATKMSECVLGQSKRVDFCGKGYHLMSFPQSAPHGVVFLHVTYVPAQEKNFTTAPAICHDGKAHFPREGVFVSNGTHWFVTQRNFYEPQIITTDNTFVSGNCDVVIGIVNNTVYDPLQPELDSFKEELDKYFKNHTSPDVDLGDISGINASVVNIQKEIDRLNEVAKNLNESLIDLQELGKYEQYIKGGGGSDIIKLLNEQVNKEMQSSNLYMSMSSWCYTHSLDGAGLFLFDHAAEEYEHAKKLIIFLNENNVPVQLTSISAPEHKFEGLTQIFQKAYEHEQHISESINNIVDHAIKSKDHATFNFLQWYVAEQHEEEVLFKDILDKIELIGNENHGLYLADQYVKGIAKSRKS

SEQ ID NO: 4789 - protein, 1379 aa, Artificial Sequence
  SARS-CoV-2/Belgium/BC-03016/2020__EPI_ISL_415157 spike protein (1-1211)(K986P_V987P_T887W_A1020W) Ferritin construct
MFVFLVLLPLVSSQCVNLTTRTQLPPAYTNSFTRGVYYPDKVFRSSVLHSTQDLFLPFFSNVTWFHAIHVSGTNGTKRFDNPVLPFNDGVYFASTEKSNIIRGWIFGTTLDSKTQSLLIVNNATNVVIKVCEFQFCNDPFLGVYYHKNNKSWMESEFRVYSSANNCTFEYVSQPFLMDLEGKQGNFKNLREFVFKNIDGYFKIYSKHTPINLVRDLPQGFSALEPLVDLPIGINITRFQTLLALHRSYLTPGDSSSGWTAGAAAYYVGYLQPRTFLLKYNENGTITDAVDCALDPLSETKCTLKSFTVEKGIYQTSNFRVQPTESIVRFPNITNLCPFGEVFNATRFASVYAWNRKRISNCVADYSVLYNSASFSTFKCYGVSPTKLNDLCFTNVYADSFVIRGDEVRQIAPGQTGKIADYNYKLPDDFTGCVIAWNSNNLDSKVGGNYNYLYRLFRKSNLKPFERDISTEIYQAGSTPCNGVEGFNCYFPLQSYGFQPTNGVGYQPYRVVVLSFELLHAPATVCGPKKSTNLVKNKCVNFNFNGLTGTGVLTESNKKFLPFQQFGRDIADTTDAVRDPQTLEILDITPCSFGGVSVITPGTNTSNQVAVLYQGVNCTEVPVAIHADQLTPTWRVYSTGSNVFQTRAGCLIGAEHVNNSYECDIPIGAGICASYQTQTNSPRRARSVASQSIIAYTMSLGAENSVAYSNNSIAIPTNFTISVTTEILPVSMTKTSVDCTMYICGDSTECSNLLLQYGSFCTQLNRALTGIAVEQDKNTQEVFAQVKQIYKTPPIKDFGGFNFSQILPDPSKPSKRSFIEDLLFNKVTLADAGFIKQYGDCLGDIAARDLICAQKFNGLTVLPPLLTDEMIAQYTSALLAGTITSGWWFGAGAALQIPFAMQMAYRFNGIGVTQNVLYENQKLIANQFNSAIGKIQDSLSSTAPALGKLQDVVNQNAQALNTLVKQLSSNFGAISSVLNDILSRLDPPEAEVQIDRLITGRLQSLQTYVTQQLIRAAEIRWSANLAATKMSECVLGQSKRVDFCGKGYHLMSFPQSAPHGVVFLHVTYVPAQEKNFTTAPAICHDGKAHFPREGVFVSNGTHWFVTQRNFYEPQIITTDNTFVSGNCDVVIGIVNNTVYDPLQPELDSFKEELDKYFKNHTSPDVDLGDISGINASVVNIQKEIDRLNEVAKNLNESLIDLQELGKYEQYIKGGGGSDIIKLLNEQVNKEMQSSNLYMSMSSWCYTHSLDGAGLFLFDHAAEEYEHAKKLIIFLNENNVPVQLTSISAPEHKFEGLTQIFQKAYEHEQHISESINNIVDHAIKSKDHATFNFLQWYVAEQHEEEVLFKDILDKIELIGNENHGLYLADQYVKGIAKSRKS

SEQ ID NO: 4790 - protein, 1379 aa, Artificial Sequence
  SARS-CoV-2/Germany/BavPat3/2020__EPI_ISL_414521 spike protein (1-1211)(K986P_V987P_T887W_A1020W) Ferritin construct
MFVFLVLLPLVSSQCVNLTTRTQLPPAYTNSFTRGVYYPDKVFRSSVLHSTQDLFLPFFSNVTWFHAIHVSGTNGTKRFDNPVLPFNDGVYFASTEKSNIIRGWIFGTTLDSKTQSLLIVNNATNVVIKVCEFQFCNDPFLGVYYHKNNKSWMESEFRVYSSANNCTFEYVSQPFLMDLEGKQGNFKNLREFVFKNIDGYFKIYSKHTPINLVRDLPQGFSALEPLVDLPIGINITRFQTLLALHRSYLTPGDSSSGWTAGAAAYYVGYLQPRTFLLKYNENGTITDAVDCALDPLSETKCTLKSFTVEKGIYQTSNFRVQPTESIVRFPNITNLCPFGEVFNATRFASVYAWNRKRISNCVADYSVLYNSASFSTFKCYGVSPTKLNDLCFTNVYADSFVIRGDEVRQIAPGQTGKIADYNYKLPDDFTGCVIAWNSNNLDSKVGGNYNYLYRLFRKSNLKPFERDISTEIYQAGSTPCNGVEGFNCYFPLQSYGFQPTNGVGYQPYRVVVLSFELLHAPATVCGPKKSTNLVKNKCVNFNFNGLTGTGVLTESNKKFLPFQQFGRDIADTTDAVRDPQTLEILDITPCSFGGVSVITPGTNTSNQVAVLYQDVNCTEVPVAIHADQLTPTWRVYSTGSNVFQTRAGCLIGAEHVNNSYECDIPIGAGICASYQTQTNSPRRARSVASQSIIAYTMSLGAENSVAYSNNSIAIPTNFTISVTTEILPVSMTKTSVDCTMYICGDSTECSNLLLQYGSFCTQLNRALTGIAVEQDKNTQQVFAQVKQIYKTPPIKDFGGFNFSQILPDPSKPSKRSFIEDLLFNKVTLADAGFIKQYGDCLGDIAARDLICAQKFNGLTVLPPLLTDEMIAQYTSALLAGTITSGWWFGAGAALQIPFAMQMAYRFNGIGVTQNVLYENQKLIANQFNSAIGKIQDSLSSTASALGKLQDVVNQNAQALNTLVKQLSSNFGAISSVLNDILSRLDPPEAEVQIDRLITGRLQSLQTYVTQQLIRAAEIRWSANLAATKMSECVLGQSKRVDFCGKGYHLMSFPQSAPHGVVFLHVTYVPAQEKNFTTAPAICHDGKAHFPREGVFVSNGTHWFVTQRNFYEPQIITTDNTFVSGNCDVVIGIVNNTVYDPLQPELDSFKEELDKYFKNHTSPDVDLGDISGINASVVNIQKEIDRLNEVAKNLNESLIDLQELGKYEQYIKGGGGSDIIKLLNEQVNKEMQSSNLYMSMSSWCYTHSLDGAGLFLFDHAAEEYEHAKKLIIFLNENNVPVQLTSISAPEHKFEGLTQIFQKAYEHEQHISESINNIVDHAIKSKDHATFNFLQWYVAEQHEEEVLFKDILDKIELIGNENHGLYLADQYVKGIAKSRKS

SEQ ID NO: 4791 - protein, 1379 aa, Artificial Sequence
  SARS-CoV-2/France/HF1805/2020__EPI_ISL_414628 spike protein (1-1211)(K986P_V987P_T887W_A1020W) Ferritin construct
MFVFLVLLPLVSSQCVNLTTRTQLPPAYTNSFTRGVYYPDKVFRSSVLHSTQDLFLPFFSNVTWFHAIHVSGTNGTKRFDNPVLPFNDGVYFASTEKSNIIRGWIFGTTLDSKTQSLLIVNNATNVVIKVCEFQFCNDPFLGVYYHKNNKSWMESEFRVYSSANNCTFEYVSQPFLMDLEGKQGNFKNLREFVFKNIDGYFKIYSKHTPINLVRDLPQGFSALEPLVDLPIGINITRFQTLLALHRSYLTPGDSSSGWTAGAAAYYVGYLQPRTFLLKYNENGTITDAVDCALDPLSETKCTLKSFTVEKGIYQTSNFRVQPTESIVRFPNITNLCPFGEVFNATRFASVYAWNRKRISNCVADYSVLYNSASFSTFKCYGVSPTKLNDLCFTNVYADSFVIRGDEVRQIAPGQTGKIADYNYKLPDDFTGCVIAWNSNNLDSKVGGNYNYLYRLFRKSNLKPFERDISTEIYQAGSTPCNGVEGFNCYFPLQSYGFQPTNGVGYQPYRVVVLSFELLHAPATVCGPKKSTNLVKNKCVNFNFNGLTGTGVLTESNKKFLPFQQFGRDIADTTDAVRDPQTLEILDITPCSFGGVSVITPGTNTSNQVAVLYQGVNCTEVPVAIHADQLTPTWRVYSTGSNVFQTRAGCLIGAEHVNNSYECDIPIGAGICASYQTQTNSPRRARSVASQSIIAYTMSLGAENSVAYSNNSIAIPTNFTISVTTEILPVSMTKTSVDCTMYICGDSTECSNLLLQYGSFCTQLNRALTGIAVEQDKNTQEVFAQVKQIYKTPPIKDFGGFNFSQILPDPSKPSKRSFIEDLLFNKVTLADAGFIKQYGDCLGDIAARDLICAQKFNGLTVLPPLLTDEMIAQYTSALLAGTITSGWWFGAGAALQIPFAMQMAYRFNGIGVTQNVLYENQKLIANQFNSAIGKIQDSLSSTASALGKLQDVVNQNAQALNTLVKQLSSNFGAISSVLNDILSRLDPPEAEVQIDRLITGRLQSLQTYVTQQLIRAAEIRWSANLAATKMSECVLGQSKRVDFCGKGYHLMSFPQSAPHGVVFLHVTYVPAQEKNFTTAPAICHDGKAHFPREGVFVSNGTHWFVTQRNFYEPQIITTDNTFVSGNCDVVIGVVNNTVYDPLQPELDSFKEELDKYFKNHTSPDVDLGDISGINASVVNIQKEIDRLNEVAKNLNESLIDLQELGKYEQYIKGGGGSDIIKLLNEQVNKEMQSSNLYMSMSSWCYTHSLDGAGLFLFDHAAEEYEHAKKLIIFLNENNVPVQLTSISAPEHKFEGLTQIFQKAYEHEQHISESINNIVDHAIKSKDHATFNFLQWYVAEQHEEEVLFKDILDKIELIGNENHGLYLADQYVKGIAKSRKS

SEQ ID NO: 4792 - protein, 1379 aa, Artificial Sequence
  SARS-CoV-2/Netherlands/ZuidHolland_9/2020__EPI_ISL_414445 spike protein (1-1211)(K986P_V987P_T887W_A1020W) Ferritin construct
MFVFLVLLPLVSSQCVNLTTRTQLPPAYTNSFTRGVYYPDKVFRSSVLHSTQDLFLPFFSNVTWFHAIHVSGTNGTKRFDNPVLPFNDGVYFASTEKSNIIRGWIFGTTLDSKTQSLLIVNNATNVVIKVCEFQFCNDPFLGVYYHKNNKSWMESEFRVYSSANNCTFEYVSQPFLMDLEGKQGNFKNLREFVFKNIDGYFKIYSKHTPINLVRDLPQGFSALEPLVDLPIGINITRFQTLLALHRSYLTPGDSSSGWTAGAAAYYVGYLQPRTFLLKYNENGTITDAVDCALDPLSETKCTLKSFTVEKGIYQTSNFRVQPTESIVRFPNITNLCPFGEVFNATRFASVYAWNRKRISNCVADYSVLYNSASFSTFKCYGVSPTKLNDLCFTNVYADSFVIRGDEVRQIAPGQTGKIADYNYKLPDDFTGCVIAWNSNNLDSKVGGNYNYLYRLFRKSNLKPFERDISTEIYQAGSTPCNGVEGFNCYFPLQSYGFQPTNGVGYQPYRVVVLSFELLHAPATVCGPKKSTNLVKNKCVNFNFNGLTGTGVLTESNKKFLPFQQFGRDIADTTDAVRDPQTLEILDITPCSFGGVSVITPGTNTSNQVAVLYQGVNCTEVPVAIHADQLTPTWRVYSTGSNVFQTRAGCLIGAEHVNNSYECDIPIGAGICASYQTQTNSPRRARSVASQSIIAYTMSLGAENSVAYSNNSIAIPTNFTISVTTEILPVSMTKTSVDCTMYICGDSTECSNLLLQYGSFCTQLNRALTGIAVEQDKNTQEVFAQVKQIYKTPPIKDFGGFNFSQILPDPSKPSKRSFIEDLLFNKVTLADAGFIKQYGDCLGDIAARDLICVQKFNGLTVLPPLLTDEMIAQYTSALLAGTITSGWWFGAGAALQIPFAMQMAYRFNGIGVTQNVLYENQKLIANQFNSAIGKIQDSLSSTASALGKLQDVVNQNAQALNTLVKQLSSNFGAISSVLNDILSRLDPPEAEVQIDRLITGRLQSLQTYVTQQLIRAAEIRWSANLAATKMSECVLGQSKRVDFCGKGYHLMSFPQSAPHGVVFLHVTYVPAQEKNFTTAPAICHDGKAHFPREGVFVSNGTHWFVTQRNFYEPQIITTDNTFVSGNCDVVIGIVNNTVYDPLQPELDSFKEELDKYFKNHTSPDVDLGDISGINASVVNIQKEIDRLNEVAKNLNESLIDLQELGKYEQYIKGGGGSDIIKLLNEQVNKEMQSSNLYMSMSSWCYTHSLDGAGLFLFDHAAEEYEHAKKLIIFLNENNVPVQLTSISAPEHKFEGLTQIFQKAYEHEQHISESINNIVDHAIKSKDHATFNFLQWYVAEQHEEEVLFKDILDKIELIGNENHGLYLADQYVKGIAKSRKS

SEQ ID NO: 4793 - protein, 1379 aa, Artificial Sequence
  SARS-CoV-2/Finland/FIN03032020A/2020__EPI_ISL_413602 spike protein (1-1211)(K986P_V987P_T887W_A1020W) Ferritin construct
MFVFLVLLPLVSSQCVNLTTRTQLPPAYTNSFTRGVYYPDKVFRSSVLHSTQDLFLPFFSNVTWFHAIHVSGTNGTKRFDNPVLPFNDGVYFASTEKSNIIRGWIFGTTLDSKTQSLLIVNNATNVVIKVCEFQFCNDPFLGVYYHKNNKSWMESEFRVYSSANNCTFEYVSQPFLMDLEGKQGNFKNLREFVFKNIDGYFKIYSKHTPINLVRDLPQGFSALEPLVDLPIGINITRFQTLLALHRSYLTPGDSSSGWTAGAAAYYVGYLQPRTFLLKYNENGTITDAVDCALDPLSETKCTLKSFTVEKGIYQTSNFRVQPTESIVRFPNITNLCPFGEVFNATRFASVYAWNRKRISNCVADYSVLYNSASFSTFKCYGVSPTKLNDLCFTNVYADSFVIRGDEVRQIAPGQTGKIADYNYKLPDDFTGCVISWNSNNLDSKVGGNYNYLYRLFRKSNLKPFERDISTEIYQAGSTPCNGVEGFNCYFPLQSYGFQPTNGVGYQPYRVVVLSFELLHAPATVCGPKKSTNLVKNKCVNFNFNGLTGTGVLTESNKKFLPFQQFGRDIADTTDAVRDPQTLEILDITPCSFGGVSVITPGTNTSNQVAVLYQGVNCTEVPVAIHADQLTPTWRVYSTGSNVFQTRAGCLIGAEHVNNSYECDIPIGAGICASYQTQTNSPRRARSVASQSIIAYTMSLGAENSVAYSNNSIAIPTNFTISVTTEILPVSMTKTSVDCTMYICGDSTECSNLLLQYGSFCTQLNRALTGIAVEQDKNTQEVFAQVKQIYKTPPIKDFGGFNFSQILPDPSKPSKRSFIEDLLFNKVTLADAGFIKQYGDCLGDIAARDLICAQKFNGLTVLPPLLTDEMIAQYTSALLAGTITSGWWFGAGAALQIPFAMQMAYRFNGIGVTQNVLYENQKLIANQFNSAIGKIQDSLSSTASALGKLQDVVNQNAQALNTLVKQLSSNFGAISSVLNDILSRLDPPEAEVQIDRLITGRLQSLQTYVTQQLIRAAEIRWSANLAATKMSECVLGQSKRVDFCGKGYHLMSFPQSAPHGVVFLHVTYVPAQEKNFTTAPAICHDGKAHFPREGVFVSNGTHWFVTQRNFYEPQIITTDNTFVSGNCDVVIGIVNNTVYDPLQPELDSFKEELDKYFKNHTSPDVDLGDISGINASVVNIQKEIDRLNEVAKNLNESLIDLQELGKYEQYIKGGGGSDIIKLLNEQVNKEMQSSNLYMSMSSWCYTHSLDGAGLFLFDHAAEEYEHAKKLIIFLNENNVPVQLTSISAPEHKFEGLTQIFQKAYEHEQHISESINNIVDHAIKSKDHATFNFLQWYVAEQHEEEVLFKDILDKIELIGNENHGLYLADQYVKGIAKSRKS

SEQ ID NO: 4794 - protein, 1379 aa, Artificial Sequence
  SARS-CoV-2/France/GE1977/2020__EPI_ISL_414632 spike protein (1-1211)(K986P_V987P_T887W_A1020W) Ferritin construct
MFVFLVLLPLVSSQCVNLTTRTQLPPAYTNSFTRGVYYPDKVFRSSVLHSTQDLFLPFFSNVTWFHAIHVSGTNGTKRFDNPVLPFNDGVYFASTEKSNIIRGWIFGTTLDSKTQSLLIVNNATNVVIKVCEFQFCNDPFLGVYYHKNNKSWMESEFRVYSSANNCTFEYVSQPFLMDLEGKQGNFKNLREFVFKNIDGYFKIYSKHTPINLVRDLPQGFSALEPLVDLPIGINITRFQTLLALHRSYLTPGDSSSGWTAGAAAYYVGYLQPRTFLLKYNENGTITDAVDCALDPLSETKCTLKSFTVEKGIYQTSNFRVQPTESIVRFPNITNLCPFGEVFNATRFASVYAWNRKRISNCVADYSVLYNSASFSTFKCYGVSPTKLNDLCFTNVYADSFVIRGDEVRQIAPGQTGKIADYNYKLPDDFTGCVIAWNSNNLDSKVGGNYNYLYRLFRKSNLKPFERDISTEIYQAGSTPCNGVEGFNCYFPLQSYGFQPTNGVGYQPYRVVVLSFELLHAPATVCGPKKSTNLVKNKCVNFNFNGLTGTGVLTESNKKFLPFQQFGRDIADTTDAVRDPQTLEILDITPCSFGGVSVITPGTNTSNQVAVLYQGVNCTEVPVAIHADQLTPTWRVYSTGSNVFQTRAGCLIGAEHVNNSYECDIPIGAGICASYQTQTNSPRRARSVASQSIIAYTMSLGAENSVAYSNNSIAIPTNFTISVTTEILPVSMTKTSVDCTMYICGDSTECSNLLLQYGSFCTQLNRALTGIAVEQDKNTQEVFAQVKQIYKTPPIKDFGGFNFSQILPDPSKPSKRSFIEDLLFNKVTLADAGFIKQYGDCLGDIAARDLICAQKFNGLTVLPPLLTDEMIAQYTSALLAGTITSGWWFGAGAALQIPFAMQMAYRFNGIGVTQNVLYENQKLIANQFNSAIGKIQDSLFSTASALGKLQDVVNQNAQALNTLVKQLSSNFGAISSVLNDILSRLDPPEAEVQIDRLITGRLQSLQTYVTQQLIRAAEIRWSANLAATKMSECVLGQSKRVDFCGKGYHLMSFPQSAPHGVVFLHVTYVPAQEKNFTTAPAICHDGKAHFPREGVFVSNGTHWFVTQRNFYEPQIITTDNTFVSGNCDVVIGIVNNTVYDPLQPELDSFKEELDKYFKNHTSPDVDLGDISGINASVVNIQKEIDRLNEVAKNLNESLIDLQELGKYEQYIKGGGGSDIIKLLNEQVNKEMQSSNLYMSMSSWCYTHSLDGAGLFLFDHAAEEYEHAKKLIIFLNENNVPVQLTSISAPEHKFEGLTQIFQKAYEHEQHISESINNIVDHAIKSKDHATFNFLQWYVAEQHEEEVLFKDILDKIELIGNENHGLYLADQYVKGIAKSRKS

SEQ ID NO: 4795 - protein, 1379 aa, Artificial Sequence
  SARS-CoV-2/Finland/FIN-313/2020__EPI_ISL_414641 spike protein (1-1211)(K986P_V987P_T887W_A1020W) Ferritin construct
MFVFLVLLPLVSSQCVNLTTRTQLPPAYTNSFTRGVYYPDKVFRSSVLHSTQDLFLPFFSNVTWFHAIHVSGTNGTKRFDNPVLPFNDGVYFASTEKSNIIRGWIFGTTLDSKTQSLLIVNNATNVVIKVCEFQFCNDPFLGVYYHKNNKSWMESEFRVYSSANNCTFEYVSQPFLMDLEGKQGNFKNLREFVFKNIDGYFKIYSKHTPINLVRDLPQGFSALEPLVDLPIGINITRFKTLLALHRSYLTPGDSSSGWTAGAAAYYVGYLQPRTFLLKYNENGTITDAVDCALDPLSETKCTLKSFTVEKGIYQTSNFRVQPTESIVRFPNITNLCPFGEVFNATRFASVYAWNRKRISNCVADYSVLYNSASFSTFKCYGVSPTKLNDLCFTNVYADSFVIRGDEVRQIAPGQTGKIADYNYKLPDDFTGCVIAWNSNNLDSKVGGNYNYLYRLFRKSNLKPFERDISTEIYQAGSTPCNGVEGFNCYFPLQSYGFQPTNGVGYQPYRVVVLSFELLHAPATVCGPKKSTNLVKNKCVNFNFNGLTGTGVLTESNKKFLPFQQFGRDIADTTDAVRDPQTLEILDITPCSFGGVSVITPGTNTSNQVAVLYQGVNCTEVPVAIHADQLTPTWRVYSTGSNVFQTRAGCLIGAEHVNNSYECDIPIGAGICASYQTQTNSPRRARSVASQSIIAYTMSLGAENSVAYSNNSIAIPTNFTISVTTEILPVSMTKTSVDCTMYICGDSTECSNLLLQYGSFCTQLNRALTGIAVEQDKNTQEVFAQVKQIYKTPPIKDFGGFNFSQILPDPSKPSKRSFIEDLLFNKVTLADAGFIKQYGDCLGDIAARDLICAQKFNGLTVLPPLLTDEMIAQYTSALLAGTITSGWWFGAGAALQIPFAMQMAYRFNGIGVTQNVLYENQKLIANQFNSAIGKIQDSLSSTASALGKLQDVVNQNAQALNTLVKQLSSNFGAISSVLNDILSRLDPPEAEVQIDRLITGRLQSLQTYVTQQLIRAAEIRWSANLAATKMSECVLGQSKRVDFCGKGYHLMSFPQSAPHGVVFLHVTYVPAQEKNFTTAPAICHDGKAHFPREGVFVSNGTHWFVTQRNFYEPQIITTDNTFVSGNCDVVIGIVNNTVYDPLQPELDSFKEELDKYFKNHTSPDVDLGDISGINASVVNIQKEIDRLNEVAKNLNESLIDLQELGKYEQYIKGGGGSDIIKLLNEQVNKEMQSSNLYMSMSSWCYTHSLDGAGLFLFDHAAEEYEHAKKLIIFLNENNVPVQLTSISAPEHKFEGLTQIFQKAYEHEQHISESINNIVDHAIKSKDHATFNFLQWYVAEQHEEEVLFKDILDKIELIGNENHGLYLADQYVKGIAKSRKS

SEQ ID NO: 4796 - protein, 1379 aa, Artificial Sequence
  SARS-CoV-2/Netherlands/ZuidHolland_2/2020__EPI_ISL_414556 spike protein (1-1211)(K986P_V987P_T887W_A1020W) Ferritin construct
MFVFLVLLPLVSSQCVNLTTRTQLPPAYTNSFTRGVYYPDKVFRSSVLHSTQDLFLPFFSNVTWFHAIHVSGTNGTKRFDNPVLPFNDGVYFASTEKSNIIRGWIFGTTLDSKTQSLLIVNNATNVVIKVCEFQFCNDPFLGVYYHKNNKSWMESEFRVYSSANNCTFEYVSQPFLMDLEGKQGNFKNLREFVFKNIDGYFKIYSKHTPINLVRDLPQGFSALEPLVDLPIGINITRFQTLLALHRSYLTPGDSSSGWTAGAAAYYVGYLQPRTFLLKYNENGTITDAVDCALDPLSETKCTLKSFTVEKGIYQTSNFRVQPTESIVRFPNITNLCPFGEVFNATRFASVYAWNRKRISNCVADYSVLYNSASFSTFKCYGVSPTKLNDLCFTNVYADSFVIRGDEVRQIAPGQTGKIADYNYKLPDDFTGCVIAWNSNNLDSKVGGNYNYLYRLFRKSNLKPFERDISTEIYQAGSTPCNGVEGFNCYFPLQSYGFQPTNGVGYQPYRVVVLSFELLHAPATVCGPKKSTNLVKNKCVNFNFNGLTGTGVLTESNKKFLPFQQFGRDIADTTDAVRDPQTLEILDITPCSFGGVSVITPGTNTSNQVAVLYQGVNCTEVPVAIHADQLTPTWRVYSTGSNVFQTRAGCLIGAEHVNNSYECDIPIGAGICASYQTQTNSPRRARSVASQSIIAYTMSLGAENSVAYSNNSIAIPTNFTISVTTEILPVSMTKTSVDCTMYICGDSTECSNLLLQYGSFCTQLNRALTGIALEQDKNTQEVFAQVKQIYKTPPIKDFGGFNFSQILPDPSKPSKRSFIEDLLFNKVTLADAGFIKQYGDCLGDIAARDLICAQKFNGLTVLPPLLTDEMIAQYTSALLAGTITSGWWFGAGAALQIPFAMQMAYRFNGIGVTQNVLYENQKLIANQFNSAIGKIQDSLSSTASALGKLQDVVNQNAQALNTLVKQLSSNFGAISSVLNDILSRLDPPEAEVQIDRLITGRLQSLQTYVTQQLIRAAEIRWSANLAATKMSECVLGQSKRVDFCGKGYHLMSFPQSAPHGVVFLHVTYVPAQEKNFTTAPAICHDGKAHFPREGVFVSNGTHWFVTQRNFYEPQIITTDNTFVSGNCDVVIGIVNNTVYDPLQPELDSFKEELDKYFKNHTSPDVDLGDISGINASVVNIQKEIDRLNEVAKNLNESLIDLQELGKYEQYIKGGGGSDIIKLLNEQVNKEMQSSNLYMSMSSWCYTHSLDGAGLFLFDHAAEEYEHAKKLIIFLNENNVPVQLTSISAPEHKFEGLTQIFQKAYEHEQHISESINNIVDHAIKSKDHATFNFLQWYVAEQHEEEVLFKDILDKIELIGNENHGLYLADQYVKGIAKSRKS

SEQ ID NO: 4797 - protein, 1379 aa, Artificial Sequence
  SARS-CoV-2/USA/WA-UW31/2020__EPI_ISL_414618 spike protein (1-1211)(K986P_V987P_T887W_A1020W) Ferritin construct
MFVFLVLLPLVSSQCVNLTTRTQLPPAYTNSFTRGVYYPDKVFRSSVLHSTQDLFLPFFSNVTWFHAIHVSGTNGTKRFDNPVLPFNDGVYFASTEKSNIIRGWIFGTTLDSKTQSLLIVNNATNVVIKVCEFQFCNDPFLGVYYHKNNKSWMESEFRVYSSANNCTFEYVSQPFLMDLEGKQGNFKNLREFVFKNIDGYFKIYSKHTPINLVRDLPQGFSALEPLVDLPIGINITRFQTLLALHRSYLTPGDSSSGWTAGAAAYYVGYLQPRTFLLKYNENGTITDAVDCALDPLSETKCTLKSFTVEKGIYQTSNFRVQPTESIVRFPNITNLCPFGEVFNATRFASVYAWNRKRISNCVADYSVLYNSASFSTFKCYGVSPTKLNDLCFTNVYADSFVIRGDEVRQIAPGQTGKIADYNYKLPDDFTGCVIAWNSNNLDSKVGGNYNYLYRLFRKSNLKPFERDISTEIYQAGSTPCNGAEGFNCYFPLQSYGFQPTNGVGYQPYRVVVLSFELLHAPATVCGPKKSTNLVKNKCVNFNFNGLTGTGVLTESNKKFLPFQQFGRDIADTTDAVRDPQTLEILDITPCSFGGVSVITPGTNTSNQVAVLYQDVNCTEVPVAIHADQLTPTWRVYSTGSNVFQTRAGCLIGAEHVNNSYECDIPIGAGICASYQTQTNSPRRARSVASQSIIAYTMSLGAENSVAYSNNSIAIPTNFTISVTTEILPVSMTKTSVDCTMYICGDSTECSNLLLQYGSFCTQLNRALTGIAVEQDKNTQEVFAQVKQIYKTPPIKDFGGFNFSQILPDPSKPSKRSFIEDLLFNKVTLADAGFIKQYGDCLGDIAARDLICAQKFNGLTVLPPLLTDEMIAQYTSALLAGTITSGWWFGAGAALQIPFAMQMAYRFNGIGVTQNVLYENQKLIANQFNSAIGKIQDSLSSTASALGKLQDVVNQNAQALNTLVKQLSSNFGAISSVLNDILSRLDPPEAEVQIDRLITGRLQSLQTYVTQQLIRAAEIRWSANLAATKMSECVLGQSKRVDFCGKGYHLMSFPQSAPHGVVFLHVTYVPAQEKNFTTAPAICHDGKAHFPREGVFVSNGTHWFVTQRNFYEPQIITTDNTFVSGNCDVVIGIVNNTVYDPLQPELDSFKEELDKYFKNHTSPDVDLGDISGINASVVNIQKEIDRLNEVAKNLNESLIDLQELGKYEQYIKGGGGSDIIKLLNEQVNKEMQSSNLYMSMSSWCYTHSLDGAGLFLFDHAAEEYEHAKKLIIFLNENNVPVQLTSISAPEHKFEGLTQIFQKAYEHEQHISESINNIVDHAIKSKDHATFNFLQWYVAEQHEEEVLFKDILDKIELIGNENHGLYLADQYVKGIAKSRKS

SEQ ID NO: 4798 - protein, 1379 aa, Artificial Sequence
  SARS-CoV-2/South Korea/SNU01/2020__EPI_ISL_411929 spike protein (1-1211)(K986P_V987P_T887W_A1020W) Ferritin construct
MFVFLVLLPLVSSQCVNLTTRTQLPPAYTNSFTRGVYYPDKVFRSSVLHSTQDLFLPFFSNVTWFHAIHVSGTNGTKRFDNPVLPFNDGVYFASTEKSNIIRGWIFGTTLDSKTQSLLIVNNATNVVIKVCEFQFCNDPFLGVYYHKNNKSWMESEFRVYSSANNCTFEYVSQPFLMDLEGKQGNFKNLREFVFKNIDGYFKIYSKHTPINLVRDLPQGFWALEPLVDLPIGINITRFQTLLALHRSYLTPGDSSSGWTAGAAAYYVGYLQPRTFLLKYNENGTITDAVDCALDPLSETKCTLKSFTVEKGIYQTSNFRVQPTESIVRFPNITNLCPFGEVFNATRFASVYAWNRKRISNCVADYSVLYNSASFSTFKCYGVSPTKLNDLCFTNVYADSFVIRGDEVRQIAPGQTGKIADYNYKLPDDFTGCVIAWNSNNLDSKVGGNYNYLYRLFRKSNLKPFERDISTEIYQAGSTPCNGVEGFNCYFPLQSYGFQPTNGVGYQPYRVVVLSFELLHAPATVCGPKKSTNLVKNKCVNFNFNGLTGTGVLTESNKKFLPFQQFGRDIADTTDAVRDPQTLEILDITPCSFGGVSVITPGTNTSNQVAVLYQDVNCTEVPVAIHADQLTPTWRVYSTGSNVFQTRAGCLIGAEHVNNSYECDIPIGAGICASYQTQTNSPRRARSVASQSIIAYTMSLGAENSVAYSNNSIAIPTNFTISVTTEILPVSMTKTSVDCTMYICGDSTECSNLLLQYGSFCTQLNRALTGIAVEQDKNTQEVFAQVKQIYKTPPIKDFGGFNFSQILPDPSKPSKRSFIEDLLFNKVTLADAGFIKQYGDCLGDIAARDLICAQKFNGLTVLPPLLTDEMIAQYTSALLAGTITSGWWFGAGAALQIPFAMQMAYRFNGIGVTQNVLYENQKLIANQFNSAIGKIQDSLSSTASALGKLQDVVNQNAQALNTLVKQLSSNFGAISSVLNDILSRLDPPEAEVQIDRLITGRLQSLQTYVTQQLIRAAEIRWSANLAATKMSECVLGQSKRVDFCGKGYHLMSFPQSAPHGVVFLHVTYVPAQEKNFTTAPAICHDGKAHFPREGVFVSNGTHWFVTQRNFYEPQIITTDNTFVSGNCDVVIGIVNNTVYDPLQPELDSFKEELDKYFKNHTSPDVDLGDISGINASVVNIQKEIDRLNEVAKNLNESLIDLQELGKYEQYIKGGGGSDIIKLLNEQVNKEMQSSNLYMSMSSWCYTHSLDGAGLFLFDHAAEEYEHAKKLIIFLNENNVPVQLTSISAPEHKFEGLTQIFQKAYEHEQHISESINNIVDHAIKSKDHATFNFLQWYVAEQHEEEVLFKDILDKIELIGNENHGLYLADQYVKGIAKSRKS

SEQ ID NO: 4799 - protein, 1379 aa, Artificial Sequence
  SARS-CoV-2/China/WF0004/2020__EPI_ISL_413694 spike protein (1-1211)(K986P_V987P_T887W_A1020W) Ferritin construct
MFVFLVLLPLVSSQCVNLTTRTQLPPAYTNSFTRGVYYPDKVFRSSVLHSTQDLFLPFFSNVTWFHAIHVSGTNGTKRFDNPVLPFNDGVYFASTEKSNIIRGWIFGTTLDSKTQSLLIVNNATNVVIKVCEFQFCNDPFLGVYYHKNNKSWTESEFRVYSSANNCTFEYVSQPFLMDLEGKQGNFKNLREFVFKNIDGYFKIYSKHTPINLVRDLPQGFSALEPLVDLPIGINITRFQTLLALHRSYLTPGDSSSGWTAGAAAYYVGYLQPRTFLLKYNENGTITDAVDCALDPLSETKCTLKSFTVEKGIYQTSNFRVQPTESIVRFPNITNLCPFGEVFNATRFASVYAWNRKRISNCVADYSVLYNSASFSTFKCYGVSPTKLNDLCFTNVYADSFVIRGDEVRQIAPGQTGKIADYNYKLPDDFTGCVIAWNSNNLDSKVGGNYNYLYRLFRKSNLKPFERDISTEIYQAGSTPCNGVEGFNCYFPLQSYGFQPTNGVGYQPYRVVVLSFELLHAPATVCGPKKSTNLVKNKCVNFNFNGLTGTGVLTESNKKFLPFQQFGRDIADTTDAVRDPQTLEILDITPCSFGGVSVITPGTNTSNQVAVLYQDVNCTEVPVAIHADQLTPTWRVYSTGSNVFQTRAGCLIGAEHVNNSYECDIPIGAGICASYQTQTNSPRRARSVASQSIIAYTMSLGAENSVAYSNNSIAIPTNFTISVTTEILPVSMTKTSVDCTMYICGDSTECSNLLLQYGSFCTQLNRALTGIAVEQDKNTQEVFAQVKQIYKTPPIKDFGGFNFSQILPDPSKPSKRSFIEDLLFNKVTLADAGFIKQYGDCLGDIAARDLICAQKFNGLTVLPPLLTDEMIAQYTSALLAGTITSGWWFGAGAALQIPFAMQMAYRFNGIGVTQNVLYENQKLIANQFNSAIGKIQDSLSSTASALGKLQDVVNQNAQALNTLVKQLSSNFGAISSVLNDILSRLDPPEAEVQIDRLITGRLQSLQTYVTQQLIRAAEIRWSANLAATKMSECVLGQSKRFDFCGKGYHLMSFPQSAPHGVVFLHVTYVPAQEKNFTTAPAICHDGKAHFPREGVFVSNGTHWFVTQRNFYEPQIITTDNTFVSGNCDVVIGIVNNTVYDPLQPELDSFKEELDKYFKNHTSPDVDLGDISGINASVVNIQKEIDRLNEVAKNLNESLIDLQELGKYEQYIKGGGGSDIIKLLNEQVNKEMQSSNLYMSMSSWCYTHSLDGAGLFLFDHAAEEYEHAKKLIIFLNENNVPVQLTSISAPEHKFEGLTQIFQKAYEHEQHISESINNIVDHAIKSKDHATFNFLQWYVAEQHEEEVLFKDILDKIELIGNENHGLYLADQYVKGIAKSRKS

SEQ ID NO: 4800 - protein, 1379 aa, Artificial Sequence
  SARS-CoV-2/China/WF0028/2020__EPI_ISL_413791 spike protein (1-1211)(K986P_V987P_T887W_A1020W) Ferritin construct
MFVFLVLLPLVSSQCVNLTTRTQLPPAYTNSFTRGVYYPDKVFRSSVLHSTQDLFLPFFSNVTWFHAIHVSGTNGTKRFDNPVLPFNDGVYFASTEKSNIIRGWIFGTTLDSKTQSLLIVNNATNVVIKVCEFQFCNDPFLGVYYHKNNKSWMESEFRVYSSANNCTFEYVSQPFLMDLEGKQGNFKNLREFVFKNIDGYFKIYSKHTPINLVRDLPQGFSALEPLVDLPIGINITRFQTLLALHRSYLTPGDSSSGWTAGAAAYYVGYLQPRTFLLKYNENGTITDAVDCALDPLSETKCTLKSFTVEKGIYQTSNFRVQPTESIVRFPNITNLCPFGEVFNATRFASVYAWNRKRISNCVADYSVLYNSASFSTFKCYGVSPTKLNDLCFTNVYADSFVIRGDEVRQIAPGQTGKIADYNYKLPDDFTGCVIAWNSNNLDSKVGGNYNYLYRLFRKSNLKPFERDISTEIYQAGSTPCNGVEGFNCYFPLQSYGFQPTNGVGYQPYRVVVLSFELLHAPATVCGPKKSTNLVKNKCVNFNFNGLTGTGVLTESNKKFLPFQQFGRDIADTTDAVRDPQTLEILDITPCSFGGVSVITPGTNTSNQVAVLYQDVNCTEVPVAIHADQLTPTWRVYSTGSNVFQTRAGCLIGAEHVNNSYECDIPIGAGICASYQTQTNSPRRARSVASQSIIAYTMSLGAENSVAYSNNSIAIPTNFTISVTTEILPVSMTKTSVDCTMYICGDSTECSNLLLQYGSFCTQLNRALTGIAVEQDKNTQEVFAQVKQIYKTPPIKDFGGFNFSQILPDPSKPSKRSFIEDLLFNKVTLADAGFIKQYGDCLGDIAARDLICAQKFNGLTVLPPLLTDEMIAQYTSALLAGTITSGWWFGAGAALQIPFAMQMAYRFNGIGVTQNVLYENQKLIANQFNSAIGKIQDSLSSTASALGKLQDVVNQNAQALNTLVKQLSSNFGAISSVLNDILSRLDPPEAEVQIDRLITGRLQSLQTYVTQQLIRAAEIRWSANLAATKMSECVLGQSKRVDFCGKGYHLMSFPQSAPHGVVFLHVTYVPAQEKNFTTAPAICHDGKAHFPREGVFVSNGTHWFVTQRNFYEPQIITTDNTFVSGNCDVVIGIVNNTVYDPLQPELESFKEELDKYFKNHTSPDVDLGDISGINASVVNIQKEIDRLNEVAKNLNESLIDLQELGKYEQYIKGGGGSDIIKLLNEQVNKEMQSSNLYMSMSSWCYTHSLDGAGLFLFDHAAEEYEHAKKLIIFLNENNVPVQLTSISAPEHKFEGLTQIFQKAYEHEQHISESINNIVDHAIKSKDHATFNFLQWYVAEQHEEEVLFKDILDKIELIGNENHGLYLADQYVKGIAKSRKS

SEQ ID NO: 4801 - protein, 1379 aa, Artificial Sequence
  SARS-CoV-2/2019-nCoV/USA-CruiseA-18/2020__MT159716.1 spike protein (1-1211)(K986P_V987P_T887W_A1020W) Ferritin construct
MFVFLVLLPLVSSQCVNLTTRTQLPPAYTNSFTRGVYYPDKVFRSSVLHSTQDLFLPFFSNVTWFHAIHVSGTNGTKRFDNPVLPFNDGVYFASTEKSNIIRGWIFGTTLDSKTQSLLIVNNATNVVIKVCEFQFCNDPFLGVYYHKNNKSWMESELRVYSSANNCTFEYVSQPFLMDLEGKQGNFKNLREFVFKNIDGYFKIYSKHTPINLVRDLPQGFSALEPLVDLPIGINITRFQTLLALHRSYLTPGDSSSGWTAGAAAYYVGYLQPRTFLLKYNENGTITDAVDCALDPLSETKCTLKSFTVEKGIYQTSNFRVQPTESIVRFPNITNLCPFGEVFNATRFASVYAWNRKRISNCVADYSVLYNSASFSTFKCYGVSPTKLNDLCFTNVYADSFVIRGDEVRQIAPGQTGKIADYNYKLPDDFTGCVIAWNSNNLDSKVGGNYNYLYRLFRKSNLKPFERDISTEIYQAGSTPCNGVEGFNCYFPLQSYGFQPTNGVGYQPYRVVVLSFELLHAPATVCGPKKSTNLVKNKCVNFNFNGLTGTGVLTESNKKFLPFQQFGRDIADTTDAVRDPQTLEILDITPCSFGGVSVITPGTNTSNQVAVLYQDVNCTEVPVAIHADQLTPTWRVYSTGSNVFQTRAGCLIGAEHVNNSYECDIPIGAGICASYQTQTNSPRRARSVASQSIIAYTMSLGAENSVAYSNNSIAIPTNFTISVTTEILPVSMTKTSVDCTMYICGDSTECSNLLLQYGSFCTQLNRALTGIAVEQDKNTQEVFAQVKQIYKTPPIKDFGGFNFSQILPDPSKPSKRSFIEDLLFNKVTLADAGFIKQYGDCLGDIAARDLICAQKFNGLTVLPPLLTDEMIAQYTSALLAGTITSGWWFGAGAALQIPFAMQMAYRFNGIGVTQNVLYENQKLIANQFNSAIGKIQDSLSSTASALGKLQDVVNQNAQALNTLVKQLSSNFGAISSVLNDILSRLDPPEAEVQIDRLITGRLQSLQTYVTQQLIRAAEIRWSANLAATKMSECVLGQSKRVDFCGKGYHLMSFPQSAPHGVVFLHVTYVPAQEKNFTTAPAICHDGKAHFPREGVFVSNGTHWFVTQRNFYEPQIITTDNTFVSGNCDVVIGIVNNTVYDPLQPELDSFKEELDKYFKNHTSPDVDLGDISGINASVVNIQKEIDRLNEVAKNLNESLIDLQELGKYEQYIKGGGGSDIIKLLNEQVNKEMQSSNLYMSMSSWCYTHSLDGAGLFLFDHAAEEYEHAKKLIIFLNENNVPVQLTSISAPEHKFEGLTQIFQKAYEHEQHISESINNIVDHAIKSKDHATFNFLQWYVAEQHEEEVLFKDILDKIELIGNENHGLYLADQYVKGIAKSRKS

SEQ ID NO: 4802 - protein, 1379 aa, Artificial Sequence
  SARS-CoV-2/SARS-CoV-2/Yunnan-01/human/2020/CHN__MT049951.1 spike protein (1-1211)(K986P_V987P_T887W_A1020W) Ferritin construct
MFVFLVLLPLVSSQCVNLTTRTQLPPANTNSFTRGVYYPDKVFRSSVLHSTQDLFLPFFSNVTWFHAIHVSGTNGTKRFDNPVLPFNDGVYFASTEKSNIIRGWIFGTTLDSKTQSLLIVNNATNVVIKVCEFQFCNDPFLGVYYHKNNKSWMESEFRVYSSANNCTFEYVSQPFLMDLEGKQGNFKNLREFVFKNIDGYFKIYSKHTPINLVRDLPQGFSALEPLVDLPIGINITRFQTLLALHRSYLTPGDSSSGWTAGAAAYYVGYLQPRTFLLKYNENGTITDAVDCALDPLSETKCTLKSFTVEKGIYQTSNFRVQPTESIVRFPNITNLCPFGEVFNATRFASVYAWNRKRISNCVADYSVLYNSASFSTFKCYGVSPTKLNDLCFTNVYADSFVIRGDEVRQIAPGQTGKIADYNYKLPDDFTGCVIAWNSNNLDSKVGGNYNYLYRLFRKSNLKPFERDISTEIYQAGSTPCNGVEGFNCYFPLQSYGFQPTNGVGYQPYRVVVLSFELLHAPATVCGPKKSTNLVKNKCVNFNFNGLTGTGVLTESNKKFLPFQQFGRDIADTTDAVRDPQTLEILDITPCSFGGVSVITPGTNTSNQVAVLYQDVNCTEVPVAIHADQLTPTWRVYSTGSNVFQTRAGCLIGAEHVNNSYECDIPIGAGICASYQTQTNSPRRARSVASQSIIAYTMSLGAENSVAYSNNSIAIPTNFTISVTTEILPVSMTKTSVDCTMYICGDSTECSNLLLQYGSFCTQLNRALTGIAVEQDKNTQEVFAQVKQIYKTPPIKDFGGFNFSQILPDPSKPSKRSFIEDLLFNKVTLADAGFIKQYGDCLGDIAARDLICAQKFNGLTVLPPLLTDEMIAQYTSALLAGTITSGWWFGAGAALQIPFAMQMAYRFNGIGVTQNVLYENQKLIANQFNSAIGKIQDSLSSTASALGKLQDVVNQNAQALNTLVKQLSSNFGAISSVLNDILSRLDPPEAEVQIDRLITGRLQSLQTYVTQQLIRAAEIRWSANLAATKMSECVLGQSKRVDFCGKGYHLMSFPQSAPHGVVFLHVTYVPAQEKNFTTAPAICHDGKAHFPREGVFVSNGTHWFVTQRNFYEPQIITTDNTFVSGNCDVVIGIVNNTVYDPLQPELDSFKEELDKYFKNHTSPDVDLGDISGINASVVNIQKEIDRLNEVAKNLNESLIDLQELGKYEQYIKGGGGSDIIKLLNEQVNKEMQSSNLYMSMSSWCYTHSLDGAGLFLFDHAAEEYEHAKKLIIFLNENNVPVQLTSISAPEHKFEGLTQIFQKAYEHEQHISESINNIVDHAIKSKDHATFNFLQWYVAEQHEEEVLFKDILDKIELIGNENHGLYLADQYVKGIAKSRKS

SEQ ID NO: 4803 - protein, 1379 aa, Artificial Sequence
  SARS-CoV-2/USA/WA-UW292/2020__EPI_ISL_418077 spike protein (1-1211)(K986P_V987P_T887W_A1020W) Ferritin construct
MFVFLVLLPLVSSQCVNLTTRTQLPPAYTNSFTRGVYYPDKVFRSSVLHSTQDLFLPFFSNVTWFHAIHVSGTNGTKRFDNPVLPFNDGVYFASTEKSNIIRGWIFGTTLDSKTQSLLIVNNATNVVIKVCEFQFCNDPFLGVYYHKNNKSWMESEFRVYSSANNCTFEYVSQPFLMDLEGKQGNFKNLREFVFKNIDGYFKIYSKHTPINLVRDLPQGFSALEPLVDLPIGINITRFQTLLALHRSYLTPGDSSSGWTAGAAAYYVGYLQPRTFLLKYNENGTITDAVDCALDPLSETKCTLKSFTVEKGIYQTSNFRVQPTESIVRFPNITNLCPFGEVFNATRFASVYAWNRKRISNCVADYSVLYNSASFSTFKCYGVSPTKLNDLCFTNVYADSFVIRGDEVRQIAPGQTGKIADYNYKLPDDFTGCVIAWNSNNLDSKVGGNYNYLYRLFRKSNLKPFERDISTEIYQASSTPCNGVEGFNCYFPLQSYGFQPTNGVGYQPYRVVVLSFELLHAPATVCGPKKSTNLVKNKCVNFNFNGLTGTGVLTESNKKFLPFQQFGRDIADTTDAVRDPQTLEILDITPCSFGGVSVITPGTNTSNQVAVLYQDVNCTEVPVAIHADQLTPTWRVYSTGSNVFQTRAGCLIGAEHVNNSYECDIPIGAGICASYQTQTNSPRRARSVASQSIIAYTMSLGAENSVAYSNNSIAIPTNFTISVTTEILPVSMTKTSVDCTMYICGDSTECSNLLLQYGSFCTQLNRALTGIAVEQDKNTQEVFAQVKQIYKTPPIKDFGGFNFSQILPDPSKPSKRSFIEDLLFNKVTLADAGFIKQYGDCLGDIAARDLICAQKFNGLTVLPPLLTDEMIAQYTSALLAGTITSGWWFGAGAALQIPFAMQMAYRFNGIGVTQNVLYENQKLIANQFNSAIGKIQDSLSSTASALGKLQDVVNQNAQALNTLVKQLSSNFGAISSVLNDILSRLDPPEAEVQIDRLITGRLQSLQTYVTQQLIRAAEIRWSANLAATKMSECVLGQSKRVDFCGKGYHLMSFPQSAPHGVVFLHVTYVPAQEKNFTTAPAICHDGKAHFPREGVFVSNGTHWFVTQRNFYEPQIITTDNTFVSGNCDVVIGIVNNTVYDPLQPELDSFKEELDKYFKNHTSPDVDLGDISGINASVVNIQKEIDRLNEVAKNLNESLIDLQELGKYEQYIKGGGGSDIIKLLNEQVNKEMQSSNLYMSMSSWCYTHSLDGAGLFLFDHAAEEYEHAKKLIIFLNENNVPVQLTSISAPEHKFEGLTQIFQKAYEHEQHISESINNIVDHAIKSKDHATFNFLQWYVAEQHEEEVLFKDILDKIELIGNENHGLYLADQYVKGIAKSRKS

SEQ ID NO: 4804 - protein, 1379 aa, Artificial Sequence
  SARS-CoV-2/Iceland/192/2020__EPI_ISL_417819 spike protein (1-1211)(K986P_V987P_T887W_A1020W) Ferritin construct
MFVFFVLLPLVSSQCVNLTTRTQLPPAYTNSFTRGVYYPDKVFRSSVLHSTQDLFLPFFSNVTWFHAIHVSGTNGTKRFDNPVLPFNDGVYFASTEKSNIIRGWIFGTTLDSKTQSLLIVNNATNVVIKVCEFQFCNDPFLGVYYHKNNKSWMESEFRVYSSANNCTFEYVSQPFLMDLEGKQGNFKNLREFVFKNIDGYFKIYSKHTPINLVRDLPQGFSALEPLVDLPIGINITRFQTLLALHRSYLTPGDSSSGWTAGAAAYYVGYLQPRTFLLKYNENGTITDAVDCALDPLSETKCTLKSFTVEKGIYQTSNFRVQPTESIVRFPNITNLCPFGEVFNATRFASVYAWNRKRISNCVADYSVLYNSASFSTFKCYGVSPTKLNDLCFTNVYADSFVIRGDEVRQIAPGQTGKIADYNYKLPDDFTGCVIAWNSNNLDSKVGGNYNYLYRLFRKSNLKPFERDISTEIYQAGSTPCNGVEGFNCYFPLQSYGFQPTNGVGYQPYRVVVLSFELLHAPATVCGPKKSTNLVKNKCVNFNFNGLTGTGVLTESNKKFLPFQQFGRDIADTTDAVRDPQTLEILDITPCSFGGVSVITPGTNTSNQVAVLYQGVNCTEVPVAIHADQLTPTWRVYSTGSNVFQTRAGCLIGAEHVNNSYECDIPIGAGICASYQTQTNSPRRARSVASQSIIAYTMSLGAENSVAYSNNSIAIPTNFTISVTTEILPVSMTKTSVDCTMYICGDSTECSNLLLQYGSFCTQLNRALTGIAVEQDKNTQEVFAQVKQIYKTPPIKDFGGFNFSQILPDPSKPSKRSFIEDLLFNKVTLADAGFIKQYGDCLGDIAARDLICAQKFNGLTVLPPLLTDEMIAQYTSALLAGTITSGWWFGAGAALQIPFAMQMAYRFNGIGVTQNVLYENQKLIANQFNSAIGKIQDSLSSTASALGKLQDVVNQNAQALNTLVKQLSSNFGAISSVLNDILSRLDPPEAEVQIDRLITGRLQSLQTYVTQQLIRAAEIRWSANLAATKMSECVLGQSKRVDFCGKGYHLMSFPQSAPHGVVFLHVTYVPAQEKNFTTAPAICHDGKAHFPREGVFVSNGTHWFVTQRNFYEPQIITTDNTFVSGNCDVVIGIVNNTVYDPLQPELDSFKEELDKYFKNHTSPDVDLGDISGINASVVNIQKEIDRLNEVAKNLNESLIDLQELGKYEQYIKGGGGSDIIKLLNEQVNKEMQSSNLYMSMSSWCYTHSLDGAGLFLFDHAAEEYEHAKKLIIFLNENNVPVQLTSISAPEHKFEGLTQIFQKAYEHEQHISESINNIVDHAIKSKDHATFNFLQWYVAEQHEEEVLFKDILDKIELIGNENHGLYLADQYVKGIAKSRKS

SEQ ID NO: 4805 - protein, 1379 aa, Artificial Sequence
  SARS-CoV-2/Belgium/ULG-6939/2020__EPI_ISL_417020 spike protein (1-1211)(K986P_V987P_T887W_A1020W) Ferritin construct
MFVFLVLLPLVSSQCVNLTTRTQLPPAYTNSFTRGVYYPDKVFRSSVLHSTQDLFLPFFSNVTWFHAIHVSGTNGTKRFDNPVLPFNDGVYFASTEKSNIIRGWIFGTTLDSKTQSLLIVNNATNVVIKVCEFQFCNDPFLGVYYHKNNKSWMESEFRVYSSANNCTFEYVSQPFLMDLEGKQGNFKNLREFVFKNIDGYFKIYSKHTPINLVRDLPQGFSALEPLVDLPIGINITRFQTLLALHRSYLTPGDSSSGWTAGAAAYYVGYLQPRTFLLKYNENGTITDAVDCALDPLSETKCTLKSFTVEKGIYQTSNFRVQPTESIVRFPNITNLCPFGEVFNATRFASVYAWNRKRISNCVADYSVLYNSASFSTFKCYGVSPTKLNDLCFTNVYADSFVIRGDEVRQIAPGQTGKIADYNYKLPDDFTGCVIAWNSNNLDSKVGGNYNYLYRLFRKSNLKPFERDISTEIYQAGSTPCNGVEGFNCYFPLQSYGFQPTNGVGYQPYRVVVLSFELLHAPATVCGPKKSTNLVKNKCVNFNFNGLTGTGVLTESNKKFLPFQQFGRDIADTTDAVRDPQTLEILDITPCSFGGVSVITPGTNTSNQVAVLYQGVNCTEVPVAIHADQLTPTWRVYSTGSNVFQTRAGCLIGAEHVNNSYECDIPIGAGICASYQTQTNSPRRARSVASQSIIAYTMSLGAENSVVYSNNSIAIPTNFTISVTTEILPVSMTKTSVDCTMYICGDSTECSNLLLQYGSFCTQLNRALTGIAVEQDKNTQEVFAQVKQIYKTPPIKDFGGFNFSQILPDPSKPSKRSFIEDLLFNKVTLADAGFIKQYGDCLGDIAARDLICAQKFNGLTVLPPLLTDEMIAQYTSALLAGTITSGWWFGAGAALQIPFAMQMAYRFNGIGVTQNVLYENQKLIANQFNSAIGKIQDSLSSTASALGKLQDVVNQNAQALNTLVKQLSSNFGAISSVLNDILSRLDPPEAEVQIDRLITGRLQSLQTYVTQQLIRAAEIRWSANLAATKMSECVLGQSKRVDFCGKGYHLMSFPQSAPHGVVFLHVTYVPAQEKNFTTAPAICHDGKAHFPREGVFVSNGTHWFVTQRNFYEPQIITTDNTFVSGNCDVVIGIVNNTVYDPLQPELDSFKEELDKYFKNHTSPDVDLGDISGINASVVNIQKEIDRLNEVAKNLNESLIDLQELGKYEQYIKGGGGSDIIKLLNEQVNKEMQSSNLYMSMSSWCYTHSLDGAGLFLFDHAAEEYEHAKKLIIFLNENNVPVQLTSISAPEHKFEGLTQIFQKAYEHEQHISESINNIVDHAIKSKDHATFNFLQWYVAEQHEEEVLFKDILDKIELIGNENHGLYLADQYVKGIAKSRKS

SEQ ID NO: 4806 - protein, 1379 aa, Artificial Sequence
  SARS-CoV-2/France/HF2496/2020__EPI_ISL_418231 spike protein (1-1211)(K986P_V987P_T887W_A1020W) Ferritin construct
MFVFLVLLPLVSSQCVNLTTRTQLPPAYTNSFTRGVYYPDKVFRSSVLHSTQDLFLPFFSNVTWFHAIHVSGTNGTKRFDNPVLPFNDGVYFASTEKSNIIRGWIFGTTLDSKTQSLLIVNNATNVVIKVCEFQFCNDPFLGVYYHKNNKSWMESEFRVYSSANNCTFEYVSQPFLMDLEGKQGNFKNLREFVFKNIDGYFKIYSKHTPINLVRDLPQGFSALEPLVDLPIGINITRFQTLLALHRSYLTPGDSSSGWTAGAAAYYVGYLQPRTFLLKYNENGTITDAVDCALDPLSETKCTLKSFTVEKGIYQTSNFRVQPTESIVRFPNITNLCPFGEVFNATRFASVYAWNRKRISNCVADYSVLYNSASFSTFKCYGVSPTKLNDLCFTNVYADSFVIRGDEVRQIAPGQTGKIADYNYKLPDDFTGCVIAWNSNNLDSKVGGNYNYLYRLFRKSNLKPFERDISTEIYQAGSTPCNGVEGFNCYFPLQSYGFQPTNGVGYQPYRVVVLSFELLHAPATVCGPKKSTNLVKNKCVNFNFNGLTGTGVLTESNKKFLPFQQFGRDIADTTDAVRDPQTLEILDITPCSFGGVSVITPGTNTSNQVAVLYQGVNCTEVPVAIHADQLTPTWRVYSTGSNVFQTRAGCLIGAEHVNNSYECDIPIGAGICASYQTQTNSPRRARSVASQSIIAYTMSLGAENSVAYSNNSIAIPTNFTISVTTEILPVSMTKTSVDCTMYICGDSTECSNLLLQYGSFCTQLNRALTGIAVEQDKNTQEVFAQVKQIYKTPPIKDFGGFNFSQILPDPSKPSKRSFIEDLLFNKVTLADAGFIKQYGDCLGDIVARDLICAQKFNGLTVLPPLLTDEMIAQYTSALLAGTITSGWWFGAGAALQIPFAMQMAYRFNGIGVTQNVLYENQKLIANQFNSAIGKIQDSLSSTASALGKLQDVVNQNAQALNTLVKQLSSNFGAISSVLNDILSRLDPPEAEVQIDRLITGRLQSLQTYVTQQLIRAAEIRWSANLAATKMSECVLGQSKRVDFCGKGYHLMSFPQSAPHGVVFLHVTYVPAQEKNFTTAPAICHDGKAHFPREGVFVSNGTHWFVTQRNFYEPQIITTDNTFVSGNCDVVIGIVNNTVYDPLQPELDSFKEELDKYFKNHTSPDVDLGDISGINASVVNIQKEIDRLNEVAKNLNESLIDLQELGKYEQYIKGGGGSDIIKLLNEQVNKEMQSSNLYMSMSSWCYTHSLDGAGLFLFDHAAEEYEHAKKLIIFLNENNVPVQLTSISAPEHKFEGLTQIFQKAYEHEQHISESINNIVDHAIKSKDHATFNFLQWYVAEQHEEEVLFKDILDKIELIGNENHGLYLADQYVKGIAKSRKS

SEQ ID NO: 4807 - protein, 1379 aa, Artificial Sequence
  SARS-CoV-2/USA/WA-UW291/2020__EPI_ISL_418076 spike protein (1-1211)(K986P_V987P_T887W_A1020W) Ferritin construct
MFVFLVLLPLVSSQCVNLTTRTQLPPAYTNSFTRGVYYPDKVFRSSVLHSTQDLFLPFFSNVTWFHAIHVSGTNGTKRFDNPVLPFNDGVYFASTEKSNIIRGWIFGTTLDSKTQSLLIVNNATNVVIKVCEFQFCNDPFLGVYYHKNNKSWMESEFRVYSSANNCTFEYVSQPFLMDLEGKQGNFKNLREFVFKNIDGYFKIYSKHTPINLVRDLPQGFSALEPLVDLPIGINITRFQTLLALHRSYLTPGDSSSGWTAGAAAYYVGYLQPRTFLLKYNENGTITDAVDCALDPLSETKCTLKSFTVEKGIYQTSNFRVQPTESIVRFPNITNLCPFGEVFNATRFASVYAWNRKRISNCVADYSVLYNSASFSTFKCYGVSPTKLNDLCFTNVYADSFVIRGDEVRQIAPGQTGKIADYNYKLPDDFTGCVIAWNSNNLDSKVGGNYNYLYRLFRKSNLKPFERDISTEIYQAGSTPCNGVEGFNCYFPLQSYGFQPTNGVGYQPYRVVVLSFELLHAPATVCGPKKSTNLVKNKCVNFNFNGLTGTGVLTESNKKFLPFQQFGRDIADTTDAVRDPQTLEILDITPCSFGGVSVITPGTNTSNQVAVLYQGVNCTEVPVAIHADQLTPTWRVYSTGSNVFQTRAGCLIGAEHVNNSYECDIPIGAGICASYQTQTNSPRRARSVASQSIIAYTMSLGAENSVAYSNNSIAIPTNFTISVTTEILPVSMTKTSVDCTMYICGDSTECSNLLLQYGSFCTQLNRALTGIAVEQDKNTQEVFAQVKQIYKTPPIKDFGGFNFSQILPDPSKPSKRSFIEDLLFNKVTLADAGFIKQYGDCLGDIAARDLICAQKFNGLTVLPPLLTDEMIAQYTSALLAGTITSGWWFGAGAALQIPFAMQMAYRFNGIGVTQNVLYENQKLIANQFNSAIGKIQYSLSSTASALGKLQDVVNQNAQALNTLVKQLSSNFGAISSVLNDILSRLDPPEAEVQIDRLITGRLQSLQTYVTQQLIRAAEIRWSANLAATKMSECVLGQSKRVDFCGKGYHLMSFPQSAPHGVVFLHVTYVPAQEKNFTTAPAICHDGKAHFPREGVFVSNGTHWFVTQRNFYEPQIITTDNTFVSGNCDVVIGIVNNTVYDPLQPELDSFKEELDKYFKNHTSPDVDLGDISGINASVVNIQKEIDRLNEVAKNLNESLIDLQELGKYEQYIKGGGGSDIIKLLNEQVNKEMQSSNLYMSMSSWCYTHSLDGAGLFLFDHAAEEYEHAKKLIIFLNENNVPVQLTSISAPEHKFEGLTQIFQKAYEHEQHISESINNIVDHAIKSKDHATFNFLQWYVAEQHEEEVLFKDILDKIELIGNENHGLYLADQYVKGIAKSRKS

SEQ ID NO: 4808 - protein, 1379 aa, Artificial Sequence; identical to SEQ ID NO: 4771
  SARS-CoV-2/Portugal/PT0034/2020__EPI_ISL_418019 spike protein (1-1211)(K986P_V987P_T887W_A1020W) Ferritin construct

SEQ ID NO: 4809 - protein, 1379 aa, Artificial Sequence
  SARS-CoV-2/Iceland/202/2020__EPI_ISL_417750 spike protein (1-1211)(K986P_V987P_T887W_A1020W) Ferritin construct
MFVFLVLLPLVSSQCVNLTTRTQLPPAYTNSFTRGVYYPDKVFRSSVLHSTQDLFLPFFSNVTWFHAIHVSGTNGTKRFDNPVLPFNDGVYFASTEKSNIIRGWIFGTTLDSKTQSLLIVNNATNVVIKVCEFQFCNDPFLGVYYHKNNKSWMESEFRVYSSANNCTFEYVSQPFLMDLEGKQGNFKNLREFVFKNIDGYFKIYSKHTPINLVRDLPQGFSALEPLVDLPIGINITRFQTLLALHRSYLTPGDSSSGWTAGAAAYYVGYLQPRTFLLKYNENGTITDAVDCALDPLSETKCTLKSFTVEKGIYQTSNFRVQPTESIVRFPNITNLCPFGEVFNATRFASVYAWNRKRISNCVADYSVLYNSASFSTFKCYGVSPTKLNDLCFTNVYADSFVIRGDEVRQIAPGQTGKIADYNYKLPDDFTGCVIAWNSNNLDSKVGGNYNYLYRLFRKSNLKPFERDISTEIYQAGSTPCNGVEGFNCYFPLQSYGFQPTNGVGYQPYRVVVLSFELLHAPATVCGPKKSTNLVKNKCVNFNFNGLTGTGVLTESNKKFLPFQQFGRDIADTTDAVRDPQTLEILDITPCSFGGVSVITPGTNTSNQVAVLYQDVNCTEVPVAIHADQLTPTWRVYSTGSNVFQTRAGCLIGAEHVNNSYECDIPIGAGICASYQTQTNSPRRARSVASQSIIAYTMSLGAENSVAYSNNSIAIPTNFTISVTTEILPVSMTKTSVDCTMYICGDSTECSNLLLQYGSFCTQLNRALTGIAVEQDKNTQEVFAQVKQIYKTPPIKDFGGFNFSQILPDPSKPSKRSFIEDLLFNKVTLADAGFIKQYGDCLGDIAARDLICAQKFNGLTVLPPLLTDEMIAQYTSALLAGTITSGWWFGAGAALQIPFAMQMAYRFNGIGVTQNVLYENQKLIANQFNSAIGKIQDSLSSTASALGKLQDVVNQNAQALNTLVKQLSSNFGAISSVLNDILSRLDPPEAEVQIDRLITGRLQSLQTYVTQQLIRAAEIRWSANLAATKMSECVLGQSKRVDFCGKGYHLMSFPQSAPHGVVFLHVTYVPAQEKNFTTAPAICHDGKAHFPREGVFVSNGTHWFVTQRNFYEPQIITTDNTFVSGNCDVVIGIVNNTVYDPLQPELDSFKEELDKYFKNHTSPDVDLGDIPGINASVVNIQKEIDRLNEVAKNLNESLIDLQELGKYEQYIKGGGGSDIIKLLNEQVNKEMQSSNLYMSMSSWCYTHSLDGAGLFLFDHAAEEYEHAKKLIIFLNENNVPVQLTSISAPEHKFEGLTQIFQKAYEHEQHISESINNIVDHAIKSKDHATFNFLQWYVAEQHEEEVLFKDILDKIELIGNENHGLYLADQYVKGIAKSRKS

SEQ ID NO: 4810 - protein, 1379 aa, Artificial Sequence
  SARS-CoV-2/USA/WA-UW261/2020__EPI_ISL_418046 spike protein (1-1211)(K986P_V987P_T887W_A1020W) Ferritin construct
MFVFLVLLPLVSSQCVNLTTRTQLPPAYTNSFTRGVYYPDKVFRSSVLHSTQDLFLPFFSNVTWFHAIHVSGTNGTKRFDNPVLPFNDGVYFASTEKSNIIRGWIFGTTLDSKTQSLLIVNNATNVVIKVCEFQFCNDPFLGVYYHKNNKSWMESEFRVYSSANNCTFEYVSQPFLMDLEGKQGNFKNLREFVFKNIDGYFKIYSKHTPINLVRDLPQGFSALEPLVDLPIGINITRFQTLLALHRSYLTPGDSSSGWTAGAAAYYVGYLQPRTFLLKYNENGTITDAVDCALDPLSETKCTLKSFTVEKGIYQTSNFRVQPTESIVRFPNITNLCPFGEVFNATRFTSVYAWNRKRISNCVADYSVLYNSASFSTFKCYGVSPTKLNDLCFTNVYADSFVIRGDEVRQIAPGQTGKIADYNYKLPDDFTGCVIAWNSNNLDSKVGGNYNYLYRLFRKSNLKPFERDISTEIYQAGSTPCNGVEGFNCYFPLQSYGFQPTNGVGYQPYRVVVLSFELLHAPATVCGPKKSTNLVKNKCVNFNFNGLTGTGVLTESNKKFLPFQQFGRDIADTTDAVRDPQTLEILDITPCSFGGVSVITPGTNTSNQVAVLYQDVNCTEVPVAIHADQLTPTWRVYSTGSNVFQTRAGCLIGAEHVNNSYECDIPIGAGICASYQTQTNSPRRARSVASQSIIAYTMSLGAENSVAYSNNSIAIPTNFTISVTTEILPVSMTKTSVDCTMYICGDSTECSNLLLQYGSFCTQLNRALTGIAVEQDKNTQEVFAQVKQIYKTPPIKDFGGFNFSQILPDPSKPSKRSFIEDLLFNKVTLADAGFIKQYGDCLGDIAARDLICAQKFNGLTVLPPLLTDEMIAQYTSALLAGTITSGWWFGAGAALQIPFAMQMAYRFNGIGVTQNVLYENQKLIANQFNSAIGKIQDSLSSTASALGKLQDVVNQNAQALNTLVKQLSSNFGAISSVLNDILSRLDPPEAEVQIDRLITGRLQSLQTYVTQQLIRAAEIRWSANLAATKMSECVLGQSKRVDFCGKGYHLMSFPQSAPHGVVFLHVTYVPAQEKNFTTAPAICHDGKAHFPREGVFVSNGTHWFVTQRNFYEPQIITTDNTFVSGNCDVVIGIVNNTVYDPLQPELDSFKEELDKYFKNHTSPDVDLGDISGINASVVNIQKEIDRLNEVAKNLNESLIDLQELGKYEQYIKGGGGSDIIKLLNEQVNKEMQSSNLYMSMSSWCYTHSLDGAGLFLFDHAAEEYEHAKKLIIFLNENNVPVQLTSISAPEHKFEGLTQIFQKAYEHEQHISESINNIVDHAIKSKDHATFNFLQWYVAEQHEEEVLFKDILDKIELIGNENHGLYLADQYVKGIAKSRKS

SEQ ID NO: 4811 - protein, 1379 aa, Artificial Sequence
  SARS-CoV-2/Portugal/PT0035/2020__EPI_ISL_418020 spike protein (1-1211)(K986P_V987P_T887W_A1020W) Ferritin construct
MFVFLVLLPLVSSQCVNLTTRTQLPPAYTNSFTRGVYYPDKVFRSSVLHSTQDLFLPFFSNVTWFHAIHVSGTNGTKRFDNPVLPFNDGVYFASTEKSNIIRGWIFGTTLDSKTQSLLIVNNATNVVIKVCEFQFCNDPFLGVYYHKNNKSWMESEFRVYSSANNCTFEYVSQPFLMDLEGKQGNFKNLREFVFKNIDGYFKIYSKHTPINLVRDLPQGFSALEPLVDLPIGINITRFQTLLALHRSYLTPGDSSSGWTAGAAAYYVGYLQPRTFLLKYNENGTITDAVDCALDPLSETKCTLKSFTVEKGIYQTSNFRVQPTESIVRFPNITNLCPFGEVFNATRFASVYAWNRKRISNCVADYSVLYNSASFSTFKCYGVSPTKLNDLCFTNVYADSFVIRGDEVRQIAPGQTGKIADYNYKLPDDFTGCVIAWNSNNLDSKVGGNYNYLYRLFRKSNLKPFERDISTEIYQAGSTPCNGVEGFNCYFPLQSYGFQPTNGVGYQPYRVVVLSFELLHAPATVCGPKKSTNLVKNKCVNFNFNGLTGTGVLTESNKKFLPFQQFGRDIADTTDAVRDPQTLEILDITPCSFGGVSVITPGTNTSNQVAVLYQDVNCTEVPVAIHADQLTPTWRVYSTGSNVFQTRAGCLIGAEHVNNSYECDIPIGAGICASYQTQTNSPRRARSVASQSIIAYTMSLGAENSVAYSNNSIAIPTNFTISVTTEILPVSMTKTSVDCTMYICGDSTECSNLLLQYGSFCTQLNRALTGIAVEQDKNTQEVFAQVKQIYKTPPIKDFGGFNFSQILPDPSKPSKRSFIEDLLFNKVTLADAGFIKQYGDCLGDISARDLICAQKFNGLTVLPPLLTDEMIAQYTSALLAGTITSGWWFGAGAALQIPFAMQMAYRFNGIGVTQNVLYENQKLIANQFNSAIGKIQDSLSSTASALGKLQDVVNQNAQALNTLVKQLSSNFGAISSVLNDILSRLDPPEAEVQIDRLITGRLQSLQTYVTQQLIRAAEIRWSANLAATKMSECVLGQSKRVDFCGKGYHLMSFPQSAPHGVVFLHVTYVPAQEKNFTTAPAICHDGKAHFPREGVFVSNGTHWFVTQRNFYEPQIITTDNTFVSGNCDVVIGIVNNTVYDPLQPELDSFKEELDKYFKNHTSPDVDLGDISGINASVVNIQKEIDRLNEVAKNLNESLIDLQELGKYEQYIKGGGGSDIIKLLNEQVNKEMQSSNLYMSMSSWCYTHSLDGAGLFLFDHAAEEYEHAKKLIIFLNENNVPVQLTSISAPEHKFEGLTQIFQKAYEHEQHISESINNIVDHAIKSKDHATFNFLQWYVAEQHEEEVLFKDILDKIELIGNENHGLYLADQYVKGIAKSRKS

SEQ ID NO: 4812 - protein, 1379 aa, Artificial Sequence
  SARS-CoV-2/USA/NY-NYUMC7/2020__EPI_ISL_418192 spike protein (1-1211)(K986P_V987P_T887W_A1020W) Ferritin construct
MFVFLVLLPLVSSQCVNLTTRTQLPPAYTNSFTRGVYYPDKVFRSSVLHSTQDLFLPFFSNVTWFHAIHVSGTNGTKRFDNPVLPFNDGVYFASTEKSNIIRGWIFGTTLDSKTQSLLIVNNATNVVIKVCEFQFCNDPFLGVYHHKNNKSWMESEFRVYSSANNCTFEYVSQPFLMDLEGKQGNFKNLREFVFKNIDGYFKIYSKHTPINLVRDLPQGFSALEPLVDLPIGINITRFQTLLALHRSYLTPGDSSSGWTAGAAAYYVGYLQPRTFLLKYNENGTITDAVDCALDPLSETKCTLKSFTVEKGIYQTSNFRVQPTESIVRFPNITNLCPFGEVFNATRFASVYAWNRKRISNCVADYSVLYNSASFSTFKCYGVSPTKLNDLCFTNVYADSFVIRGDEVRQIAPGQTGKIADYNYKLPDDFTGCVIAWNSNNLDSKVGGNYNYLYRLFRKSNLKPFERDISTEIYQAGSTPCNGVEGFNCYFPLQSYGFQPTNGVGYQPYRVVVLSFELLHAPATVCGPKKSTNLVKNKCVNFNFNGLTGTGVLTESNKKFLPFQQFGRDIADTTDAVRDPQTLEILDITPCSFGGVSVITPGTNTSNQVAVLYQGVNCTEVPVAIHADQLTPTWRVYSTGSNVFQTRAGCLIGAEHVNNSYECDIPIGAGICASYQTQTNSPRRARSVASQSIIAYTMSLGAENSVAYSNNSIAIPTNFTISVTTEILPVSMTKTSVDCTMYICGDSTECSNLLLQYGSFCTQLNRALTGIAVEQDKNTQEVFAQVKQIYKTPPIKDFGGFNFSQILPDPSKPSKRSFIEDLLFNKVTLADAGFIKQYGDCLGDIAARDLICAQKFNGLTVLPPLLTDEMIAQYTSALLAGTITSGWWFGAGAALQIPFAMQMAYRFNGIGVTQNVLYENQKLIANQFNSAIGKIQDSLSSTASALGKLQDVVNQNAQALNTLVKQLSSNFGAISSVLNDILSRLDPPEAEVQIDRLITGRLQSLQTYVTQQLIRAAEIRWSANLAATKMSECVLGQSKRVDFCGKGYHLMSFPQSAPHGVVFLHVTYVPAQEKNFTTAPAICHDGKAHFPREGVFVSNGTHWFVTQRNFYEPQIITTDNTFVSGNCDVVIGIVNNTVYDPLQPELDSFKEELDKYFKNHTSPDVDLGDISGINASVVNIQKEIDRLNEVAKNLNESLIDLQELGKYEQYIKGGGGSDIIKLLNEQVNKEMQSSNLYMSMSSWCYTHSLDGAGLFLFDHAAEEYEHAKKLIIFLNENNVPVQLTSISAPEHKFEGLTQIFQKAYEHEQHISESINNIVDHAIKSKDHATFNFLQWYVAEQHEEEVLFKDILDKIELIGNENHGLYLADQYVKGIAKSRKS

SEQ ID NO: 4813 - protein, 1379 aa, Artificial Sequence
  SARS-CoV-2/Iceland/189/2020__EPI_ISL_417709 spike protein (1-1211)(K986P_V987P_T887W_A1020W) Ferritin construct
MFVFLVLLPLVSSQCVNLTTRTQLPPAYTNSFTRGVYYPDKVFRSSVLHSTQDLFLPFFSNVTWFHAIHVSGTNGTKRFDNPVLPFNDGVYFASTEKSNIIRGWIFGTTLDSKTQSLLIVNNATNVVIKVCEFQFCNDPFLGVYYHKNNKSWMESEFRVYSSANNCTFEYVSQPFLMDLEGKQGNFKNLREFVFKNIDGYFKIYSKHTPINLVRDLPQGFSALEPLVDLPIGINITRFQTLLALHRSYLTPGDSSSGWTAGAAAYYVGYLQPRTFLLKYNENGTITDAVDCALDPLSETKCTLKSFTVEKGIYQTSNFRVQPTESIVRFPNITNLCPFGEVFNATRFASVYAWNRKRISNCVADYSVLYNSASFSTFKCYGVSPTKLNDLCFTNVYADSFVIRGDEVRQIAPGQTGKIADYNYKLPDDFTGCVIAWNSNNLDSKVGGNYNYLYRLFRKSNLKPFERDISTEIYQAGSTPCNGVEGFNCYFPLQSYGFQPTNGVGYQPYRVVVLSFELLHAPATVCGPKKSTNLVKNKCVNFNFNGLTGTGVLTESNKKFLPFQQFGRDIADTTDAVRDPQTLEILDITPCSFGGVSVITPGTNTSNQVAVLYQGVNCTEVPVAIHADQLTPTWRVYSTGSNVFQTRAGCLIGAEHVNNSYECDIPIGAGICASYQTQTNSPRRARSVASQSIIAYTMSLGAENSVAYSNNSIAIPTNFTISVTTEILPVSMTKTSVDCTMYICGDSTECSNLLLQYGSFCTQLNRALTGIAVEQDKNTQEVFAQVKQIYKTPPIKDFGGFNFSQILPDPSKPSKRSFIEDLLFNKVTLADAGFTKQYGDCLGDIAARDLICAQKFNGLTVLPPLLTDEMIAQYTSALLAGTITSGWWFGAGAALQIPFAMQMAYRFNGIGVTQNVLYENQKLIANQFNSAIGKIQDSLSSTASALGKLQDVVNQNAQALNTLVKQLSSNFGAISSVLNDILSRLDPPEAEVQIDRLITGRLQSLQTYVTQQLIRAAEIRWSANLAATKMSECVLGQSKRVDFCGKGYHLMSFPQSAPHGVVFLHVTYVPAQEKNFTTAPAICHDGKAHFPREGVFVSNGTHWFVTQRNFYEPQIITTDNTFVSGNCDVVIGIVNNTVYDPLQPELDSFKEELDKYFKNHTSPDVDLGDISGINASVVNIQKEIDRLNEVAKNLNESLIDLQELGKYEQYIKGGGGSDIIKLLNEQVNKEMQSSNLYMSMSSWCYTHSLDGAGLFLFDHAAEEYEHAKKLIIFLNENNVPVQLTSISAPEHKFEGLTQIFQKAYEHEQHISESINNIVDHAIKSKDHATFNFLQWYVAEQHEEEVLFKDILDKIELIGNENHGLYLADQYVKGIAKSRKS

SEQ ID NO: 4814 - protein, 1379 aa, Artificial Sequence
  SARS-CoV-2/Australia/NSW56/2020__EPI_ISL_417408 spike protein (1-1211)(K986P_V987P_T887W_A1020W) Ferritin construct
MFVFLVLLPLVSSQCVNLTTRTQLPPAYTNSFTRGVYYPDKVFRSSVLHSTQDLFLPFFSNVTWFHAIHVSGTNGTKRFDNPVLPFNDGVYFASTEKSNIIRGWIFGTTLDSKTQSLLIVNNATNVVIKVCEFQFCNDPFLGVYYHKNNKSWMESEFRVYSSANNCTFEYVSQPFLMDLEGKQGNFKNLREFVFKNIDGYFKIYSKHTPINLVRDLPQGFSALEPLVDLPIGINITRFQTLLALHRSYLTPGDSSSGWTAGAAAYYVGYLQPRTFLLKYNENGTITDAVDCALDPLSETKCTLKSFTVEKGIYQTSNFRVQPTESIVRFPNITNLCPFGEVFNATRFASVYAWNRKRISNCVADYSVLYNSASFSTFKCYGVSPTKLNDLCFTNVYADSFVIRGDEVRQIAPGQTGKIADYNYKLPDDFTGCVIAWNSNNLDSKVGGNYNYLYRLFRKSNLKPFERDISTEIYQAGSTPCNGVEGFNCYFPLQSYGFQPTNGVGYQPYRVVVLSFELLHAPATVCGPKKSTNLVKNKCVNFNFNGLTGTGVLTESNKKFLPFQQFGRDIADTTDAVRDPQTLEILDITPCSFGGVSVITPGTNTSNQVAVLYQDVNCTEVPVAIHADQLTPTWRVYSTGSNVFQTRAGCLIGAEHVNNSYECDIPIGAGICASYQTQTNSPRRARSVASQSIIAYTMSLGAENSVAYSNNSIAIPTNFTISVTTEILPVSMTKTSVDCTMYICGDSTECSNLLLQYGSFCTQLNRALTGIAVEQDKNTQEVFAQVKQIYKTPPIKDFGGFNFSQILPDSSKPSKRSFIEDLLFNKVTLADAGFIKQYGDCLGDIAARDLICAQKFNGLTVLPPLLTDEMIAQYTSALLAGTITSGWWFGAGAALQIPFAMQMAYRFNGIGVTQNVLYENQKLIANQFNSAIGKIQDSLSSTASALGKLQDVVNQNAQALNTLVKQLSSNFGAISSVLNDILSRLDPPEAEVQIDRLITGRLQSLQTYVTQQLIRAAEIRWSANLAATKMSECVLGQSKRVDFCGKGYHLMSFPQSAPHGVVFLHVTYVPAQEKNFTTAPAICHDGKAHFPREGVFVSNGTHWFVTQRNFYEPQIITTDNTFVSGNCDVVIGIVNNTVYDPLQPELDSFKEELDKYFKNHTSPDVDLGDISGINASVVNIQKEIDRLNEVAKNLNESLIDLQELGKYEQYIKGGGGSDIIKLLNEQVNKEMQSSNLYMSMSSWCYTHSLDGAGLFLFDHAAEEYEHAKKLIIFLNENNVPVQLTSISAPEHKFEGLTQIFQKAYEHEQHISESINNIVDHAIKSKDHATFNFLQWYVAEQHEEEVLFKDILDKIELIGNENHGLYLADQYVKGIAKSRKS

SEQ ID NO: 4815 - protein, 1379 aa, Artificial Sequence
  SARS-CoV-2/Iceland/280/2020__EPI_ISL_417608 spike protein (1-1211)(K986P_V987P_T887W_A1020W) Ferritin construct
MFVFLVLLPLVSSQCVNLTTRTQLPPAYTNSFTRGVYYPDKVFRSSVLHSTQDLFLPFFSNVTWFHAIHVSGTNGTKRFDNPVLPFNDGVYFASTEKSNIIRGWIFGTTLDSKTQSLLIVNNATNVVIKVCEFQFCNDPFLGVYYHKNNKSWMESEFRVYSSANNCTFEYVSQPFLMDLEGKQGNFKNLREFVFKNIDGYFKIYSKHTPINLVRDLPQGFSALEPLVDLPIGINITRFQTLLALHRSYLTPGDSSSGWTAGAAAYYVGYLQPRTFLLKYNENGTITDAVDCALDPLSETKCTLKSFTVEKGIYQTSNFRVQPTESIVRFPNITNLCPFGEVFNATRFASVYAWNRKRISNCVADYSVLYNSASFSTFKCYGVSPTKLNDLCFTNVYADSFVIRGDEVRQIAPGQTGKIADYNYKLPDDFTGCVIAWNSNNLDSKVGGNYNYLYRLFRKSNLKPFERDISTEIYQAGSTPCNGVEGFNCYFPLQSYGFQPTNGVGYQPYRVVVLSFELLHAPATVCGPKKSTNLVKNKCVNFNFNGLTGTGVLTESNKKFLPFQQFGRDIADTTDAVRDPQTLEILDITPCSFGGVSVITPGTNTSNQVAVLYQGVNCTEVPVAIHADQLTPTWRVYSTGSNVFQTRAGCLIGAEHVNNSYECDIPIGAGICASYHTQTNSPRRARSVASQSIIAYTMSLGAENSVAYSNNSIAIPTNFTISVTTEILPVSMTKTSVDCTMYICGDSTECSNLLLQYGSFCTQLNRALTGIAVEQDKNTQEVFAQVKQIYKTPPIKDFGGFNFSQILPDPSKPSKRSFIEDLLFNKVTLADAGFIKQYGDCLGDIAARDLICAQKFNGLTVLPPLLTDEMIAQYTSALLAGTITSGWWFGAGAALQIPFAMQMAYRFNGIGVTQNVLYENQKLIANQFNSAIGKIQDSLSSTASALGKLQDVVNQNAQALNTLVKQLSSNFGAISSVLNDILSRLDPPEAEVQIDRLITGRLQSLQTYVTQQLIRAAEIRWSANLAATKMSECVLGQSKRVDFCGKGYHLMSFPQSAPHGVVFLHVTYVPAQEKNFTTAPAICHDGKAHFPREGVFVSNGTHWFVTQRNFYEPQIITTDNTFVSGNCDVVIGIVNNTVYDPLQPELDSFKEELDKYFKNHTSPDVDLGDISGINASVVNIQKEIDRLNEVAKNLNESLIDLQELGKYEQYIKGGGGSDIIKLLNEQVNKEMQSSNLYMSMSSWCYTHSLDGAGLFLFDHAAEEYEHAKKLIIFLNENNVPVQLTSISAPEHKFEGLTQIFQKAYEHEQHISESINNIVDHAIKSKDHATFNFLQWYVAEQHEEEVLFKDILDKIELIGNENHGLYLADQYVKGIAKSRKS

SEQ ID NO: 4816 - protein, 1379 aa, Artificial Sequence; identical to SEQ ID NO: 4771
  SARS-CoV-2/Iceland/247/2020__EPI_ISL_417575 spike protein (1-1211)(K986P_V987P_T887W_A1020W) Ferritin construct

SEQ ID NO: 4817 - protein, 1379 aa, Artificial Sequence
  SARS-CoV-2/Iceland/238/2020__EPI_ISL_417566 spike protein (1-1211)(K986P_V987P_T887W_A1020W) Ferritin construct
MFVFLVLLPLVSSQCVNLTTRTQLPPAYTNSFTRGVYYPDKVFRSSVLHSTQDLFLPFFSNVTWFHAIHVSGTNGTKRFDNPVLPFNDGVYFASTEKSNIIRGWIFGTTLDSKTQSLLIVNNATNVVIKVCEFQFCNDPFLGVYYHKNNKSWMESEFRVYSSANNCTFEYVSQPFLMDLEGKQGNFKNLREFVFKNIDGYFKIYSKHTPINLVRDLPQGFSALEPLVDLPIGINITRFQTLLALHRSYLTPGDSSSGWTAGAAAYYVGYLQPRTFLLKYNENGTITDAVDCALDPLSETKCTLKSFTVEKGIYQTSNFRVQPTESIVRFPNITNLCPFGEVFNATRFASVYAWNRKRISNCVADYSVLYNSASFSTFKCYGVSPTKLNDLCFTNVYADSFVIRGDEVRQIAPGQTGKIADYNYKLPDDFTGCVIAWNSNNLDSKVGGNYNYLYRLFRKSNLKPFERDISTEIYQAGSTPCNGVEGFNCYFPLQSYGFQPTNGVGYQPYRVVVLSFELLHAPATVCGPKKSTNLVKNKCVNFNFNGLTGTGVLTESNKKFLPFQQFGRDIADTTDAVRDPQTLEILDITPCSFGGVSVITPGTNTSNQVAVLYQGVNCTEVPVAIHADQLTPTWRVYSTGSNVFQTRAGCLIGAEHVNNSYECDIPIGAGICASYQTQTNSPRRARSVASQSIIAYTMSLGAENSVAYSNNSIAIPTNFTISVTTEILPVSMTKTSVDCTMYICGDSTECSNLLLQYGSFCTQLNRALTGIAVEQDKNTQEVFAQVKQIYKTPPIKDFGGFNFSQILPDPSKPSKRSFIEDLLFNKVTLADVGFIKQYGDCLGDIAARDLICAQKFNGLTVLPPLLTDEMIAQYTSALLAGTITSGWWFGAGAALQIPFAMQMAYRFNGIGVTQNVLYENQKLIANQFNSAIGKIQDSLSSTASALGKLQDVVNQNAQALNTLVKQLSSNFGAISSVLNDILSRLDPPEAEVQIDRLITGRLQSLQTYVTQQLIRAAEIRWSANLAATKMSECVLGQSKRVDFCGKGYHLMSFPQSAPHGVVFLHVTYVPAQEKNFTTAPAICHDGKAHFPREGVFVSNGTHWFVTQRNFYEPQIITTDNTFVSGNCDVVIGIVNNTVYDPLQPELDSFKEELDKYFKNHTSPDVDLGDISGINASVVNIQKEIDRLNEVAKNLNESLIDLQELGKYEQYIKGGGGSDIIKLLNEQVNKEMQSSNLYMSMSSWCYTHSLDGAGLFLFDHAAEEYEHAKKLIIFLNENNVPVQLTSISAPEHKFEGLTQIFQKAYEHEQHISESINNIVDHAIKSKDHATFNFLQWYVAEQHEEEVLFKDILDKIELIGNENHGLYLADQYVKGIAKSRKS

SEQ ID NO: 4818 - protein, 1379 aa, Artificial Sequence
  SARS-CoV-2/Greece/16/2020__EPI_ISL_418265 spike protein (1-1211)(K986P_V987P_T887W_A1020W) Ferritin construct
MFVFLVLLPLVSSQCVNLTTRTQLPPAYTNSFTRGVYYPDKVFRSSVLHSTQDLFLPFFSNVTWFHAIHVSGTNGTKRFDNPVLPFNDGVYFASTEKSNIIRGWIFGTTLDSKTQSLLIVNNATNVVIKVCEFQFCNDPFLGVYYHKNNKSWMESEFRVYSSANNCTFEYVSQPFLMDLEGKQGNFKNLREFVFKNVDGYFKIYSKHTPINLVRDLPQGFSALEPLVDLPIGINITRFQTLLALHRSYLTPGDSSSGWTAGAAAYYVGYLQPRTFLLKYNENGTITDAVDCALDPLSETKCTLKSFTVEKGIYQTSNFRVQPTESIVRFPNITNLCPFGEVFNATRFASVYAWNRKRISNCVADYSVLYNSASFSTFKCYGVSPTKLNDLCFTNVYADSFVIRGDEVRQIAPGQTGKIADYNYKLPDDFTGCVIAWNSNNLDSKVGGNYNYLYRLFRKSNLKPFERDISTEIYQAGSTPCNGVEGFNCYFPLQSYGFQPTNGVGYQPYRVVVLSFELLHAPATVCGPKKSTNLVKNKCVNFNFNGLTGTGVLTESNKKFLPFQQFGRDIADTTDAVRDPQTLEILDITPCSFGGVSVITPGTNTSNQVAVLYQDVNCTEVPVAIHADQLTPTWRVYSTGSNVFQTRAGCLIGAEHVNNSYECDIPIGAGICASYQTQTNSPRRARSVASQSIIAYTMSLGAENSVAYSNNSIAIPTNFTISVTTEILPVSMTKTSVDCTMYICGDSTECSNLLLQYGSFCTQLNRALTGIAVEQDKNTQEVFAQVKQIYKTPPIKDFGGFNFSQILPDPSKPSKRSFIEDLLFNKVTLADAGFIKQYGDCLGDIAARDLICAQKFNGLTVLPPLLTDEMIAQYTSALLAGTITSGWWFGAGAALQIPFAMQMAYRFNGIGVTQNVLYENQKLIANQFNSAIGKIQDSLSSTASALGKLQDVVNQNAQALNTLVKQLSSNFGAISSVLNDILSRLDPPEAEVQIDRLITGRLQSLQTYVTQQLIRAAEIRWSANLAATKMSECVLGQSKRVDFCGKGYHLMSFPQSAPHGVVFLHVTYVPAQEKNFTTAPAICHDGKAHFPREGVFVSNGTHWFVTQRNFYEPQIITTDNTFVSGNCDVVIGIVNNTVYDPLQPELDSFKEELDKYFKNHTSPDVDLGDISGINASVVNIQKEIDRLNEVAKNLNESLIDLQELGKYEQYIKGGGGSDIIKLLNEQVNKEMQSSNLYMSMSSWCYTHSLDGAGLFLFDHAAEEYEHAKKLIIFLNENNVPVQLTSISAPEHKFEGLTQIFQKAYEHEQHISESINNIVDHAIKSKDHATFNFLQWYVAEQHEEEVLFKDILDKIELIGNENHGLYLADQYVKGIAKSRKS

SEQ ID NO: 4819 - protein, 1379 aa, Artificial Sequence
  SARS-CoV-2/Iceland/319/2020__EPI_ISL_417648 spike protein (1-1211)(K986P_V987P_T887W_A1020W) Ferritin construct
MFVFLVLLPLVSSQCVNLTTRTQLPPAYTNSFTRGVYYPDKVFRSSVLHSTQDLFLPFFSNVTWFHAIHVSGTNGTKRFDNPVLPFNDGVYFASTEKSNIIRGWIFGTTLDSKTQSLLIVNNATNVVIKVCEFQFCNDPFLGVYYHKNNKSWMESEFRVYSSANNCTFEYVSQPFLIDLEGKQGNFKNLREFVFKNIDGYFKIYSKHTPINLVRDLPQGFSALEPLVDLPIGINITRFQTLLALHRSYLTPGDSSSGWTAGAAAYYVGYLQPRTFLLKYNENGTITDAVDCALDPLSETKCTLKSFTVEKGIYQTSNFRVQPTESIVRFPNITNLCPFGEVFNATRFASVYAWNRKRISNCVADYSVLYNSASFSTFKCYGVSPTKLNDLCFTNVYADSFVIRGDEVRQIAPGQTGKIADYNYKLPDDFTGCVIAWNSNNLDSKVGGNYNYLYRLFRKSNLKPFERDISTEIYQAGSTPCNGVEGFNCYFPLQSYGFQPTNGVGYQPYRVVVLSFELLHAPATVCGPKKSTNLVKNKCVNFNFNGLTGTGVLTESNKKFLPFQQFGRDIADTTDAVRDPQTLEILDITPCSFGGVSVITPGTNTSNQVAVLYQGVNCTEVPVAIHADQLTPTWRVYSTGSNVFQTRAGCLIGAEHVNNSYECDIPIGAGICASYQTQTNSPRRARSVASQSIIAYTMSLGAENSVAYSNNSIAIPTNFTISVTTEILPVSMTKTSVDCTMYICGDSTECSNLLLQYGSFCTQLNRALTGIAVEQDKNTQEVFAQVKQIYKTPPIKDFGGFNFSQILPDPSKPSKRSFIEDLLFNKVTLADAGFIKQYGDCLGDIAARDLICAQKFNGLTVLPPLLTDEMIAQYTSALLAGTITSGWWFGAGAALQIPFAMQMAYRFNGIGVTQNVLYENQKLIANQFNSAIGKIQDSLSSTASALGKLQDVVNQNAQALNTLVKQLSSNFGAISSVLNDILSRLDPPEAEVQIDRLITGRLQSLQTYVTQQLIRAAEIRWSANLAATKMSECVLGQSKRVDFCGKGYHLMSFPQSAPHGVVFLHVTYVPAQEKNFTTAPAICHDGKAHFPREGVFVSNGTHWFVTQRNFYEPQIITTDNTFVSGNCDVVIGIVNNTVYDPLQPELDSFKEELDKYFKNHTSPDVDLGDISGINASVVNIQKEIDRLNEVAKNLNESLIDLQELGKYEQYIKGGGGSDIIKLLNEQVNKEMQSSNLYMSMSSWCYTHSLDGAGLFLFDHAAEEYEHAKKLIIFLNENNVPVQLTSISAPEHKFEGLTQIFQKAYEHEQHISESINNIVDHAIKSKDHATFNFLQWYVAEQHEEEVLFKDILDKIELIGNENHGLYLADQYVKGIAKSRKS

SEQ ID NO: 4820 - protein, 1379 aa, Artificial Sequence
  SARS-CoV-2/Congo/94/2020__EPI_ISL_417947 spike protein (1-1211)(K986P_V987P_T887W_A1020W) Ferritin construct
MFVFLVLLPLVSSQCVNLTTRTQLPPAYTNSFTRGVYYPDKVFRSSVLHSTQDLFLPFFSNVTWFHAIHVSGTNGTKRFDNPVLPFNDGVYFASTEKSNIIRGWIFGTTLDSKTQSLLIVNNATNVVIKVCEFQFCNDPFLGVYYHKNNKSWMESEFRVYSSANNCTFEYVSQPFLMDLEGKQGNFKNLREFVFKNIDGYFKIYSKHTPINLVRDLPQGFSALEPLVDLPIGINITRFQTLLALHRSYLTPGDSSSGWTAGAAAYYVGYLQPRTFLLKYNENGTITDAVDCALDPLSETKCTLKSFTVEKGIYQTSNFRVQPTESIVRFPNITNLCPFGEVFNATRFASVYAWNRKRISNCVADYSVLYNSASFSTFKCYGVSPTKLNDLCFTNVYADSFVIRGDEVRQIAPGQTGKIADYNYKLPDDFTGCVIAWNSNNLDSKVGGNYNYLYRLFRKSNLKPFERDISTEIYQAGSTPCNGVEGFNCYFPLQSYGFQPTNGVGYQPYRVVVLSFELLHAPATVCGPKKSTNLVKNKCVNFNFNGLTGTGVLTESNKKFLPFQQFGRDIADTTDAVRDPQTLEILDITPCSFGGVSVITPGTNTSNQVAVLYQGVNCTEVPVAIHADQLTPTWRVYSTGSNVFQTRAGCLIGAEHVNNSYECDIPIGAGICASYQTQTNSPRRARSVASQSIIAYTMSLGAENSVAYSNNSIAIPTNFTISVTTEILPVSMTKTSVDCTMYICGDSTECSNLLLQYGSFCTQLNRALTGIAVEQDKNTQEVFAQVKQIYKTPPIKDFGGFNFSQILPDPSKPSKRSFIEDILFNKVTLADAGFIKQYGDCLGDIAARDLICAQKFNGLTVLPPLLTDEMIAQYTSALLAGTITSGWWFGAGAALQIPFAMQMAYRFNGIGVTQNVLYENQKLIANQFNSAIGKIQDSLSSTASALGKLQDVVNQNAQALNTLVKQLSSNFGAISSVLNDILSRLDPPEAEVQIDRLITGRLQSLQTYVTQQLIRAAEIRWSANLAATKMSECVLGQSKRVDFCGKGYHLMSFPQSAPHGVVFLHVTYVPAQEKNFTTAPAICHDGKAHFPREGVFVSNGTHWFVTQRNFYEPQIITTDNTFVSGNCDVVIGIVNNTVYDPLQPELDSFKEELDKYFKNHTSPDVDLGDISGINASVVNIQKEIDRLNEVAKNLNESLIDLQELGKYEQYIKGGGGSDIIKLLNEQVNKEMQSSNLYMSMSSWCYTHSLDGAGLFLFDHAAEEYEHAKKLIIFLNENNVPVQLTSISAPEHKFEGLTQIFQKAYEHEQHISESINNIVDHAIKSKDHATFNFLQWYVAEQHEEEVLFKDILDKIELIGNENHGLYLADQYVKGIAKSRKS

SEQ ID NO: 4821 - protein, 1379 aa, Artificial Sequence
  SARS-CoV-2/Congo/158/2020__EPI_ISL_417950 spike protein (1-1211)(K986P_V987P_T887W_A1020W) Ferritin construct
MFVFLVLLPLVSSQCVNLTTRTQLPPAYTNSFTRGVYYPDKVFRSSVLHSTQDLFLPFFSNVTWFHAIHVSGTNGTKRFDNPVLPFNDGVYFASTEKSNIIRGWIFGTTLDSKTQSLLIVNNATNVVIKVCEFQFCNDPFLGVYYHKNNKSWMESEFRVYSSANNCTFEYVSQPFLMDLEGKQGNFKNLREFVFKNIDGYFKIYSKHTPINLVRDLPQGFSALEPLVDLPIGINITRFQTLLALHRSYLTPGDSSSGWTAGAAAYYVGYLQPRTFLLKYNENGTITDAVDCALDPLSETKCTLKSFTVEKGIYQTSNFRVQPTESIVRFPNITNLCPFGEVFNATRFASVYAWNRKRISNCVADYSVLYNSASFSTFKCYGVSPTKLNDLCFTNVYADSFVIRGDEVRQIAPGQTGKIADYNYKLPDDFTGCVIAWNSNNLDSKVGGNYNYLYRLFRKSNLKPFERDISTEIYQAGSTPCNGVEGFNCYFPLQSYGFQPTNGVGYQPYRVVVLSFELLHAPATVCGPKKSTNLVKNKCVNFNFNGLTGTGVLTESNKKFLPFQQFGRDIADTTDAVRDPQTLEILDITPCSFGGVSVITPGTNTSNQVAVLYQDVNCTEVPVAIHADQLTPTWRVYSTGSNVFQTRAGCLIGAEHVNNSYECDIPIGAGICASYQTQTNSPRRARSVASQSIIAYTMSLGAENSVAYSNNSIAIPTNFTISVTTEILPVSMTKTSVDCTMYICGDSTECSNLLLQYGSFCTQLNRALTGIAVEQDKNTQEVFAQVKQIYKTPPIKDFGGFNFSQILPDPSKPSKRSFIEDLLFNKVTLADAGFIKQYGDCLGDIAARDLICAQKFNGLTVLPPLLTDEMIAQYTSALLAGTITSGWWFGAGAALQIPFAMQMAYRFNGIGVTQNVLYENQKLIANQFNSAIGKIQDSLSSTASALGKLQDVVNQNAQALNTLVKQLSSNFGAISSVLNDILSRLDPPEAEVQIDRLITGRLQSLQTYVTQQLIRAAEIRWSANLAATKMSECVLGQSKRVDFCGKGYHLMSFPQSAPHGVVFLHVTYVPAQEKNFTTAPAICHDGKAHFPREGVFVSNGTHWFVTQRNFYEPQIITTDNTFLSGNCDVVIGIVNNTVYDPLQPELDSFKEELDKYFKNHTSPDVDLGDISGINASVVNIQKEIDRLNEVAKNLNESLIDLQELGKYEQYIKGGGGSDIIKLLNEQVNKEMQSSNLYMSMSSWCYTHSLDGAGLFLFDHAAEEYEHAKKLIIFLNENNVPVQLTSISAPEHKFEGLTQIFQKAYEHEQHISESINNIVDHAIKSKDHATFNFLQWYVAEQHEEEVLFKDILDKIELIGNENHGLYLADQYVKGIAKSRKS

SEQ ID NO: 4822 - protein, 1379 aa, Artificial Sequence
  SARS-CoV-2/USA/UT-00034/2020__EPI_ISL_417977 spike protein (1-1211)(K986P_V987P_T887W_A1020W) Ferritin construct
MFVFLVLLPLVSSQCVNLTTRTQLPPAYTNSFTRGVYYPDKVFRSSVLHSTQDLFLPFFSNVTWFHAIHVSGTNGTKRFDNPVLPFNDGVYFASTEKSNIIRGWIFGTTLDSKTQSLLIVNNATNVVIKVCEFQFCNDPFLGVYYYKNNKSWMESEFRVYSSANNCTFEYVSQPFLMDLEGKQGNFKNLREFVFKNIDGYFKIYSKHTPINLVRDLPQGFSALEPLVDLPIGINITRFQTLLALHRSYLTPGDSSSGWTAGAAAYYVGYLQPRTFLLKYNENGTITDAVDCALDPLSETKCTLKSFTVEKGIYQTSNFRVQPTESIVRFPNITNLCPFGEVFNATRFASVYAWNRKRISNCVADYSVLYNSASFSTFKCYGVSPTKLNDLCFTNVYADSFVIRGDEVRQIAPGQTGKIADYNYKLPDDFTGCVIAWNSNNLDSKVGGNYNYLYRLFRKSNLKPFERDISTEIYQAGSTPCNGVEGFNCYFPLQSYGFQPTNGVGYQPYRVVVLSFELLHAPATVCGPKKSTNLVKNKCVNFNFNGLTGTGVLTESNKKFLPFQQFGRDIADTTDAVRDPQTLEILDITPCSFGGVSVITPGTNTSNQVAVLYQGVNCTEVPVAIHADQLTPTWRVYSTGSNVFQTRAGCLIGAEHVNNSYECDIPIGAGICASYQTQTNSPRRARSVASQSIIAYTMSLGAENSVAYSNNSIAIPTNFTISVTTEILPVSMTKTSVDCTMYICGDSTECSNLLLQYGSFCTQLNRALTGIAVEQDKNTQEVFAQVKQIYKTPPIKDFGGFNFSQILPDPSKPSKRSFIEDLLFNKVTLADAGFIKQYGDCLGDIAARDLICAQKFNGLTVLPPLLTDEMIAQYTSALLAGTITSGWWFGAGAALQIPFAMQMAYRFNGIGVTQNVLYENQKLIANQFNSAIGKIQDSLSSTASALGKLQDVVNQNAQALNTLVKQLSSNFGAISSVLNDILSRLDPPEAEVQIDRLITGRLQSLQTYVTQQLIRAAEIRWSANLAATKMSECVLGQSKRVDFCGKGYHLMSFPQSAPHGVVFLHVTYVPAQEKNFTTAPAICHDGKAHFPREGVFVSNGTHWFVTQRNFYEPQIITTDNTFVSGNCDVVIGIVNNTVYDPLQPELDSFKEELDKYFKNHTSPDVDLGDISGINASVVNIQKEIDRLNEVAKNLNESLIDLQELGKYEQYIKGGGGSDIIKLLNEQVNKEMQSSNLYMSMSSWCYTHSLDGAGLFLFDHAAEEYEHAKKLIIFLNENNVPVQLTSISAPEHKFEGLTQIFQKAYEHEQHISESINNIVDHAIKSKDHATFNFLQWYVAEQHEEEVLFKDILDKIELIGNENHGLYLADQYVKGIAKSRKS

SEQ ID NO: 4823 - protein, 1379 aa, Artificial Sequence
  SARS-CoV-2/USA/UT-00033/2020__EPI_ISL_417976 spike protein (1-1211)(K986P_V987P_T887W_A1020W) Ferritin construct
MFVFLVLLPLVSSQCVNLTTRTQLPPAYTNSFTRGVYYPDKVFRSSVLHSTQDLFLPFFSNVTWFHAIHVSGTNGTKRFDNPVLPFNDGVYFASTEKSNIIRGWIFGTTLDSKTQSLLIVNNATNVVIKVCEFQFCNDPFLGVYYHKNNKSWMESEFRVYSSANNCTFEYVSQPFLMDLEGKQGNFKNLREFVFKNIDGYFKIYSKHTPINLVRDLPQGFSALEPLVDLPIGINITRFQTLLALHRSYLTPGDSSSGLTAGAAAYYVGYLQPRTFLLKYNENGTITDAVDCALDPLSETKCTLKSFTVEKGIYQTSNFRVQPTESIVRFPNITNLCPFGEVFNATRFASVYAWNRKRISNCVADYSVLYNSASFSTFKCYGVSPTKLNDLCFTNVYADSFVIRGDEVRQIAPGQTGKIADYNYKLPDDFTGCVIAWNSNNLDSKVGGNYNYLYRLFRKSNLKPFERDISTEIYQAGSTPCNGVEGFNCYFPLQSYGFQPTNGVGYQPYRVVVLSFELLHAPATVCGPKKSTNLVKNKCVNFNFNGLTGTGVLTESNKKFLPFQQFGRDIADTTDAVRDPQTLEILDITPCSFGGVSVITPGTNTSNQVAVLYQGVNCTEVPVAIHADQLTPTWRVYSTGSNVFQTRAGCLIGAEHVNNSYECDIPIGAGICASYQTQTNSPRRARSVASQSIIAYTMSLGAENSVAYSNNSIAIPTNFTISVTTEILPVSMTKTSVDCTMYICGDSTECSNLLLQYGSFCTQLNRALTGIAVEQDKNTQEVFAQVKQIYKTPPIKDFGGFNFSQILPDPSKPSKRSFIEDLLFNKVTLADAGFIKQYGDCLGDIAARDLICAQKFNGLTVLPPLLTDEMIAQYTSALLAGTITSGWWFGAGAALQIPFAMQMAYRFNGIGVTQNVLYENQKLIANQFNSAIGKIQDSLSSTASALGKLQDVVNQNAQALNTLVKQLSSNFGAISSVLNDILSRLDPPEAEVQIDRLITGRLQSLQTYVTQQLIRAAEIRWSANLAATKMSECVLGQSKRVDFCGKGYHLMSFPQSAPHGVVFLHVTYVPAQEKNFTTAPAICHDGKAHFPREGVFVSNGTHWFVTQRNFYEPQIITTDNTFVSGNCDVVIGIVNNTVYDPLQPELDSFKEELDKYFKNHTSPDVDLGDISGINASVVNIQKEIDRLNEVAKNLNESLIDLQELGKYEQYIKGGGGSDIIKLLNEQVNKEMQSSNLYMSMSSWCYTHSLDGAGLFLFDHAAEEYEHAKKLIIFLNENNVPVQLTSISAPEHKFEGLTQIFQKAYEHEQHISESINNIVDHAIKSKDHATFNFLQWYVAEQHEEEVLFKDILDKIELIGNENHGLYLADQYVKGIAKSRKS

SEQ ID NO: 4824 - protein, 1379 aa, Artificial Sequence
  SARS-CoV-2/USA/WI-13/2020__EPI_ISL_417516 spike protein (1-1211)(K986P_V987P_T887W_A1020W) Ferritin construct
MFVFLVLLPLVSSQCVNLTTRTQLPPAYTNSFTRGVYYPDKVFRSSVLHSTQDLFLPFFSNVTWFHAIHVSGTNGTKRFDNPVLPFNDGVYFASTEKSNIIRGWIFGTTLDSKTQSLLIVNNATNVVIKVCEFQFCNDPFLGVYYHKNNKSWMESEFRVYSSANNCTFEYVSQPFLMDLEGKQGNFKNLREFVFKNIDGYFKIYSKHTPINLVRDLPQGFSALEPLVDLPIGINITRFQTLLALHRSYLTPGDSSSGWTAGAAAYYVGYLQPRTFLLKYNENGTITDAVDCALDPLSETKCTLKSFTVEKGIYQTSNFRVLPTESIVRFPNITNLCPFGEVFNATRFASVYAWNRKRISNCVADYSVLYNSASFSTFKCYGVSPTKLNDLCFTNVYADSFVIRGDEVRQIAPGQTGKIADYNYKLPDDFTGCVIAWNSNNLDSKVGGNYNYLYRLFRKSNLKPFERDISTEIYQAGSTPCNGVEGFNCYFPLQSYGFQPTNGVGYQPYRVVVLSFELLHAPATVCGPKKSTNLVKNKCVNFNFNGLTGTGVLTESNKKFLPFQQFGRDIADTTDAVRDPQTLEILDITPCSFGGVSVITPGTNTSNQVAVLYQGVNCTEVPVAIHADQLTPTWRVYSTGSNVFQTRAGCLIGAEHVNNSYECDIPIGAGICASYQTQTNSPRRARSVASQSIIAYTMSLGAENSVAYSNNSIAIPTNFTISVTTEILPVSMTKTSVDCTMYICGDSTECSNLLLQYGSFCTQLNRALTGIAVEQDKNTQEVFAQVKQIYKTPPIKDFGGFNFSQILPDPSKPSKRSFIEDLLFNKVTLADAGFIKQYGDCLGDIAARDLICAQKFNGLTVLPPLLTDEMIAQYTSALLAGTITSGWWFGAGAALQIPFAMQMAYRFNGIGVTQNVLYENQKLIANQFNSAIGKIQDSLSSTASALGKLQDVVNQNAQALNTLVKQLSSNFGAISSVLNDILSRLDPPEAEVQIDRLITGRLQSLQTYVTQQLIRAAEIRWSANLAATKMSECVLGQSKRVDFCGKGYHLMSFPQSAPHGVVFLHVTYVPAQEKNFTTAPAICHDGKAHFPREGVFVSNGTHWFVTQRNFYEPQIITTDNTFVSGNCDVVIGIVNNTVYDPLQPELDSFKEELDKYFKNHTSPDVDLGDISGINASVVNIQKEIDRLNEVAKNLNESLIDLQELGKYEQYIKGGGGSDIIKLLNEQVNKEMQSSNLYMSMSSWCYTHSLDGAGLFLFDHAAEEYEHAKKLIIFLNENNVPVQLTSISAPEHKFEGLTQIFQKAYEHEQHISESINNIVDHAIKSKDHATFNFLQWYVAEQHEEEVLFKDILDKIELIGNENHGLYLADQYVKGIAKSRKS

SEQ ID NO: 4825 - protein, 1378 aa, Artificial Sequence
  SARS-CoV-2/India/1-27/2020__EPI_ISL_413522 spike protein (1-1210)(K985P_V986P_T886W_A1019W) Ferritin construct
MFVFLVLLPLVSSQCVNLTTRTQLPPAYTNSFTRGVYYPDKVFRSSVLHSTQDLFLPFFSNVTWFHAIHVSGTNGTKRFDNPVLPFNDGVYFASTEKSNIIRGWIFGTTLDSKTQSLLIVNNATNVVIKVCEFQFCNDPFLGVYHKNNKSWMESEFRVYSSANNCTFEYVSQPFLMDLEGKQGNFKNLREFVFKNIDGYFKIYSKHTPINLVRDLPQGFSALEPLVDLPIGINITRFQTLLALHRSYLTPGDSSSGWTAGAAAYYVGYLQPRTFLLKYNENGTITDAVDCALDPLSETKCTLKSFTVEKGIYQTSNFRVQPTESIVRFPNITNLCPFGEVFNATRFASVYAWNRKRISNCVADYSVLYNSASFSTFKCYGVSPTKLNDLCFTNVYADSFVIRGDEVIQIAPGQTGKIADYNYKLPDDFTGCVIAWNSNNLDSKVGGNYNYLYRLFRKSNLKPFERDISTEIYQAGSTPCNGVEGFNCYFPLQSYGFQPTNGVGYQPYRVVVLSFELLHAPATVCGPKKSTNLVKNKCVNFNFNGLTGTGVLTESNKKFLPFQQFGRDIADTTDAVRDPQTLEILDITPCSFGGVSVITPGTNTSNQVAVLYQDVNCTEVPVAIHADQLTPTWRVYSTGSNVFQTRAGCLIGAEHVNNSYECDIPIGAGICASYQTQTNSPRRARSVASQSIIAYTMSLGAENSVAYSNNSIAIPTNFTISVTTEILPVSMTKTSVDCTMYICGDSTECSNLLLQYGSFCTQLNRALTGIAVEQDKNTQEVFAQVKQIYKTPPIKDFGGFNFSQILPDPSKPSKRSFIEDLLFNKVTLADAGFIKQYGDCLGDIAARDLICAQKFNGLTVLPPLLTDEMIAQYTSALLAGTITSGWWFGAGAALQIPFAMQMAYRFNGIGVTQNVLYENQKLIANQFNSAIGKIQDSLSSTASALGKLQDVVNQNAQALNTLVKQLSSNFGAISSVLNDILSRLDPPEAEVQIDRLITGRLQSLQTYVTQQLIRAAEIRWSANLAATKMSECVLGQSKRVDFCGKGYHLMSFPQSAPHGVVFLHVTYVPAQEKNFTTAPAICHDGKAHFPREGVFVSNGTHWFVTQRNFYEPQIITTDNTFVSGNCDVVIGIVNNTVYDPLQPELDSFKEELDKYFKNHTSPDVDLGDISGINASVVNIQKEIDRLNEVAKNLNESLIDLQELGKYEQYIKGGGGSDIIKLLNEQVNKEMQSSNLYMSMSSWCYTHSLDGAGLFLFDHAAEEYEHAKKLIIFLNENNVPVQLTSISAPEHKFEGLTQIFQKAYEHEQHISESINNIVDHAIKSKDHATFNFLQWYVAEQHEEEVLFKDILDKIELIGNENHGLYLADQYVKGIAKSRKS

SEQ ID NO: 4826 - protein, 1373 aa, Artificial Sequence
  SARS-CoV-2/pangolin/Guangxi/P4L/2017__EPI_ISL_410538 spike protein (1-1205)(K980P_V981P_T881W_A1014W) Ferritin construct
MFVFLFVLPLVSSQCVNLTTRTGIPPGYTNSSTRGVYYPDKVFRSSILHLTQDLFLPFFSNVTWFNTINYQGGFKKFDNPVLPFNDGVYFASTEKSNIIRGWIFGTTLDARTQSLLIVNNATNVVIKVCEFQFCTDPFLGVYYHNNNKTWVENEFRVYSSANNCTFEYISQPFLMDLEGKQGNFKNLREFVFKNVDGYFKIYSKHTPIDLVRDLPRGFAALEPLVDLPIGINITRFQTLLALHRSYLTPGNLESGWTTGAAAYYVGYLQQRTFLLSYNQNGTITDAVDCSLDPLSETKCTLKSLTVEKGIYQTSNFRVQPTISIVRFPNITNLCPFGEVFNASKFASVYAWNRKRISNCVADYSVLYNSTSFSTFKCYGVSPTKLNDLCFTNVYADSFVVKGDEVRQIAPGQTGVIADYNYKLPDDFTGCVIAWNSVKQDALTGGNYGYLYRLFRKSKLKPFERDISTEIYQAGSTPCNGQVGLNCYYPLERYGFHPTTGVNYQPFRVVVLSFELLNGPATVCGPKLSTTLVKDKCVNFNFNGLTGTGVLTTSKKQFLPFQQFGRDISDTTDAVRDPQTLEILDITPCSFGGVSVITPGTNTSNQVAVLYQDVNCTEVPMAIHAEQLTPAWRVYSAGANVFQTRAGCLVGAEHVNNSYECDIPVGAGICASYHSMSSLRSVNQRSIIAYTMSLGAENSVAYSNNSIAIPTNFTISVTTEILPVSMTKTSVDCTMYICGDSIECSNLLLQYGSFCTQLNRALTGIAVEQDKNTQEVFAQVKQIYKTPPIKDFGGFNFSQILPDPSKPSKRSFIEDLLFNKVTLADAGFIKQYGDCLGDIAARDLICAQKFNGLTVLPPLLTDEMIAQYTSALLAGTITSGWWFGAGAALQIPFAMQMAYRFNGIGVTQNVLYENQKLIANQFNSAIGKIQDSLSSTASALGKLQDVVNQNAQALNTLVKQLSSNFGAISSVLNDILSRLDPPEAEVQIDRLITGRLQSLQTYVTQQLIRAAEIRWSANLAATKMSECVLGQSKRVDFCGKGYHLMSFPQSAPHGVVFLHVTYVPAQEKNFTTAPAICHEGKAHFPREGVFVSNGTHWFITQRNFYEPQIITTDNTFVSGSCDVVIGIVNNTVYDPLQPELDSFKEELDKYFKNHTSPDVDLGDISGINASVVNIQKEIDRLNEVAKNLNESPIDLQELGKYEQYIKGGGGSDIIKLLNEQVNKEMQSSNLYMSMSSWCYTHSLDGAGLFLFDHAAEEYEHAKKLIIFLNENNVPVQLTSISAPEHKFEGLTQIFQKAYEHEQHISESINNIVDHAIKSKDHATFNFLQWYVAEQHEEEVLFKDILDKIELIGNENHGLYLADQYVKGIAKSRKS

SEQ ID NO: 4827 - protein, 1373 aa, Artificial Sequence
  SARS-CoV-2/pangolin/Guangxi/P5L/2017__EPI_ISL_410540 spike protein (1-1205)(K980P_V981P_T881W_A1014W) Ferritin construct
MFVFLFVLPLVSSQCVNLTTRTGIPPGYTNSSTRGVYYPDKVFRSSILHLTQDLFLPFFSNVTWFNTINYQGGFKKFDNPVLPFNDGVYFASTEKSNIIRGWIFGTTLDARTQSLLIVNNATNVVIKVCEFQFCTDPFLGVYYHNNNKTWVENEFRVYSSANNCTFEYISQPFLMDLEGKQGNFKNLREFVFKNVDGYFKIYSKHTPIDLVRDLPRGFAALEPLVDLPIGINITRFQTLLALHRSYLTPGKLESGWTTGAAAYYVGYLQQRTFLLSYNQNGTITDAVDCSLDPLSETKCTLKSLTVEKGIYQTSNFRVQPTISIVRFPNITNLCPFGEVFNASKFASVYAWNRKRISNCVADYSVLYNSTSFSTFKCYGVSPTKLNDLCFTNVYADSFVVKGDEVRQIAPGQTGVIADYNYKLPDDFTGCVIAWNSVKQDALTGGNYGYLYRLFRKSKLKPFERDISTEIYQAGSTPCNGQVGLNCYYPLERYGFHPTTGVNYQPFRVVVLSFELLNGPATVCGPKLSTTLVKDKCVNFNFNGLTGTGVLTTSKKQFLPFQQFGRDISDTTDAVRDPQTLEILDITPCSFGGVSVITPGTNTSNQVAVLYQDVNCTEVPMAIHAEQLTPAWRVYSAGANVFQTRAGCLVGAEHVNNSYECDIPVGAGICASYHSMSSFRSVNQRSIIAYTMSLGAENSVAYSNNSIAIPTNFTISVTTEILPVSMTKTSVDCTMYICGDSIECSNLLLQYGSFCTQLNRALTGIAVEQDKNTQEVFAQVKQIYKTPPIKDFGGFNFSQILPDPSKPSKRSFIEDLLFNKVTLADAGFIKQYGDCLGDIAARDLICAQKFNGLTVLPPLLTDEMIAQYTSALLAGTITSGWWFGAGAALQIPFAMQMAYRFNGIGVTQNVLYENQKLIANQFNSAIGKIQDSLSSTASALGKLQDVVNQNAQALNTLVKQLSSNFGAISSVLNDILSRLDPPEAEVQIDRLITGRLQSLQTYVTQQLIRAAEIRWSANLAATKMSECVLGQSKRVDFCGKGYHLMSFPQSAPHGVVFLHVTYVPAQEKNFTTAPAICHEGKAHFPREGVFVSNGTHWFITQRNFYEPQIITTDNTFVSGSCDVVIGIVNNTVYDPLQPELDSFKEELDKYFKNHTSPDVDLGDISGINASVVNIQKEIDRLNEVAKNLNESLIDLQELGKYEQYIKGGGGSDIIKLLNEQVNKEMQSSNLYMSMSSWCYTHSLDGAGLFLFDHAAEEYEHAKKLIIFLNENNVPVQLTSISAPEHKFEGLTQIFQKAYEHEQHISESINNIVDHAIKSKDHATFNFLQWYVAEQHEEEVLFKDILDKIELIGNENHGLYLADQYVKGIAKSRKS

SEQ ID NO: 4828 - protein, 1373 aa, Artificial Sequence
  SARS-CoV-2/pangolin/Guangxi/P5E/2017__EPI_ISL_410541 spike protein (1-1205)(K980P_V981P_T881W_A1014W) Ferritin construct
MFVFLFVLPLVSSQCVNLTTRTGIPPGYTNSSTRGVYYPDKVFRSSILHLTQDLFLPFFSNVTWFNTITYQGGSKKFDNPVLPFNDGVYFASTEKSNIIRGWIFGTTLDARTQSLLIVNNATNVVIKVCEFQFCTDPFLGVYYHNNNKTWVENEFRVYSSANNCTFEYISQPFLMDLEGKQGNFKNLREFVFKNVDGYFKIYSKHTPIDLVRDLPRGFAALEPLVDLPIGINITRFQTLLALHRSYLTPGKLESGWTTGAAAYYVGYLQQRTFLLSYNQNGTITDAVDCSLDPLSETKCTLKSLTVEKGIYQTSNFRVQPTISIVRFPNITNLCPFGEVFNASKFASVYAWNRKRISNCVADYSVLYNSTSFSTFKCYGVSPTKLNDLCFTNVYADSFVVKGDEVRQIAPGQTGVIADYNYKLPDDFTGCVIAWNSVKQDALTGDNYGYLYRLFRKSKLKPFERDISTEIYQAGSTPCNGQVGLNCYYPLERYGFHPTTGVNYQPFRVVVLSFELLNGPATVCGPKLSTTLVKDKCVNFNFNGLTGTGVLTTSKKQFLPFQQFGRDISDTTDAVRDPQTLEILDITPCSFGGVSVITPGTNTSNQVAVLYQDVNCTEVPMAIHAEQLTPAWRVYSAGANVFQTRAGCLVGAEHVNNSYECDIPVGAGICASYHSMSSFRSVNQRSIIAYTMSLGAENSVAYSNNSIAIPTNFTISVTTEILPVSMTKTSVDCTMYICGDSIECSNLLLQYGSFCTQLNRALTGIAVEQDKNTQEVFAQVKQIYKTPPIKDFGGFNFSQILPDPSKPSKRSFIEDLLFNKVTLADAGFIKQYGDCLGDIAARDLICAQKFNGLTVLPPLLTDEMIAQYTSALLAGTITSGWWFGAGAALQIPFAMQMAYRFNGIGVTQNVLYENQKLIANQFNSAIGKIQDSLSSTASALGKLQDVVNQNAQALNTLVKQLSSNFGAISSVLNDILSRLDPPEAEVQIDRLITGRLQSLQTYVTQQLIRAAEIRWSANLAATKMSECVLGQSKRVDFCGKGYHLMSFPQSAPHGVVFLHVTYVPAQEKNFTTAPAICHEGKAHFPREGVFVSNGTHWFITQRNFYEPQIITTDNTFVSGSCDVVIGIVNNTVYDPLQPELDSFKEELDKYFKNHTSPDVDLGDISGINASVVNIQKEIDRLNEVAKNLNESLIDLQELGKYEQYIKGGGGSDIIKLLNEQVNKEMQSSNLYMSMSSWCYTHSLDGAGLFLFDHAAEEYEHAKKLIIFLNENNVPVQLTSISAPEHKFEGLTQIFQKAYEHEQHISESINNIVDHAIKSKDHATFNFLQWYVAEQHEEEVLFKDILDKIELIGNENHGLYLADQYVKGIAKSRKS

SEQ ID NO: 4829 - protein, 1371 aa, Artificial Sequence
  SARS-CoV-2/pangolin/Guangxi/P1E/2017__EPI_ISL_410539 spike protein (1-1203)(K978P_V979P_T879W_A1012W) Ferritin construct
MFVFLFVLPLVSSQCVNLTTRTGIQPGYTNSSTRGVYYPDKVFRSSILHLTQDLFLPFFSNVTWFNTINYQGGFKKFDNPVLPFNDGVYFASTEKSNIIRGWIFGTTLDARTQSLLIVNNATNVVIKVCEFQFCTDPFLGVYYHNNNKTWVENEFRVYSSANNCTFEYISQPFLMDLEGKQGNFKNLREFVFKNVDGYFKIYSKHTPIDLVRDLPRGFAALEPLVDLPIGINITRFQTLLALHRSYLTPGKLESGWTTGAAAYYVGYLQQRTFLLSYNQNGTITDAVDCSLDPLSETKCTLKSLTVEKGIYQTSNFRVQPTISIVRFPNITNLCPFGEVFNASKFASVYAWNRKRISNCVADYSVLYNSTSFSTFKCYGVSPTKLNDLCFTNVYADSFVVKGDEVRQIAPGQTGVIADYNYKLPDDFTGCVIAWNSVKQDALTGGNYLYRLFRKSKLKPFERDISTEIYQAGSTPCNGQVGLNCYYPLERYGFHPTTGVNYQPFRVVVLSFELLNGPATVCGPKLSTTLVKDKCVNFNFNGLTGTGVLTTSKKQFLPFQQFGRDISDTTDAVRDPQTLEILDITPCSFGGVSVITPGTNTSNQVAVLYQDVNCTEVPMAIHAEQLTPAWRVYSAGANVFQTRAGCLVGAEHVNNSYECDIPVGAGICASYHSMSSLRSVNQRSIIAYTMSLGAENSVAYSNNSIAIPTNFTISVTTEILPVSMTKTSVDCTMYICGDSIECSNLLLQYGSFCTQLNRALTGIAVEQDKNTQEVFAQVKQIYKTPPIKDFGGFNFSQILPDPSKPSKRSFIEDLLFNKVTLADAGFIKQYGDCLGDIAARDLICAQKFNGLTVLPPLLTDEMIAQYTSALLAGTITSGWWFGAGAALQIPFAMQMAYRFNGIGVTQNVLYENQKLIANQFNSAIGKIQDSLSSTASALGKLQDVVNQNAQALNTLVKQLSSNFGAISSVLNDILSRLDPPEAEVQIDRLITGRLQSLQTYVTQQLIRAAEIRWSANLAATKMSECVLGQSKRVDFCGKGYHLMSFPQSAPHGVVFLHVTYVPAQEKNFTTAPAICHEGKAHFPREGVFVSNGTHWFITQRNFYEPQIITTDNTFVSGSCDVVIGIVNNTVYDPLQPELDSFKEELDKYFKNHTSPDVDLGDISGINASVVNIQKEIDRLNEVAKNLNESLIDLQELGKYEQYIKGGGGSDIIKLLNEQVNKEMQSSNLYMSMSSWCYTHSLDGAGLFLFDHAAEEYEHAKKLIIFLNENNVPVQLTSISAPEHKFEGLTQIFQKAYEHEQHISESINNIVDHAIKSKDHATFNFLQWYVAEQHEEEVLFKDILDKIELIGNENHGLYLADQYVKGIAKSRKS

SEQ ID NO: 4830 - protein, 1379 aa, Artificial Sequence
  SARS-CoV-2/Wuhan/WIV05/2019__EPI_ISL_402128 spike protein (1-1211)(K986P_V987P_P1069F) Ferritin construct
MFVFLVLLPLVSSQCVNLTTRTQLPPAYTNSFTRGVYYPDKVFRSSVLHSTQDLFLPFFSNVTWFHAIHVSGTNGTKRFDNPVLPFNDGVYFASTEKSNIIRGWIFGTTLDSKTQSLLIVNNATNVVIKVCEFQFCNDPFLGVYYHKNNKSWMESEFRVYSSANNCTFEYVSQPFLMDLEGKQGNFKNLREFVFKNIDGYFKIYSKHTPINLVRDLPQGFSALEPLVDLPIGINITRFQTLLALHRSYLTPGDSSSGWTAGAAAYYVGYLQPRTFLLKYNENGTITDAVDCALDPLSETKCTLKSFTVEKGIYQTSNFRVQPTESIVRFPNITNLCPFGEVFNATRFASVYAWNRKRISNCVADYSVLYNSASFSTFKCYGVSPTKLNDLCFTNVYADSFVIRGDEVRQIAPGQTGKIADYNYKLPDDFTGCVIAWNSNNLDSKVGGNYNYLYRLFRKSNLKPFERDISTEIYQAGSTPCNGVEGFNCYFPLQSYGFQPTNGVGYQPYRVVVLSFELLHAPATVCGPKKSTNLVKNKCVNFNFNGLTGTGVLTESNKKFLPFQQFGRDIADTTDAVRDPQTLEILDITPCSFGGVSVITPGTNTSNQVAVLYQDVNCTEVPVAIHADQLTPTWRVYSTGSNVFQTRAGCLIGAEHVNNSYECDIPIGAGICASYQTQTNSPRRARSVASQSIIAYTMSLGAENSVAYSNNSIAIPTNFTISVTTEILPVSMTKTSVDCTMYICGDSTECSNLLLQYGSFCTQLNRALTGIAVEQDKNTQEVFAQVKQIYKTPPIKDFGGFNFSQILPDPSKPSKRSFIEDLLFNKVTLADAGFIKQYGDCLGDIAARDLICAQKFNGLTVLPPLLTDEMIAQYTSALLAGTITSGWTFGAGAALQIPFAMQMAYRFNGIGVTQNVLYENQKLIANQFNSAIGKIQDSLSSTASALGKLQDVVNQNAQALNTLVKQLSSNFGAISSVLNDILSRLDPPEAEVQIDRLITGRLQSLQTYVTQQLIRAAEIRASANLAATKMSECVLGQSKRVDFCGKGYHLMSFPQSAPHGVVFLHVTYVFAQEKNFTTAPAICHDGKAHFPREGVFVSNGTHWFVTQRNFYEPQIITTDNTFVSGNCDVVIGIVNNTVYDPLQPELDSFKEELDKYFKNHTSPDVDLGDISGINASVVNIQKEIDRLNEVAKNLNESLIDLQELGKYEQYIKGGGGSDIIKLLNEQVNKEMQSSNLYMSMSSWCYTHSLDGAGLFLFDHAAEEYEHAKKLIIFLNENNVPVQLTSISAPEHKFEGLTQIFQKAYEHEQHISESINNIVDHAIKSKDHATFNFLQWYVAEQHEEEVLFKDILDKIELIGNENHGLYLADQYVKGIAKSRKS

SEQ ID NO: 4831 - protein, 1375 aa, Artificial Sequence
  SARS-CoV-2/bat/Yunnan/RaTG13/2013__EPI_ISL_402131 spike protein (1-1207)(K982P_V983P_P1065F) Ferritin construct
MFVFLVLLPLVSSQCVNLTTRTQLPPAYTNSSTRGVYYPDKVFRSSVLHLTQDLFLPFFSNVTWFHAIHVSGTNGIKRFDNPVLPFNDGVYFASTEKSNIIRGWIFGTTLDSKTQSLLIVNNATNVVIKVCEFQFCNDPFLGVYYHKNNKSWMESEFRVYSSANNCTFEYVSQPFLMDLEGKQGNFKNLREFVFKNIDGYFKIYSKHTPINLVRDLPPGFSALEPLVDLPIGINITRFQTLLALHRSYLTPGDSSSGWTAGAAAYYVGYLQPRTFLLKYNENGTITDAVDCALDPLSETKCTLKSFTVEKGIYQTSNFRVQPTDSIVRFPNITNLCPFGEVFNATTFASVYAWNRKRISNCVADYSVLYNSTSFSTFKCYGVSPTKLNDLCFTNVYADSFVITGDEVRQIAPGQTGKIADYNYKLPDDFTGCVIAWNSKHIDAKEGGNFNYLYRLFRKANLKPFERDISTEIYQAGSKPCNGQTGLNCYYPLYRYGFYPTDGVGHQPYRVVVLSFELLNAPATVCGPKKSTNLVKNKCVNFNFNGLTGTGVLTESNKKFLPFQQFGRDIADTTDAVRDPQTLEILDITPCSFGGVSVITPGTNASNQVAVLYQDVNCTEVPVAIHADQLTPTWRVYSTGSNVFQTRAGCLIGAEHVNNSYECDIPIGAGICASYQTQTNSRSVASQSIIAYTMSLGAENSVAYSNNSIAIPTNFTISVTTEILPVSMTKTSVDCTMYICGDSTECSNLLLQYGSFCTQLNRALTGIAVEQDKNTQEVFAQVKQIYKTPPIKDFGGFNFSQILPDPSKPSKRSFIEDLLFNKVTLADAGFIKQYGDCLGDIAARDLICAQKFNGLTVLPPLLTDEMIAQYTSALLAGTITSGWTFGAGAALQIPFAMQMAYRFNGIGVTQNVLYENQKLIANQFNSAIGKIQDSLSSTASALGKLQDVVNQNAQALNTLVKQLSSNFGAISSVLNDILSRLDPPEAEVQIDRLITGRLQSLQTYVTQQLIRAAEIRASANLAATKMSECVLGQSKRVDFCGKGYHLMSFPQSAPHGVVFLHVTYVFAQEKNFTTAPAICHDGKAHFPREGVFVSNGTHWFVTQRNFYEPQIITTDNTFVSGSCDVVIGIVNNTVYDPLQPELDSFKEELDKYFKNHTSPDVDLGDISGINASVVNIQKEIDRLNEVAKNLNESLIDLQELGKYEQYIKGGGGSDIIKLLNEQVNKEMQSSNLYMSMSSWCYTHSLDGAGLFLFDHAAEEYEHAKKLIIFLNENNVPVQLTSISAPEHKFEGLTQIFQKAYEHEQHISESINNIVDHAIKSKDHATFNFLQWYVAEQHEEEVLFKDILDKIELIGNENHGLYLADQYVKGIAKSRKS

SEQ ID NO: 4832 - protein, 1379 aa, Artificial Sequence
  SARS-CoV-2/Wuhan/HBCDC-HB-01/2019__EPI_ISL_402132 spike protein (1-1211)(K986P_V987P_P1069F) Ferritin construct
MFVFLVLLPLVSSQCVNLTTRTQLPPAYTNSITRGVYYPDKVFRSSVLHSTQDLFLPFFSNVTWFHAIHVSGTNGTKRFDNPVLPFNDGVYFASTEKSNIIRGWIFGTTLDSKTQSLLIVNNATNVVIKVCEFQFCNDPFLGVYYHKNNKSWMESEFRVYSSANNCTFEYVSQPFLMDLEGKQGNFKNLREFVFKNIDGYFKIYSKHTPINLVRDLPQGFSALEPLVDLPIGINITRFQTLLALHRSYLTPGDSSSGWTAGAAAYYVGYLQPRTFLLKYNENGTITDAVDCALDPLSETKCTLKSFTVEKGIYQTSNFRVQPTESIVRFPNITNLCPFGEVFNATRFASVYAWNRKRISNCVADYSVLYNSASFSTFKCYGVSPTKLNDLCFTNVYADSFVIRGDEVRQIAPGQTGKIADYNYKLPDDFTGCVIAWNSNNLDSKVGGNYNYLYRLFRKSNLKPFERDISTEIYQAGSTPCNGVEGFNCYFPLQSYGFQPTNGVGYQPYRVVVLSFELLHAPATVCGPKKSTNLVKNKCVNFNFNGLTGTGVLTESNKKFLPFQQFGRDIADTTDAVRDPQTLEILDITPCSFGGVSVITPGTNTSNQVAVLYQDVNCTEVPVAIHADQLTPTWRVYSTGSNVFQTRAGCLIGAEHVNNSYECDIPIGAGICASYQTQTNSPRRARSVASQSIIAYTMSLGAENSVAYSNNSIAIPTNFTISVTTEILPVSMTKTSVDCTMYICGDSTECSNLLLQYGSFCTQLNRALTGIAVEQDKNTQEVFAQVKQIYKTPPIKDFGGFNFSQILPDPSKPSKRSFIEDLLFNKVTLADAGFIKQYGDCLGDIAARDLICAQKFNGLTVLPPLLTDEMIAQYTSALLAGTITSGWTFGAGAALQIPFAMQMAYRFNGIGVTQNVLYENQKLIANQFNSAIGKIQDSLSSTASALGKLQDVVNQNAQALNTLVKQLSSNFGAISSVLNDILSRLDPPEAEVQIDRLITGRLQSLQTYVTQQLIRAAEIRASANLAATKMSECVLGQSKRVDFCGKGYHLMSFPQSAPHGVVFLHVTYVFAQEKNFTTAPAICHDGKAHFPREGVFVSNGTHWFVTQRNFYEPQIITTDNTFVSGNCDVVIGIVNNTVYDPLQPELDSFKEELDKYFKNHTSPDVDLGDISGINASVVNIQKEIDRLNEVAKNLNESLIDLQELGKYEQYIKGGGGSDIIKLLNEQVNKEMQSSNLYMSMSSWCYTHSLDGAGLFLFDHAAEEYEHAKKLIIFLNENNVPVQLTSISAPEHKFEGLTQIFQKAYEHEQHISESINNIVDHAIKSKDHATFNFLQWYVAEQHEEEVLFKDILDKIELIGNENHGLYLADQYVKGIAKSRKS

SEQ ID NO: 4833 - protein, 1379 aa, Artificial Sequence
  SARS-CoV-2/Guangdong/20SF028/2020__EPI_ISL_403936 spike protein (1-1211)(K986P_V987P_P1069F) Ferritin construct
MFVFLVLLPLVSSQCVNLTTRTQLPPAYTNSFTRGVYYPDKVFRSSVLYSTQDLFLPFFSNVTWFHAIHVSGTNGTKRFDNPVLPFNDGVYFASTEKSNIIRGWIFGTTLDSKTQSLLIVNNATNVVIKVCEFQFCNDPFLGVYYHKNNKSWMESEFRVYSSANNCTFEYVSQPFLMDLEGKQGNFKNLREFVFKNIDGYFKIYSKHTPINLVRDLPQGFSALEPLVDLPIGINITRFQTLLALHRSYLTPGDSSSGWTAGAAAYYVGYLQPRTFLLKYNENGTITDAVDCALDPLSETKCTLKSFTVEKGIYQTSNFRVQPTESIVRFPNITNLCPFGEVFNATRFASVYAWNRKRISNCVADYSVLYNSASFSTFKCYGVSPTKLNDLCFTNVYADSFVIRGDEVRQIAPGQTGKIADYNYKLPDDFTGCVIAWNSNNLDSKVGGNYNYLYRLFRKSNLKPFERDISTEIYQAGSTPCNGVEGFNCYFPLQSYGFQPTNGVGYQPYRVVVLSFELLHAPATVCGPKKSTNLVKNKCVNFNFNGLTGTGVLTESNKKFLPFQQFGRDIADTTDAVRDPQTLEILDITPCSFGGVSVITPGTNTSNQVAVLYQDVNCTEVPVAIHADQLTPTWRVYSTGSNVFQTRAGCLIGAEHVNNSYECDIPIGAGICASYQTQTNSPRRARSVASQSIIAYTMSLGAENSVAYSNNSIAIPTNFTISVTTEILPVSMTKTSVDCTMYICGDSTECSNLLLQYGSFCTQLNRALTGIAVEQDKNTQEVFAQVKQIYKTPPIKDFGGFNFSQILPDPSKPSKRSFIEDLLFNKVTLADAGFIKQYGDCLGDIAARDLICAQKFNGLTVLPPLLTDEMIAQYTSALLAGTITSGWTFGAGAALQIPFAMQMAYRFNGIGVTQNVLYENQKLIANQFNSAIGKIQDSLSSTASALGKLQDVVNQNAQALNTLVKQLSSNFGAISSVLNDILSRLDPPEAEVQIDRLITGRLQSLQTYVTQQLIRAAEIRASANLAATKMSECVLGQSKRVDFCGKGYHLMSFPQSAPHGVVFLHVTYVFAQEKNFTTAPAICHDGKAHFPREGVFVSNGTHWFVTQRNFYEPQIITTDNTFVSGNCDVVIGIVNNTVYDPLQPELDSFKEELDKYFKNHTSPDVDLGDISGINASVVNIQKEIDRLNEVAKNLNESLIDLQELGKYEQYIKGGGGSDIIKLLNEQVNKEMQSSNLYMSMSSWCYTHSLDGAGLFLFDHAAEEYEHAKKLIIFLNENNVPVQLTSISAPEHKFEGLTQIFQKAYEHEQHISESINNIVDHAIKSKDHATFNFLQWYVAEQHEEEVLFKDILDKIELIGNENHGLYLADQYVKGIAKSRKS

SEQ ID NO: 4834 - protein, 1379 aa, Artificial Sequence
  SARS-CoV-2/Shenzhen/SZTH-001/2020__EPI_ISL_406592 spike protein (1-1211)(K986P_V987P_P1069F) Ferritin construct
MFVFLVLLPLVSSQCVNLTTRTQLPPAYTNSFTRGVYYPDKVFRSSVLHSTQDLFLPFFSNVTWFHAIHVSGTNGTKRFDNPVLPFNDGVYFASTEKSNIIRGWIFGTTLDSKTQSLLIVNNATNVVIKVCEFQFCNDPFLGVYYHKNNKSWMESEFRVYSSANNCTFEYVSQPFLMDLEGKQGNFKNLREFVFKNIDGYFKIYSKHTPINLVRDLPQGFSALEPLVDLPIGINITRFQTLLALHRSYLTPGDSSSGWTAGAAAYYVGYLQPRTFLLKYNENGTITDAVDCALDPLSETKCTLKSFTVEKGIYQTSNFRVQPTESIVRFPNITNLCPFGEVFNATRFASVYAWNRKRISNCVADYSVLYNSASFSTFKCYGVSPTKLNDLCFTNVYADSFVIRGDEVRQIAPGQTGKIADYNYKLPDDFTGCVIAWNSNNLDSKVGGNYNYLYRLFRKSNLKPFERDISTEIYQAGSTPCNGVEGFNCYFPLQSYGFQPTNGVGYQPYRVVVLSFELLHAPATVCGPKKSTNLVKNKCVNFNFNGLTGTGVLTESNKKFLPFQQFGRDIADTTDAVRDPQTLEILDITPCSFGGVSVITPGTNTSNQVAVLYQDVNCTEVPVAIHADQLTPTWRVYSTGSNVFQTRAGCLIGAEHVNNSYECDIPIGAGICASYQTQTNSPRRARSVASQSIIAYTMSLGAENSVAYSNNSIAIPTNFTISVTTEILPVSMTKTSVDCTMYICGDSTECSNLLLQYGSFCTQLNRALTGIAVEQDKNTQEVFAQVKQIYKTPPIKDFGGFNFSQILPDPSKPSKRSFIEDLLFNKVTLADAGFIKQYGDCLGDIAARDLICAQKFNGLTVLPPLLTDEMIAQYTSALLAGTITSGWTFGAGAALQIPFAMQMAYRFNGIGVTQNVLYENQKLIANQFNSAIGKIQDSLSSTASALGKLQDVVNQNAQALNTLVKQLSSNFGAISSVLNDILSRLDPPEAEVQIDRLITGRLQSLQTYVTQQLIRAAEIRASANLAATKMSECVLGQSKRVDFCGKGYHLMSFPQSAPHGVVFLHVTYVFAQEKNFTTAPAICHDGKAHFPREGVFVSNGTHWFVTQRNFYEPQIITTDNTFVSGNCDVLIGIVNNTVYDPLQPELDSFKEELDKYFKNHTSPDVDLGDISGINASVVNIQKEIDRLNEVAKNLNESLIDLQELGKYEQYIKGGGGSDIIKLLNEQVNKEMQSSNLYMSMSSWCYTHSLDGAGLFLFDHAAEEYEHAKKLIIFLNENNVPVQLTSISAPEHKFEGLTQIFQKAYEHEQHISESINNIVDHAIKSKDHATFNFLQWYVAEQHEEEVLFKDILDKIELIGNENHGLYLADQYVKGIAKSRKS

SEQ ID NO: 4835 - protein, 1379 aa, Artificial Sequence
  SARS-CoV-2/Shenzhen/SZTH-004/2020__EPI_ISL_406595 spike protein (1-1211)(K986P_V987P_P1069F) Ferritin construct
MFVFLVLLPLVSSQCVNLTTRTQLPPAYTNSFTRGVYYPDKVFRSSVLHSTQDLFLPFFSNVTWFHAIHVSGTNGTKRFDNPVLPFNDGVYFASTEKSNIIRGWIFGTTLDSKTQSLLIVNNATNVVIKVCEFQFCNDPFLGVYYHKNNKSWMESEFRVYSSANNCTFEYVSQPFLMDLEGKQGNFKNLREFVFKNIDGYFKIYSKHTPINLVRDLPQGFSALEPLVDLPIGINITRFQTLLALHRSYLTPGDSSSGWTAGAAAYYVGYLQPRTFLLKYNENGTITDAVDCALDPLSETKCTLKSFTVEKGIYQTSNFRVQPTESIVRFPNITNLCPFGEVFNATRFASVYAWDRKRISNCVAYYSVLYNSASFSTFKCYGVSPTKLNDLCFTNVYADSFVIRGDEVRQIAPGQTGKIADYNYKLPDDFTGCVIAWNSNNLDSKVGGNYNYLYRLFRKSNLKPFERDISTEIYQAGSTPCNGVEGFNCYFPLQSYGFQPTNGVGYQPYRVVVLSFELLHAPATVCGPKKSTNLVKNKCVNFNFNGLTGTGVLTESNKKFLPFQQFGRDIADTTDAVRDPQTLEILDITPCSFGGVSVITPGTNTSNQVAVLYQDVNCTEVPVAIHADQLTPTWRVYSTGSNVFQTRAGCLIGAEHVNNSYECDIPIGAGICASYQTQTNSPRRARSVASQSIIAYTMSLGAENSVAYSNNSIAIPTNFTISVTTEILPVSMTKTSVDCTMYICGDSTECSNLLLQYGSFCTQLNRALTGIAVEQDKNTQEVFAQVKQIYKTPPIKDFGGFNFSQILPDPSKPSKRSFIEDLLFNKVTLADAGFIKQYGDCLGDIAARDLICAQKFNGLTVLPPLLTDEMIAQYTSALLAGTITSGWTFGAGAALQIPFAMQMAYRFNGIGVTQNVLYENQKLIANQFNSAIGKIQDSLSSTASALGKLQDVVNQNAQALNTLVKQLSSNFGAISSVLNDILSRLDPPEAEVQIDRLITGRLQSLQTYVTQQLIRAAEIRASANLAATKMSECVLGQSKRVDFCGKGYHLMSFPQSAPHGVVFLHVTYVFAQEKNFTTAPAICHDGKAHFPREGVFVSNGTHWFVTQRNFYEPQIITTDNTFVSGNCDVVIGIVNNTVYDPLQPELDSFKEELDKYFKNHTSPDVDLGDISGINASVVNIQKEIDRLNEVAKNLNESLIDLQELGKYEQYIKGGGGSDIIKLLNEQVNKEMQSSNLYMSMSSWCYTHSLDGAGLFLFDHAAEEYEHAKKLIIFLNENNVPVQLTSISAPEHKFEGLTQIFQKAYEHEQHISESINNIVDHAIKSKDHATFNFLQWYVAEQHEEEVLFKDILDKIELIGNENHGLYLADQYVKGIAKSRKS

SEQ ID NO: 4836 - protein, 1379 aa, Artificial Sequence
  SARS-CoV-2/France/IDF0372/2020__EPI_ISL_406596 spike protein (1-1211)(K986P_V987P_P1069F) Ferritin construct
MFVFLVLLPLVSSQCVNLTTRTQLPPAYTNSFTRGVYYPDKVFRSSVLHSTQDLFLPFFSNVTWFHAIHVSGTNGTKRFDNPVLPFNDGVYFASTEKSNIIRGWIFGTTLDSKTQSLLIVNNATNVVIKVCEFQFCNDPFLGVYYHKNNKSWMESEFRVYSSANNCTFEYVSQPFLMDLEGKQGNFKNLREFVFKNIDGYFKIYSKHTPINLVRDLPQGFSALEPLVDLPIGINITRFQTLLALHRSYLTPGDSSSGWTAGAAAYYVGYLQPRTFLLKYNENGTITDAVDCALDPLSETKCTLKSFTVEKGIYQTSNFRVQPTESIVRFPNITNLCPFGEVFNATRFASVYAWNRKRISNCVADYSFLYNSASFSTFKCYGVSPTKLNDLCFTNVYADSFVIRGDEVRQIAPGQTGKIADYNYKLPDDFTGCVIAWNSNNLDSKVGGNYNYLYRLFRKSNLKPFERDISTEIYQAGSTPCNGVEGFNCYFPLQSYGFQPTNGVGYQPYRVVVLSFELLHAPATVCGPKKSTNLVKNKCVNFNFNGLTGTGVLTESNKKFLPFQQFGRDIADTTDAVRDPQTLEILDITPCSFGGVSVITPGTNTSNQVAVLYQDVNCTEVPVAIHADQLTPTWRVYSTGSNVFQTRAGCLIGAEHVNNSYECDIPIGAGICASYQTQTNSPRRARSVASQSIIAYTMSLGAENSVAYSNNSIAIPTNFTISVTTEILPVSMTKTSVDCTMYICGDSTECSNLLLQYGSFCTQLNRALTGIAVEQDKNTQEVFAQVKQIYKTPPIKDFGGFNFSQILPDPSKPSKRSFIEDLLFNKVTLADAGFIKQYGDCLGDIAARDLICAQKFNGLTVLPPLLTDEMIAQYTSALLAGTITSGWTFGAGAALQIPFAMQMAYRFNGIGVTQNVLYENQKLIANQFNSAIGKIQDSLSSTASALGKLQDVVNQNAQALNTLVKQLSSNFGAISSVLNDILSRLDPPEAEVQIDRLITGRLQSLQTYVTQQLIRAAEIRASANLAATKMSECVLGQSKRVDFCGKGYHLMSFPQSAPHGVVFLHVTYVFAQEKNFTTAPAICHDGKAHFPREGVFVSNGTHWFVTQRNFYEPQIITTDNTFVSGNCDVVIGIVNNTVYDPLQPELDSFKEELDKYFKNHTSPDVDLGDISGINASVVNIQKEIDRLNEVAKNLNESLIDLQELGKYEQYIKGGGGSDIIKLLNEQVNKEMQSSNLYMSMSSWCYTHSLDGAGLFLFDHAAEEYEHAKKLIIFLNENNVPVQLTSISAPEHKFEGLTQIFQKAYEHEQHISESINNIVDHAIKSKDHATFNFLQWYVAEQHEEEVLFKDILDKIELIGNENHGLYLADQYVKGIAKSRKS

SEQ ID NO: 4837 - protein, 1379 aa, Artificial Sequence
  SARS-CoV-2/Australia/VIC01/2020__EPI_ISL_406844 spike protein (1-1211)(K986P_V987P_P1069F) Ferritin construct
MFVFLVLLPLVSSQCVNLTTRTQLPPAYTNSFTRGVYYPDKVFRSSVLHSTQDLFLPFFSNVTWFHAIHVSGTNGTKRFDNPVLPFNDGVYFASTEKSNIIRGWIFGTTLDSKTQSLLIVNNATNVVIKVCEFQFCNDPFLGVYYHKNNKSWMESEFRVYSSANNCTFEYVSQPFLMDLEGKQGNFKNLREFVFKNIDGYFKIYSKHTPINLVRDLPQGFSALEPLVDLPIGINITRFQTLLALHRRYLTPGDSSSGWTAGAAAYYVGYLQPRTFLLKYNENGTITDAVDCALDPLSETKCTLKSFTVEKGIYQTSNFRVQPTESIVRFPNITNLCPFGEVFNATRFASVYAWNRKRISNCVADYSVLYNSASFSTFKCYGVSPTKLNDLCFTNVYADSFVIRGDEVRQIAPGQTGKIADYNYKLPDDFTGCVIAWNSNNLDSKVGGNYNYLYRLFRKSNLKPFERDISTEIYQAGSTPCNGVEGFNCYFPLQSYGFQPTNGVGYQPYRVVVLSFELLHAPATVCGPKKSTNLVKNKCVNFNFNGLTGTGVLTESNKKFLPFQQFGRDIADTTDAVRDPQTLEILDITPCSFGGVSVITPGTNTSNQVAVLYQDVNCTEVPVAIHADQLTPTWRVYSTGSNVFQTRAGCLIGAEHVNNSYECDIPIGAGICASYQTQTNSPRRARSVASQSIIAYTMSLGAENSVAYSNNSIAIPTNFTISVTTEILPVSMTKTSVDCTMYICGDSTECSNLLLQYGSFCTQLNRALTGIAVEQDKNTQEVFAQVKQIYKTPPIKDFGGFNFSQILPDPSKPSKRSFIEDLLFNKVTLADAGFIKQYGDCLGDIAARDLICAQKFNGLTVLPPLLTDEMIAQYTSALLAGTITSGWTFGAGAALQIPFAMQMAYRFNGIGVTQNVLYENQKLIANQFNSAIGKIQDSLSSTASALGKLQDVVNQNAQALNTLVKQLSSNFGAISSVLNDILSRLDPPEAEVQIDRLITGRLQSLQTYVTQQLIRAAEIRASANLAATKMSECVLGQSKRVDFCGKGYHLMSFPQSAPHGVVFLHVTYVFAQEKNFTTAPAICHDGKAHFPREGVFVSNGTHWFVTQRNFYEPQIITTDNTFVSGNCDVVIGIVNNTVYDPLQPELDSFKEELDKYFKNHTSPDVDLGDISGINASVVNIQKEIDRLNEVAKNLNESLIDLQELGKYEQYIKGGGGSDIIKLLNEQVNKEMQSSNLYMSMSSWCYTHSLDGAGLFLFDHAAEEYEHAKKLIIFLNENNVPVQLTSISAPEHKFEGLTQIFQKAYEHEQHISESINNIVDHAIKSKDHATFNFLQWYVAEQHEEEVLFKDILDKIELIGNENHGLYLADQYVKGIAKSRKS

SEQ ID NO: 4838 - protein, 1379 aa, Artificial Sequence
  SARS-CoV-2/Germany/BavPat1/2020__EPI_ISL_406862 spike protein (1-1211)(K986P_V987P_P1069F) Ferritin construct
MFVFLVLLPLVSSQCVNLTTRTQLPPAYTNSFTRGVYYPDKVFRSSVLHSTQDLFLPFFSNVTWFHAIHVSGTNGTKRFDNPVLPFNDGVYFASTEKSNIIRGWIFGTTLDSKTQSLLIVNNATNVVIKVCEFQFCNDPFLGVYYHKNNKSWMESEFRVYSSANNCTFEYVSQPFLMDLEGKQGNFKNLREFVFKNIDGYFKIYSKHTPINLVRDLPQGFSALEPLVDLPIGINITRFQTLLALHRSYLTPGDSSSGWTAGAAAYYVGYLQPRTFLLKYNENGTITDAVDCALDPLSETKCTLKSFTVEKGIYQTSNFRVQPTESIVRFPNITNLCPFGEVFNATRFASVYAWNRKRISNCVADYSVLYNSASFSTFKCYGVSPTKLNDLCFTNVYADSFVIRGDEVRQIAPGQTGKIADYNYKLPDDFTGCVIAWNSNNLDSKVGGNYNYLYRLFRKSNLKPFERDISTEIYQAGSTPCNGVEGFNCYFPLQSYGFQPTNGVGYQPYRVVVLSFELLHAPATVCGPKKSTNLVKNKCVNFNFNGLTGTGVLTESNKKFLPFQQFGRDIADTTDAVRDPQTLEILDITPCSFGGVSVITPGTNTSNQVAVLYQGVNCTEVPVAIHADQLTPTWRVYSTGSNVFQTRAGCLIGAEHVNNSYECDIPIGAGICASYQTQTNSPRRARSVASQSIIAYTMSLGAENSVAYSNNSIAIPTNFTISVTTEILPVSMTKTSVDCTMYICGDSTECSNLLLQYGSFCTQLNRALTGIAVEQDKNTQEVFAQVKQIYKTPPIKDFGGFNFSQILPDPSKPSKRSFIEDLLFNKVTLADAGFIKQYGDCLGDIAARDLICAQKFNGLTVLPPLLTDEMIAQYTSALLAGTITSGWTFGAGAALQIPFAMQMAYRFNGIGVTQNVLYENQKLIANQFNSAIGKIQDSLSSTASALGKLQDVVNQNAQALNTLVKQLSSNFGAISSVLNDILSRLDPPEAEVQIDRLITGRLQSLQTYVTQQLIRAAEIRASANLAATKMSECVLGQSKRVDFCGKGYHLMSFPQSAPHGVVFLHVTYVFAQEKNFTTAPAICHDGKAHFPREGVFVSNGTHWFVTQRNFYEPQIITTDNTFVSGNCDVVIGIVNNTVYDPLQPELDSFKEELDKYFKNHTSPDVDLGDISGINASVVNIQKEIDRLNEVAKNLNESLIDLQELGKYEQYIKGGGGSDIIKLLNEQVNKEMQSSNLYMSMSSWCYTHSLDGAGLFLFDHAAEEYEHAKKLIIFLNENNVPVQLTSISAPEHKFEGLTQIFQKAYEHEQHISESINNIVDHAIKSKDHATFNFLQWYVAEQHEEEVLFKDILDKIELIGNENHGLYLADQYVKGIAKSRKS

SEQ ID NO: 4839 - protein, 1379 aa, Artificial Sequence
  SARS-CoV-2/Wuhan/HBCDC-HB-02/2020__EPI_ISL_412978 spike protein (1-1211)(K986P_V987P_P1069F) Ferritin construct
MFVFLVLLPLVSSQCVNLTTRTQLPPAYTNSFTRGVYYPDKVFRSSVLHSTQDLFLPFFSNVTWFHAIHVSGTNGTKRFDNPVLPFNDGVYFASTEKSNIIRGWIFGTTLDSKTQSLLIVNNATNVVIKVCEFQFCNDPFLGVYYHKNNKSWMESEFRVYSSANNCTFEYVSQPFLMDLEGKQGNFKNLREFVFKNIDGYFKIYSKHTPINLVRDLPQGFSALEPLVDLPIGINITRFQTLLALHRSYLTPGDSSSGWTAGAAAYYVGYLQPRTFLLKYNENGTITDAVDCALDPLSETKCTLKSFTVEKGIYQTSNFRVQPTESIVRFPNITNLCPFGEVFNATRFASVYAWNRKRISNCVADYSVLYNSASFSTFKCYGVSPTKLNDLCFTNVYADSFVIRGDEVRQIAPGQTGKIADYNYKLPDDFTGCVIAWNSNNLDSKVGGNYNYLYRLFRKSNLKPFERDISTEIYQAGSTPCNGVEGFNCYFPLQSYGFQPTNGVGYQPYRVVVLSFELLHAPATVCGPKKSTNLVKNKCVNFNFNGLTGTGVLTESNKKFLPFQQFGRDIADTTDAVRDPQTLEILDITPCSFGGVSVITPGTNTSNQVAVLYQDVNCTEVPVAIHADQLTPTWRVYSTGSNVFQTRAGCLIGAEHVNNSYECDIPIGAGICASYQTQTNSPRRARSVASQSIIAYTMSLGAENSVAYSNNSIAIPTNFTISVTTEILPVSMTKTSVDCTMYICGDSTECSNFLLQYGSFCTQLNRALTGIAVEQDKNTQEVFAQVKQIYKTPPIKDFGGFNFSQILPDPSKPSKRSFIEDLLFNKVTLADAGFIKQYGDCLGDIAARDLICAQKFNGLTVLPPLLTDEMIAQYTSALLAGTITSGWTFGAGAALQIPFAMQMAYRFNGIGVTQNVLYENQKLIANQFNSAIGKIQDSLSSTASALGKLQDVVNQNAQALNTLVKQLSSNFGAISSVLNDILSRLDPPEAEVQIDRLITGRLQSLQTYVTQQLIRAAEIRASANLAATKMSECVLGQSKRVDFCGKGYHLMSFPQSAPHGVVFLHVTYVFAQEKNFTTAPAICHDGKAHFPREGVFVSNGTHWFVTQRNFYEPQIITTDNTFVSGNCDVVIGIVNNTVYDPLQPELDSFKEELDKYFKNHTSPDVDLGDISGINASVVNIQKEIDRLNEVAKNLNESLIDLQELGKYEQYIKGGGGSDIIKLLNEQVNKEMQSSNLYMSMSSWCYTHSLDGAGLFLFDHAAEEYEHAKKLIIFLNENNVPVQLTSISAPEHKFEGLTQIFQKAYEHEQHISESINNIVDHAIKSKDHATFNFLQWYVAEQHEEEVLFKDILDKIELIGNENHGLYLADQYVKGIAKSRKS

SEQ ID NO: 4840 - protein, 1379 aa, Artificial Sequence
  SARS-CoV-2/Australia/QLD02/2020__EPI_ISL_407896 spike protein (1-1211)(K986P_V987P_P1069F) Ferritin construct
MFVFLVLLPLVSSQCVNLTTRTQLPPAYTNSFTRGVYYPDKVFRSSVLHSTQDLFLPFFSNVTWFHAIHVSGTNGTKRFDNPVLPFNDGVYFASTEKSNIIRGWIFGTTLDSKTQSLLIVNNATNVVIKVCEFQFCNDPFLGVYYHKNNKSWMESEFRVYSSANNCTFEYVSQPFLMDLEGKQGNFKNLREFVFKNIDGYFKIYSKHTPINLVRDLPQGFSALEPLVDLPIGINITRFQTLLALHRSYLTPGDSSSGWTAGAAAYYVGYLQPRTFLLKYNENGTITDAVDCALDPLSETKCTLKSFTVEKGIYQTSNFRVQPTESIVRFPNITNLCPFGEVFNATRFASVYAWNRKRISNCVADYSVLYNSASFSTFKCYGVSPTKLNDLCFTNVYADSFVIRGDEVRQIAPGQTGKIADYNYKLPDDFTGCVIAWNSNNLDSKVGGNYNYLYRLFRKSNLKPFERDISTEIYQAGSTPCNGVEGFNCYFPLQSYGFQPTNGVGYQPYRVVVLSFELLHAPATVCGPKKSTNLVKNKCVNFNFNGLTGTGVLTESNKKFLPFQQFGRDIADTTDAVRDPQTLEILDITPCSFGGVSVITPGTNTSNQVAVLYQDVNCTEVPVAIHADQLTPTWRVYSTGSNVFQTRAGCLIGAEHVNNSYECDIPIGAGICASYQTQTNSPRRARSVASQSIIAYTMSLGAENSVAYSNNSIAIPTNFTISVTTEILPVSMTKTSVDCTMYICGDSTECSNLLLQYGSFCTQLNRALTGIAVEQDKNTQEVFAQVKQIYKTPPIKDFGGFNFSQILPDPSKPSKRSFIEDLLFNKVTLADAGFIKQYGDCLGDIAARDLICAQKFNGLTVLPPLLTDEMIAQYTSALLAGTITSGWTFGAGAALQIPFAMQMAYRFNGIGVTQNVLYENQKLIANQFNSAIGKIQDSLSSTASALGKLQDVVNQNAQALNTLVKQLSSNFGAISSVLNDILSRLDPPEAEVQIDRLITGRLQSLQTYVTQQLIRAAEIRASANLAATKMSECVLGQSKRVDFCGKGYHLMSFPQSAPHGVVFLHVTYVFAQEKNFTTAPAICHDGKAHFPREGVFVSNGTHWFVTQRNFYEPQIITTDNTFVSGNCDVVIGIVNNTVYDPLQLELDSFKEELDKYFKNHTSPDVDLGDISGINASVVNIQKEIDRLNEVAKNLNESLIDLQELGKYEQYIKGGGGSDIIKLLNEQVNKEMQSSNLYMSMSSWCYTHSLDGAGLFLFDHAAEEYEHAKKLIIFLNENNVPVQLTSISAPEHKFEGLTQIFQKAYEHEQHISESINNIVDHAIKSKDHATFNFLQWYVAEQHEEEVLFKDILDKIELIGNENHGLYLADQYVKGIAKSRKS

SEQ ID NO: 4841 - protein, 1379 aa, Artificial Sequence
  SARS-CoV-2/India/1-31/2020__EPI_ISL_413523 spike protein (1-1211)(K986P_V987P_P1069F) Ferritin construct
MFVFLVLLPLVSSQCVNLTTRTQLPPAYTNSFTRGVYYPDKVFRSSVLHSTQDLFLPFFSNVTWFHAIHVSGTNGTKRFDNPVLPFNDGVYFASTEKSNIIRGWIFGTTLDSKTQSLLIVNNATNVVIKVCEFQFCNDPFLGVYYHKNNKSWMESEFRVYSSANNCTFEYVSQPFLMDLEGKQGNFKNLREFVFKNIDGYFKIYSKHTPINLVRDLPQGFSALEPLVDLPIGINITRFQTLLALHRSYLTPGDSSSGWTAGAAAYYVGYLQPRTFLLKYNENGTITDAVDCALDPLSETKCTLKSFTVEKGIYQTSNFRVQPTESIVRFPNITNLCPFGEVFNATRFASVYAWNRKRISNCVADYSVLYNSASFSTFKCYGVSPTKLNDLCFTNVYADSFVIRGDEVRQIAPGQTGKIADYNYKLPDDFTGCVIAWNSNNLDSKVGGNYNYLYRLFRKSNLKPFERDISTEIYQAGSTPCNGVEGFNCYFPLQSYGFQPTNGVGYQPYRVVVLSFELLHAPATVCGPKKSTNLVKNKCVNFNFNGLTGTGVLTESNKKFLPFQQFGRDIADTTDAVRDPQTLEILDITPCSFGGVSVITPGTNTSNQVAVLYQDVNCTEVPVAIHADQLTPTWRVYSTGSNVFQTRAGCLIGAEHVNNSYECDIPIGAGICASYQTQTNSPRRARSVASQSIIAYTMSLGAENSVAYSNNSIAIPTNFTISVTTEILPVSMTKTSVDCTMYICGDSTECSNLLLQYGSFCTQLNRALTGIAVEQDKNTQEVFAQVKQIYKTPPIKDFGGFNFSQILPDPSKPSKRSFIEDLLFNKVTLADAGFIKQYGDCLGDIAARDLICAQKFNGLTVLPPLLTDEMIAQYTSALLAGTITSGWTFGAGAALQIPFAMQMAYRFNGIGVTQNVLYENQKLIANQFNSVIGKIQDSLSSTASALGKLQDVVNQNAQALNTLVKQLSSNFGAISSVLNDILSRLDPPEAEVQIDRLITGRLQSLQTYVTQQLIRAAEIRASANLAATKMSECVLGQSKRVDFCGKGYHLMSFPQSAPHGVVFLHVTYVFAQEKNFTTAPAICHDGKAHFPREGVFVSNGTHWFVTQRNFYEPQIITTDNTFVSGNCDVVIGIVNNTVYDPLQPELDSFKEELDKYFKNHTSPDVDLGDISGINASVVNIQKEIDRLNEVAKNLNESLIDLQELGKYEQYIKGGGGSDIIKLLNEQVNKEMQSSNLYMSMSSWCYTHSLDGAGLFLFDHAAEEYEHAKKLIIFLNENNVPVQLTSISAPEHKFEGLTQIFQKAYEHEQHISESINNIVDHAIKSKDHATFNFLQWYVAEQHEEEVLFKDILDKIELIGNENHGLYLADQYVKGIAKSRKS

SEQ ID NO: 4842 - protein, 1379 aa, Artificial Sequence
  SARS-CoV-2/Guangdong/GD2020087-P0008/2020__EPI_ISL_413863 spike protein (1-1211)(K986P_V987P_P1069F) Ferritin construct
MFVFLVLLPLVSSQCVNLTTRTQLPPAYTNSFTRGVYYPDKVFRSSVLHSTQDLFLPFFSNVTWFHAIHVSGTNGTKRFDNPVLPFNDGVYFASTEKSNIIRGWIFGTTLDSKTQSLLIVNNATNVVIKVCEFQFCNDPFLGVYYHKNNKSWMESEFRVYSSANNCTFEYVSQPFLMDLEGKQGNFKNLREFVFKNIDGYFKIYSKHTPINLVRDLPQGFSALEPLVDLPIGINITRFQTLLALHRSYLTPGDSSSGWTAGAAAYYVGYLQPRTFLLKYNENGTITDAVDCALDPLSETKCTLKSFTVEKGIYQTSNFRVQPTESIVRFPNITNLCPFGEVFNATRFASVYAWNRKRISNCVADYSVLYNSASFSTFKCYGVSPTKLNDLCFTNVYADSFVIRGDEVREIAPGQTGKIADYNYKLPDDFTGCVIAWNSNNLDSKVGGNYNYLYRLFRKSNLKPFERDISTEIYQAGSTPCNGVEGFNCYFPLQSYGFQPTNGVGYQPYRVVVLSFELLHAPATVCGPKKSTNLVKNKCVNFNFNGLTGTGVLTESNKKFLPFQQFGRDIADTTDAVRDPQTLEILDITPCSFGGVSVITPGTNTSNQVAVLYQDVNCTEVPVAIHADQLTPTWRVYSTGSNVFQTRAGCLIGAEHVNNSYECDIPIGAGICASYQTQTNSPRRARSVASQSIIAYTMSLGAENSVAYSNNSIAIPTNFTISVTTEILPVSMTKTSVDCTMYICGDSTECSNLLLQYGSFCTQLNRALTGIAVEQDKNTQEVFAQVKQIYKTPPIKDFGGFNFSQILPDPSKPSKRSFIEDLLFNKVTLADAGFIKQYGDCLGDIAARDLICAQKFNGLTVLPPLLTDEMIAQYTSALLAGTITSGWTFGAGAALQIPFAMQMAYRFNGIGVTQNVLYENQKLIANQFNSAIGKIQDSLSSTASALGKLQDVVNQNAQALNTLVKQLSSNFGAISSVLNDILSRLDPPEAEVQIDRLITGRLQSLQTYVTQQLIRAAEIRASANLAATKMSECVLGQSKRVDFCGKGYHLMSFPQSAPHGVVFLHVTYVFAQEKNFTTAPAICHDGKAHFPREGVFVSNGTHWFVTQRNFYEPQIITTDNTFVSGNCDVVIGIVNNTVYDPLQPELDSFKEELDKYFKNHTSPDVDLGDISGINASVVNIQKEIDRLNEVAKNLNESLIDLQELGKYEQYIKGGGGSDIIKLLNEQVNKEMQSSNLYMSMSSWCYTHSLDGAGLFLFDHAAEEYEHAKKLIIFLNENNVPVQLTSISAPEHKFEGLTQIFQKAYEHEQHISESINNIVDHAIKSKDHATFNFLQWYVAEQHEEEVLFKDILDKIELIGNENHGLYLADQYVKGIAKSRKS

SEQ ID NO: 4843 - protein, 1379 aa, Artificial Sequence
  SARS-CoV-2/Sweden/01/2020__EPI_ISL_411951 spike protein (1-1211)(K986P_V987P_P1069F) Ferritin construct
MFVFLVLLPLVSSQCVNLTTRTQLPPAYTNSFTRGVYYPDKVFRSSVLHSTQDLFLPFFSNVTWFHAIHVSGTNGTKRFDNPVLPFNDGVYFASTEKSNIIRGWIFGTTLDSKTQSLLIVNNATNVVIKVCEFQFCNDPFLGVYYHKNNKSWMESEFRVYSSANNCTFEYVSQPFLMDLEGKQGNFKNLREFVFKNIDGYFKIYSKHTPINLVRDLPQGFSALEPLVDLPIGINITRFQTLLALHRSYLTPGDSSSGWTAGAAAYYVGYLQPRTFLLKYNENGTITDAVDCALDPLSETKCTLKSFTVEKGIYQTSNFRVQPTESIVRFPNITNLCPFGEVFNATRFASVYAWNRKRISNCVADYSVLYNSASFSTFKCYGVSPTKLNDLCFTNVYADSFVIRGDEVRQIAPGQTGKIADYNYKLPDDFTGCVIAWNSNNLDSKVGGNYNYLYRLFRKSNLKPFERDISTEIYQAGSTPCNGVEGFNCYFPLQSYGFQPTNGVGYQPYRVVVLSFELLHAPATVCGPKKSTNLVKNKCVNFNFNGLTGTGVLTESNKKFLPFQQFGRDIADTTDAVRDPQTLEILDITPCSFGGVSVITPGTNTSNQVAVLYQDVNCTEVPVAIHADQLTPTWRVYSTGSNVFQTRAGCLIGAEHVNNSYECDIPIGAGICASYQTQTNSPRRARSVASQSIIAYTMSLGAENSVAYSNNSIAIPTNFTISVTTEILPVSMTKTSVDCTMYICGDSTECSNLLLQYGSFCTQLNRALTGIAVEQDKNTQEVFAQVKQIYKTPPIKDCGGFNFSQILPDPSKPSKRSFIEDLLFNKVTLADAGFIKQYGDCLGDIAARDLICAQKFNGLTVLPPLLTDEMIAQYTSALLAGTITSGWTFGAGAALQIPFAMQMAYRFNGIGVTQNVLYENQKLIANQFNSAIGKIQDSLSSTASALGKLQDVVNQNAQALNTLVKQLSSNFGAISSVLNDILSRLDPPEAEVQIDRLITGRLQSLQTYVTQQLIRAAEIRASANLAATKMSECVLGQSKRVDFCGKGYHLMSFPQSAPHGVVFLHVTYVFAQEKNFTTAPAICHDGKAHFPREGVFVSNGTHWFVTQRNFYEPQIITTDNTFVSGNCDVVIGIVNNTVYDPLQPELDSFKEELDKYFKNHTSPDVDLGDISGINASVVNIQKEIDRLNEVAKNLNESLIDLQELGKYEQYIKGGGGSDIIKLLNEQVNKEMQSSNLYMSMSSWCYTHSLDGAGLFLFDHAAEEYEHAKKLIIFLNENNVPVQLTSISAPEHKFEGLTQIFQKAYEHEQHISESINNIVDHAIKSKDHATFNFLQWYVAEQHEEEVLFKDILDKIELIGNENHGLYLADQYVKGIAKSRKS

SEQ ID NO: 4844 - protein, 1379 aa, Artificial Sequence
  SARS-CoV-2/Tianmen/HBCDC-HB-07/2020__EPI_ISL_412983 spike protein (1-1211)(K986P_V987P_P1069F) Ferritin construct
MFVFLVLLPLVSSQCVNLTTRTQLPPAYTNSFTRGVYYPDKVFRSSVLHSTQDLFLPFFSNVTWFHAIHVSGTNGTKRFDNPVLPFNDGVYFASTEKSNIIRGWIFGTTLDSKTQSLLIVNNATNVVIKVCEFQFCNDPFLGVYYHKNNKSWMESEFRVYSSANNCTFEYVSQPFLMDLEGKQGNFKNLREFVFKNIDGYFKIYSKHTPINLVRDLPQGFSALEPLVDLPIGINITRFQTLLALHRSYLTPGDSSSGWTAGAAAYYVGYLQPRTFLLKYNENGTITDAVDCALDPLSETKCTLKSFTVEKGIYQTSNFRVQPTESIVRFPNITNLCPFGEVFNATRFASVYAWNRKRISNCVADYSVLYNSASFSTFKCYGVSPTKLNDLCFTNVYADSFVIRGDEVRQIAPGQTGKIADYNYKLPDDFTGCVIAWNSNNLDSKVGGNYNYLYRLFRKSNLKPFERDISTEIYQAGSTPCNGVEGFNCYFPLQSYGFQPTNGVGYQPYRVVVLSFELLHAPATVCGPKKSTNLVKNKCVNFNFNGLTGTGVLTESNKKFLPFQQFGRDIADTTDAVRDPQTLEILDITPCSFGGVSVITPGTNTSNQVAVLYQDLNCTEVPVAIHADQLTPTWRVYSTGSNVFQTRAGCLIGAEHVNNSYECDIPIGAGICASYQTQTNSPRRARSVASQSIIAYTMSLGAENSVAYSNNSIAIPTNFTISVTTEILPVSMTKTSVDCTMYICGDSTECSNLLLQYGSFCTQLNRALTGIAVEQDKNTQEVFAQVKQIYKTPPIKDFGGFNFSQILPDPSKPSKRSFIEDLLFNKVTLADAGFIKQYGDCLGDIAARDLICAQKFNGLTVLPPLLTDEMIAQYTSALLAGTITSGWTFGAGAALQIPFAMQMAYRFNGIGVTQNVLYENQKLIANQFNSAIGKIQDSLSSTASALGKLQDVVNQNAQALNTLVKQLSSNFGAISSVLNDILSRLDPPEAEVQIDRLITGRLQSLQTYVTQQLIRAAEIRASANLAATKMSECVLGQSKRVDFCGKGYHLMSFPQSAPHGVVFLHVTYVFAQEKNFTTAPAICHDGKAHFPREGVFVSNGTHWFVTQRNFYEPQIITTDNTFVSGNCDVVIGIVNNTVYDPLQPELDSFKEELDKYFKNHTSPDVDLGDISGINASVVNIQKEIDRLNEVAKNLNESLIDLQELGKYEQYIKGGGGSDIIKLLNEQVNKEMQSSNLYMSMSSWCYTHSLDGAGLFLFDHAAEEYEHAKKLIIFLNENNVPVQLTSISAPEHKFEGLTQIFQKAYEHEQHISESINNIVDHAIKSKDHATFNFLQWYVAEQHEEEVLFKDILDKIELIGNENHGLYLADQYVKGIAKSRKS

SEQ ID NO: 4845 - protein, 1379 aa, Artificial Sequence
  SARS-CoV-2/Hong Kong/case42_VM20002493/2020__EPI_ISL_414527 spike protein (1-1211)(K986P_V987P_P1069F) Ferritin construct
MFVFLVLLPLVSSQCVNLTTRTQLPPAYTNSFTRGVYYPDKVFRSSVLHSTQDLFLPFFSNVTWFHAIHVSGTNGTKRFDNPVLPFNDGVYFASTEKSNIIRGWIFGTTLDSKTQSLLIVNNATNVVIKVCEFQFCNDPFLGVYYHKNNKSWMESEFRVYSSANNCTFEYVSQPFLMDLEGKQGNFKNLREFVFKNIDGYFKIYSKHTPINLVRDLPQGFSALEPLVDLPIGINITRFQTLLALHRSYLTPGDSSSGWTAGAAAYYVGYLQPRTFLLKYNENGTITDAVDCALDPLSETKCTLKSFTVEKGIYQTSNFRVQPTESIVRFPNITNLCPFGEVFNATRFASVYAWNRKRISNCVADYSVLYNSASFSTFKCYGVSPTKLNDLCFTNVYADSFVIRGDEVRQIAPGQTGKIADYNYKLPDDFTGCVIAWNSNNLDSKVGGNYNYLYRLFRKSNLKPFERDISTEIYQAGSTPCNGVEGFNCYFPLQSYGFQPTNGVGYQPYRVVVLSFELLHAPATVCGPKKSTNLVKNKCVNFNFNGLTGTGVLTESNKKFLPFQQFGRDIADTTDAVRDPQTLEILDITPCSFGGVSVITPGTNTSNQVAVLYQDVNCTEVPVAIHADQLTPTWRVYSTGSNVFQTRAGCLIGAEHVNNSYECDIPIGAGICASYQTQTNSPRRARSVASQSIIAYTMSLGAENSVAYSNNSIAIPTNFAISVTTEILPVSMTKTSVDCTMYICGDSTECSNLLLQYGSFCTQLNRALTGIAVEQDKNTQEVFAQVKQIYKTPPIKDFGGFNFSQILPDPSKPSKRSFIEDLLFNKVTLADAGFIKQYGDCLGDIAARDLICAQKFNGLTVLPPLLTDEMIAQYTSALLAGTITSGWTFGAGAALQIPFAMQMAYRFNGIGVTQNVLYENQKLIANQFNSAIGKIQDSLSSTASALGKLQDVVNQNAQALNTLVKQLSSNFGAISSVLNDILSRLDPPEAEVQIDRLITGRLQSLQTYVTQQLIRAAEIRASANLAATKMSECVLGQSKRVDFCGKGYHLMSFPQSAPHGVVFLHVTYVFAQEKNFTTAPAICHDGKAHFPREGVFVSNGTHWFVTQRNFYEPQIITTDNTFVSGNCDVVIGIVNNTVYDPLQPELDSFKEELDKYFKNHTSPDVDLGDISGINASVVNIQKEIDRLNEVAKNLNESLIDLQELGKYEQYIKGGGGSDIIKLLNEQVNKEMQSSNLYMSMSSWCYTHSLDGAGLFLFDHAAEEYEHAKKLIIFLNENNVPVQLTSISAPEHKFEGLTQIFQKAYEHEQHISESINNIVDHAIKSKDHATFNFLQWYVAEQHEEEVLFKDILDKIELIGNENHGLYLADQYVKGIAKSRKS

SEQ ID NO: 4846 - protein, 1379 aa, Artificial Sequence
  SARS-CoV-2/USA/CruiseA-23/2020__EPI_ISL_414482 spike protein (1-1211)(K986P_V987P_P1069F) Ferritin construct
MFVFLVLLPLVSSQCVNLTTRTQLPPAYTNSFTRGVYYPDKVFRSSVLHSTQDLFLPFFSNVTWFHAIHVSGTNGTKRFDNPVLPFNDGVYFASTEKSNIIRGWIFGTTLDSKTQSLLIVNNATNVVIKVCEFQFCNDPFLGVYYHKNNKSWMESEFRVYSSANNCTFEYVSQPFLMDLEVKQGNFKNLREFVFKNIDGYFKIYSKHTPINLVRDLPQGFSALEPLVDLPIGINITRFQTLLALHRSYLTPGDSSSGWTAGAAAYYVGYLQPRTFLLKYNENGTITDAVDCALDPLSETKCTLKSFTVEKGIYQTSNFRVQPTESIVRFPNITNLCPFGEVFNATRFASVYAWNRKRISNCVADYSVLYNSASFSTFKCYGVSPTKLNDLCFTNVYADSFVIRGDEVRQIAPGQTGKIADYNYKLPDDFTGCVIAWNSNNLDSKVGGNYNYLYRLFRKSNLKPFERDISTEIYQAGSTPCNGVEGFNCYFPLQSYGFQPTNGVGYQPYRVVVLSFELLHAPATVCGPKKSTNLVKNKCVNFNFNGLTGTGVLTESNKKFLPFQQFGRDIADTTDAVRDPQTLEILDITPCSFGGVSVITPGTNTSNQVAVLYQDVNCTEVPVAIHADQLTPTWRVYSTGSNVFQTRAGCLIGAEHVNNSYECDIPIGAGICASYQTQTNSPRRARSVASQSIIAYTMSLGAENSVAYSNNSIAIPTNFTISVTTEILPVSMTKTSVDCTMYICGDSTECSNLLLQYGSFCTQLNRALTGIAVEQDKNTQEVFAQVKQIYKTPPIKDFGGFNFSQILPDPSKPSKRSFIEDLLFNKVTLADAGFIKQYGDCLGDIAARDLICAQKFNGLTVLPPLLTDEMIAQYTSALLAGTITSGWTFGAGAALQIPFAMQMAYRFNGIGVTQNVLYENQKLIANQFNSAIGKIQDSLSSTASALGKLQDVVNQNAQALNTLVKQLSSNFGAISSVLNDILSRLDPPEAEVQIDRLITGRLQSLQTYVTQQLIRAAEIRASANLAATKMSECVLGQSKRVDFCGKGYHLMSFPQSAPHGVVFLHVTYVFAQEKNFTTAPAICHDGKAHFPREGVFVSNGTHWFVTQRNFYEPQIITTDNTFVSGNCDVVIGIVNNTVYDPLQPELDSFKEELDKYFKNHTSPDVDLGDISGINASVVNIQKEIDRLNEVAKNLNESLIDLQELGKYEQYIKGGGGSDIIKLLNEQVNKEMQSSNLYMSMSSWCYTHSLDGAGLFLFDHAAEEYEHAKKLIIFLNENNVPVQLTSISAPEHKFEGLTQIFQKAYEHEQHISESINNIVDHAIKSKDHATFNFLQWYVAEQHEEEVLFKDILDKIELIGNENHGLYLADQYVKGIAKSRKS

SEQ ID NO: 4847 - protein, 1379 aa, Artificial Sequence
  SARS-CoV-2/Hong Kong/case85_VM20002868/2020__EPI_ISL_414519 spike protein (1-1211)(K986P_V987P_P1069F) Ferritin construct
MFVFLVLVPLVSSQCVNLTTRTQLPPAYTNSFTRGVYYPDKVFRSSVLHSTQDLFLPFFSNVTWFHAIHVSGTNGTKRFDNPVLPFNDGVYFASTEKSNIIRGWIFGTTLDSKTQSLLIVNNATNVVIKVCEFQFCNDPFLGVYYHKNNKSWMESEFRVYSSANNCTFEYVSQPFLMDLEGKQGNFKNLREFVFKNIDGYFKIYSKHTPINLVRDLPQGFSALEPLVDLPIGINITRFQTLLALHRSYLTPGDSSSGWTAGAAAYYVGYLQPRTFLLKYNENGTITDAVDCALDPLSETKCTLKSFTVEKGIYQTSNFRVQPTESIVRFPNITNLCPFGEVFNATRFASVYAWNRKRISNCVADYSVLYNSASFSTFKCYGVSPTKLNDLCFTNVYADSFVIRGDEVRQIAPGQTGKIADYNYKLPDDFTGCVIAWNSNNLDSKVGGNYNYLYRLFRKSNLKPFERDISTEIYQAGSTPCNGVEGFNCYFPLQSYGFQPTNGVGYQPYRVVVLSFELLHAPATVCGPKKSTNLVKNKCVNFNFNGLTGTGVLTESNKKFLPFQQFGRDIADTTDAVRDPQTLEILDITPCSFGGVSVITPGTNTSNQVAVLYQDVNCTEVPVAIHADQLTPTWRVYSTGSNVFQTRAGCLIGAEHVNNSYECDIPIGAGICASYQTQTNSPRRARSVASQSIIAYTMSLGAENSVAYSNNSIAIPTNFTISVTTEILPVSMTKTSVDCTMYICGDSTECSNLLLQYGSFCTQLNRALTGIAVEQDKNTQEVFAQVKQIYKTPPIKDFGGFNFSQILPDPSKPSKRSFIEDLLFNKVTLADAGFIKQYGDCLGDIAARDLICAQKFNGLTVLPPLLTDEMIAQYTSALLAGTITSGWTFGAGAALQIPFAMQMAYRFNGIGVTQNVLYENQKLIANQFNSAIGKIQDSLSSTASALGKLQDVVNQNAQALNTLVKQLSSNFGAISSVLNDILSRLDPPEAEVQIDRLITGRLQSLQTYVTQQLIRAAEIRASANLAATKMSECVLGQSKRVDFCGKGYHLMSFPQSAPHGVVFLHVTYVFAQEKNFTTAPAICHDGKAHFPREGVFVSNGTHWFVTQRNFYEPQIITTDNTFVSGNCDVVIGIVNNTVYDPLQPELDSFKEELDKYFKNHTSPDVDLGDISGINASVVNIQKEIDRLNEVAKNLNESLIDLQELGKYEQYIKGGGGSDIIKLLNEQVNKEMQSSNLYMSMSSWCYTHSLDGAGLFLFDHAAEEYEHAKKLIIFLNENNVPVQLTSISAPEHKFEGLTQIFQKAYEHEQHISESINNIVDHAIKSKDHATFNFLQWYVAEQHEEEVLFKDILDKIELIGNENHGLYLADQYVKGIAKSRKS

SEQ ID NO: 4848 - protein, 1379 aa, Artificial Sequence; identical to SEQ ID NO: 4838
  SARS-CoV-2/England/200990660/2020__EPI_ISL_414523 spike protein (1-1211)(K986P_V987P_P1069F) Ferritin construct

SEQ ID NO: 4849 - protein, 1379 aa, Artificial Sequence
  SARS-CoV-2/Australia/NSW09/2020__EPI_ISL_413595 spike protein (1-1211)(K986P_V987P_P1069F) Ferritin construct
MFVFLVLLPLVSSQCVNLTTRTQLPPAYTNSFTRGVYYPDKVFRSSVLHSTQDLFLPFFSNVTWFHAIHVSGTNGTKRFDNPVLPFNDGVYFASTEKSNIIRGWIFGTTLDSKTQSLLIVNNATNVVIKVCEFQFCNDPFLGVYYHKNNKSWMESEFRVYSSANNCTFEYVSQPFLMDLEGKQGNFKNLREFVFKNIDGYFKIYSKHTPINLVRDLPQGFSALEPLVDLPIGINITRFQTLLALHRSYLTPGDSSSGWTAGAAAYYVGYLQPRTFLLKYNENGTITDAVDCALDPLSETKCTLKSFTVEKGIYQTSNFRVQPTESIVRFPNITNLCPFGEVFNATRFASVYAWNRKRISNCVADYSVLYNSASFSTFKCYGVSPTKLNDLCFTNVYADSFVIRGDEVRQIAPGQTGKIADYNYKLPDDFTGCVIAWNSNNLDSKVGGNYNYLYRLFRKSNLKPFERDISTEIYQAGSTPCNGVEGFNCYFPLQSYGFQPTNGVGYQPYRVVVLSFELLHAPATVCGPKKSTNLVKNKCVNFNFNGLTGTGVLTESNKKFLPFQQFGRDIADTTDAVRDPQTLEILDITPCSFGGVSVITPGTNTSNQVAVLYQDVNCTEVPVAIHADQLTPTWRVYSTGSNVFQTRAGCLIGAEHVNNSYECDIPIGAGICASYQTQTNSPRRARSVASQSIIAYTMSLGAENSVAYSNNSIAIPTNFTISVTTEILPVSMTKTSVDCTMYICGDSTECSNLLLQYGSFCTQLNRALTGIAVEQDKNTQEVFAQVKQIYKTPPIKDFGGFNFSQILPDPSKPSKRSFIEDLLFNKVTLADAGFIKQYGDCLGDIAARDLICAQKFNGLTVLPPLLTDEMIAQYTSALLAGTITSGWTFGAGAALQIPFAMQMAYRFNGIGVTQNVLYENQKLIANQFNSAIGKIQDSLSFTASALGKLQDVVNQNAQALNTLVKQLSSNFGAISSVLNDILSRLDPPEAEVQIDRLITGRLQSLQTYVTQQLIRAAEIRASANLAATKMSECVLGQSKRVDFCGKGYHLMSFPQSAPHGVVFLHVTYVFAQEKNFTTAPAICHDGKAHFPREGVFVSNGTHWFVTQRNFYEPQIITTDNTFVSGNCDVVIGIVNNTVYDPLQPELDSFKEELDKYFKNHTSPDVDLGDISGINASVVNIQKEIDRLNEVAKNLNESLIDLQELGKYEQYIKGGGGSDIIKLLNEQVNKEMQSSNLYMSMSSWCYTHSLDGAGLFLFDHAAEEYEHAKKLIIFLNENNVPVQLTSISAPEHKFEGLTQIFQKAYEHEQHISESINNIVDHAIKSKDHATFNFLQWYVAEQHEEEVLFKDILDKIELIGNENHGLYLADQYVKGIAKSRKS

SEQ ID NO: 4850 - protein, 1379 aa, Artificial Sequence; identical to SEQ ID NO: 4830
  SARS-CoV-2/Australia/NSW10/2020__EPI_ISL_413596 spike protein (1-1211)(K986P_V987P_P1069F) Ferritin construct

SEQ ID NO: 4851 - protein, 1379 aa, Artificial Sequence
  SARS-CoV-2/Switzerland/1000477797/2020__EPI_ISL_413023 spike protein (1-1211)(K986P_V987P_P1069F) Ferritin construct
MFVFLVLLPLVSSQCVNLTTRTQLPPAYTNSFTRGVYYPDKVFRSSVLHSTQDLFLPFFSNVTWFHAIHVSGTNGTKRFDNPVLPFNDGVYFASTEKSNIIRGWIFGTTLDSKTQSLLIVNNATNVVIKVCEFQFCNDPFLGVYYHKNNKSWMESEFRVYSSANNCTFEYVSQPFLMDLEGKQGNFKNLREFVFKNIDGYFNIYSKHTPINLVRDLPQGFSALEPLVDLPIGINITRFQTLLALHRSYLTPGDSSSGWTAGAAAYYVGYLQPRTFLLKYNENGTITDAVDCALDPLSETKCTLKSFTVEKGIYQTSNFRVQPTESIVRFPNITNLCPFGEVFNATRFASVYAWNRKRISNCVADYSVLYNSASFSTFKCYGVSPTKLNDLCFTNVYADSFVIRGDEVRQIAPGQTGKIADYNYKLPDDFTGCVIAWNSNNLDSKVGGNYNYLYRLFRKSNLKPFERDISTEIYQAGSTPCNGVEGFNCYFPLQSYGFQPTNGVGYQPYRVVVLSFELLHAPATVCGPKKSTNLVKNKCVNFNFNGLTGTGVLTESNKKFLPFQQFGRDIADTTDAVRDPQTLEILDITPCSFGGVSVITPGTNTSNQVAVLYQGVNCTEVPVAIHADQLTPTWRVYSTGSNVFQTRAGCLIGAEHVNNSYECDIPIGAGICASYQTQTNSPRRARSVASQSIIAYTMSLGAENSVAYSNNSIAIPTNFTISVTTEILPVSMTKTSVDCTMYICGDSTECSNLLLQYGSFCTQLNRALTGIAVEQDKNTQEVFAQVKQIYKTPPIKDFGGFNFSQILPDPSKPSKRSFIEDLLFNKVTLADAGFIKQYGDCLGDIAARDLICAQKFNGLTVLPPLLTDEMIAQYTSALLAGTITSGWTFGAGAALQIPFAMQMAYRFNGIGVTQNVLYENQKLIANQFNSAIGKIQDSLSSTASALGKLQDVVNQNAQALNTLVKQLSSNFGAISSVLNDILSRLDPPEAEVQIDRLITGRLQSLQTYVTQQLIRAAEIRASANLAATKMSECVLGQSKRVDFCGKGYHLMSFPQSAPHGVVFLHVTYVFAQEKNFTTAPAICHDGKAHFPREGVFVSNGTHWFVTQRNFYEPQIITTDNTFVSGNCDVVIGIVNNTVYDPLQPELDSFKEELDKYFKNHTSPDVDLGDISGINASVVNIQKEIDRLNEVAKNLNESLIDLQELGKYEQYIKGGGGSDIIKLLNEQVNKEMQSSNLYMSMSSWCYTHSLDGAGLFLFDHAAEEYEHAKKLIIFLNENNVPVQLTSISAPEHKFEGLTQIFQKAYEHEQHISESINNIVDHAIKSKDHATFNFLQWYVAEQHEEEVLFKDILDKIELIGNENHGLYLADQYVKGIAKSRKS

SEQ ID NO: 4852 - protein, 1379 aa, Artificial Sequence
  SARS-CoV-2/Belgium/BA-02291/2020__EPI_ISL_415159 spike protein (1-1211)(K986P_V987P_P1069F) Ferritin construct
MFVFLVLLPLVSSQCVNLTTRTQLPPAYTNSFTRGVYYPDKVFRSSVLHSTQDLFLPFFSNVTWFHAIHVSGTNGTKRFDNPVLPFNDGVYFASTEKSNIIRGWIFGTTLDSKTQSLLIVNNATNVVIKVCEFQFCNDPFLGVYYHKNNKSWMESEFRVYSSANNCTFEYVSQPFLMDLEGKQGNFKNLREFVFKNIDGYFKIYSKHTPINLVRDLPQGFSALEPLVDLPIGINITRFQTLLALHRSYLTPGDSSSGWTAGAAAYYVGYLQPRTFLLKYNENGTITDAVDCALDPLSETKCTLKSFTVEKGIYQTSNFRVQPTESIVRFPNITNLCPFGEVFNATRFASVYAWNRKRISNCVADYSVLYNSASFSTFKCYGVSPTKLNDLCFTNVYADSFVIRGDEVRQIAPGQTGKIADYNYKLPDDFTGCVIAWNSNNLDSKVGGNYNYLYRLFRRSNLKPFERDISTEIYQAGSTPCNGVEGFNCYFPLQSYGFQPTNGVGYQPYRVVVLSFELLPAPATVCGPKKSTNLVKNKCVNFNFNGLTGTGVLTESNKKFLPFQQFGRDIADTTDAVRDPQTLEILDITPCSFGGVSVITPGTNTSNQVAVLYQGVNCTEVPVAIHADQLTPTWRVYSTGSNVFQTRAGCLIGAEHVNNSYECDIPIGAGICASYQTQTNSPRRARSVASQSIIAYTMSLGAENSVAYSNNSIAIPTNFTISVTTEILPVSMTKTSVDCTMYICGDSTECSNLLLQYGSFCTQLNRALTGIAVEQDKNTQEVFAQVKQIYKTPPIKDFGGFNFSQILPDPSKPSKRSFIEDLLFNKVTLADAGFIKQYGDCLGDIAARDLICAQKFNGLTVLPPLLTDEMIAQYTSALLAGTITSGWTFGAGAALQIPFAMQMAYRFNGIGVTQNVLYENQKLIANQFNSAIGKIQDSLSSAAPALGKLQDVVNQNAQALNTLVKQLSSNFGAISSVLNDILSRLDPPEAEVQIDRLITGRLQSLQTYVTQQLIRAAEIRASANLAATKMSECVLGQSKRVDFCGKGYHLMSFPQSAPHGVVFLHVTYVFAQEKNFTTAPAICHDGKAHFPREGVFVSNGTHWFVTQRNFYEPQIITTDNTFVSGNCDVVIGIVNNTVYDPLQPELDSFKEELDKYFKNHTSPDVDLGDISGINASVVNIQKEIDRLNEVAKNLNESLIDLQELGKYEQYIKGGGGSDIIKLLNEQVNKEMQSSNLYMSMSSWCYTHSLDGAGLFLFDHAAEEYEHAKKLIIFLNENNVPVQLTSISAPEHKFEGLTQIFQKAYEHEQHISESINNIVDHAIKSKDHATFNFLQWYVAEQHEEEVLFKDILDKIELIGNENHGLYLADQYVKGIAKSRKS

SEQ ID NO: 4853 - protein, 1379 aa, Artificial Sequence
  SARS-CoV-2/USA/WA8-UW5/2020__EPI_ISL_413486 spike protein (1-1211)(K986P_V987P_P1069F) Ferritin construct
MFVFLVLLPLVSSQCVNLTTRTQLPPAYTNSFTRGVYYPDKVFRSSVLHSTQDLFLPFFSNVTWFHAIHVSGTNGTKRFDNPVLPFNDGVYFASTEKSNIIRGWIFGTTLDSKTQSLLIVNNATNVVIKVCEFQFCNDPFLGVYYHKNNKSWMESEFRVYSSANNCTFEYVSQPFLMDLEGKQGNFKNLREFVFKNIDGYFKIYSKHTPINLVRDLPQGFSALEPLVDLPIGINITRFQTLLALHRSYLTPGDSSSGWTAGAAAYYVGYLQPRTFLLKYNENGTITDAVDCALDPLSETKCTLKSFTVEKGIYQTSNFRVQPTESIVRFPNITNLCPFGEVFNATRFASVYAWNRKRISNCVADYSVLYNSASFSTFKCYGVSPTKLNDLCFTNVYADSFVIRGDEVRQIAPGQTGKIADYNYKLPDDFTGCVIAWNSNNLDSKVGGNYNYLYRLFRKSNLKPFERDISTEIYQAGSTPCNGVEGFNCYFPLQSYGFQPTNGVGYQPYRVVVLSFELLHAPATVCGPKKSTNLVKNKCVNFNFNGLTGTGVLTESNKKFLPFQQFGRDIADTTDAVRDPQTLEILDITPCSFGGVSVITPGTNTSNQVAVLYQDVNCTEVPVAIHADQLTPTWRVYSTGSNVFQTRAGCLIGAEYVNNSYECDIPIGAGICASYQTQTNSPRRARSVASQSIIAYTMSLGAENSVAYSNNSIAIPTNFTISVTTEILPVSMTKTSVDCTMYICGDSTECSNLLLQYGSFCTQLNRALTGIAVEQDKNTQEVFAQVKQIYKTPPIKDFGGFNFSQILPDPSKPSKRSFIEDLLFNKVTLADAGFIKQYGDCLGDIAARDLICAQKFNGLTVLPPLLTDEMIAQYTSALLAGTITSGWTFGAGAALQIPFAMQMAYRFNGIGVTQNVLYENQKLIANQFNSAIGKIQDSLSSTASALGKLQDVVNQNAQALNTLVKQLSSNFGAISSVLNDILSRLDPPEAEVQIDRLITGRLQSLQTYVTQQLIRAAEIRASANLAATKMSECVLGQSKRVDFCGKGYHLMSFPQSAPHGVVFLHVTYVFAQEKNFTTAPAICHDGKAHFPREGVFVSNGTHWFVTQRNFYEPQIITTDNTFVSGNCDVVIGIVNNTVYDPLQPELDSFKEELDKYFKNHTSPDVDLGDISGINASVVNIQKEIDRLNEVAKNLNESLIDLQELGKYEQYIKGGGGSDIIKLLNEQVNKEMQSSNLYMSMSSWCYTHSLDGAGLFLFDHAAEEYEHAKKLIIFLNENNVPVQLTSISAPEHKFEGLTQIFQKAYEHEQHISESINNIVDHAIKSKDHATFNFLQWYVAEQHEEEVLFKDILDKIELIGNENHGLYLADQYVKGIAKSRKS

SEQ ID NO: 4854 - protein, 1379 aa, Artificial Sequence
  SARS-CoV-2/England/20102000506/2020__EPI_ISL_415147 spike protein (1-1211)(K986P_V987P_P1069F) Ferritin construct
MFVFLVLLPLVSSQCVNLTTRTQLPPAYTNSFTRGVYYPDKVFRSSVLHSTQDLFLPFFSNVTWFHAIHVSGTNGTKRFDNPVLPFNDGVYFASTEKSNIIRGWIFGTTLDSKTQSLLIVNNATNVVIKVCEFQFCNDPFLGVYYHKNNKSWMESEFRVYSSANNCTFEYVSQPFLMDLEGKQGNFKNLREFVFKNIDGYFKIYSKHTPINLVRDLPQGFSALEPLVDLPIGINITRFQTLLALHRSYLTPGDSSSGWTAGAAAYYVGYLQPRTFLLKYNENGTITDAVDCALDPLSETKCTLKSFTVEKGIYQTSNFRVQPTESIVRFPNITNLCPFGEVFNATRFASVYAWNRKRISNCVADYSVLYNSASFSTFKCYGVSPTKLNDLCFTNVYADSFVIRGDEVRQIAPGQTGKIADYNYKLPDDFTGCVIAWNSNNLDSKVGGNYNYLYRLFRKSNLKPFERDISTEIYQAGSTPCNGVEGFNCYFPLQSYGFQPTNGVGYQPYRVVVLSFELLHAPATVCGPKKSTNLVKNKCVNFNFNGLTGTGVLTESNKKFLPFQQFGRDIADTTDAVRDPQTLEILDITPCSFGGVSVITPGTNTSNQVAVLYQGVNCTEVPVAIHADQLTPTWRVYSTGSNVFQTRAGCLIGAEHVNNSYECDIPIGAGICASYQTQTNSPRRARSVASQSIIAYTMSLGAENSVAYSNNSIAIPTNFTISVTTEILPVSMTKTSVDCTMYICGDSTECSNLLLQYGSFCTQLNRALTGIAVEQDKNTQEVFAQVKQIYKTPPIKDFGGFNFSQILPDPSKPSKRSFIEDLLFNKVTLADAGFIKQYGYCLGDIAARDLICAQKFNGLTVLPPLLTDEMIAQYTSALLAGTITSGWTFGAGAALQIPFAMQMAYRFNGIGVTQNVLYENQKLIANQFNSAIGKIQDSLSSTASALGKLQDVVNQNAQALNTLVKQLSSNFGAISSVLNDILSRLDPPEAEVQIDRLITGRLQSLQTYVTQQLIRAAEIRASANLAATKMSECVLGQSKRVDFCGKGYHLMSFPQSAPHGVVFLHVTYVFAQEKNFTTAPAICHDGKAHFPREGVFVSNGTHWFVTQRNFYEPQIITTDNTFVSGNCDVVIGIVNNTVYDPLQPELDSFKEELDKYFKNHTSPDVDLGDISGINASVVNIQKEIDRLNEVAKNLNESLIDLQELGKYEQYIKGGGGSDIIKLLNEQVNKEMQSSNLYMSMSSWCYTHSLDGAGLFLFDHAAEEYEHAKKLIIFLNENNVPVQLTSISAPEHKFEGLTQIFQKAYEHEQHISESINNIVDHAIKSKDHATFNFLQWYVAEQHEEEVLFKDILDKIELIGNENHGLYLADQYVKGIAKSRKS

SEQ ID NO: 4855 - protein, 1379 aa, Artificial Sequence
  SARS-CoV-2/Belgium/VAG-03013/2020__EPI_ISL_415155 spike protein (1-1211)(K986P_V987P_P1069F) Ferritin construct
MFVFLVLLPLVSSQCVNLTTRTQLPPAYTNSFTRGVYYPDKVFRSSVLHSTQDLFLPFFSNVTWFHAIHVSGTNGTKRFDNPVLPFNDGVYFASTEKSNIIRGWIFGTTLDSKTQSLLIVNNATNVVIKVCEFQFCNDPFLGVYYHKNNKSWMESEFRVYSSANNCTFEYVSQPFLMDLEGKQGNFKNLREFVFKNIDGYFKIYSKHTPINLVRDLPQGFSALEPLVDLPIGINITRFQTLLALHRSYLTPGDSSSGWTAGAAAYYVGYLQPRTFLLKYNENGTITDAVDCALDPLSETKCTLKSFTVEKGIYQTSNFRVQPTESIVRFPNITNLCPFGEVFNATRFASVYAWNRKRISNCVADYSVLYNSASFSTFKCYGVSPTKLNDLCFTNVYADSFVIRGDEVRQIAPGQTGKIADYNYKLPDDFTGCVIAWNSNNLDSKVGGNYNYLYRLFRKSNLKPFERDISTEIYQAGSTPCNGVEGFNCYFPLQSYGFQPTNGVGYQPYRVVVLSFELLHAPATVCGPKKSTNLVKNKCVNFNFNGLTGTGVLTESNKKFLPFQQFGRDIADTTDAVRDPQTLEILDITPCSFGGVSVITPGTNTSNQVAVLYQGVNCTEVPVAIHADQLTPTWRVYSTGSNVFQTRAGCLIGAEHVNNSYECDIPIGAGICASYQTQTNSPRRARSVASQSIIAYTMSLGAENSVAYSNNSIAIPTNFTISVTTEILPVSMTKTSVDCTMYICGDSTECSNLLLQYGSFCTQLNRALTGIAVEQDKNTQEVFAQVKQIYKTPPIKDFGGFNFSQILPDPSKPSKRSFIEDLLFNKVTLADAGFIKQYGDCLGDIAARDLICAQKFNGLTVLPPLLTDEMIAQYTSALLAGTITSGWTFGAGAALQIPFAMQMAYRFNGIGVTQNVLYENQKLIANQFNSAIGKIQDSLSSTATALGKLQDVVNQNAQALNTLVKQLSSNFGAISSVLNDILSRLDPPEAEVQIDRLITGRLQSLQTYVTQQLIRAAEIRASANLAATKMSECVLGQSKRVDFCGKGYHLMSFPQSAPHGVVFLHVTYVFAQEKNFTTAPAICHDGKAHFPREGVFVSNGTHWFVTQRNFYEPQIITTDNTFVSGNCDVVIGIVNNTVYDPLQPELDSFKEELDKYFKNHTSPDVDLGDISGINASVVNIQKEIDRLNEVAKNLNESLIDLQELGKYEQYIKGGGGSDIIKLLNEQVNKEMQSSNLYMSMSSWCYTHSLDGAGLFLFDHAAEEYEHAKKLIIFLNENNVPVQLTSISAPEHKFEGLTQIFQKAYEHEQHISESINNIVDHAIKSKDHATFNFLQWYVAEQHEEEVLFKDILDKIELIGNENHGLYLADQYVKGIAKSRKS

SEQ ID NO: 4856 - protein, 1379 aa, Artificial Sequence
  SARS-CoV-2/Belgium/BC-03016/2020__EPI_ISL_415157 spike protein (1-1211)(K986P_V987P_P1069F) Ferritin construct
MFVFLVLLPLVSSQCVNLTTRTQLPPAYTNSFTRGVYYPDKVFRSSVLHSTQDLFLPFFSNVTWFHAIHVSGTNGTKRFDNPVLPFNDGVYFASTEKSNIIRGWIFGTTLDSKTQSLLIVNNATNVVIKVCEFQFCNDPFLGVYYHKNNKSWMESEFRVYSSANNCTFEYVSQPFLMDLEGKQGNFKNLREFVFKNIDGYFKIYSKHTPINLVRDLPQGFSALEPLVDLPIGINITRFQTLLALHRSYLTPGDSSSGWTAGAAAYYVGYLQPRTFLLKYNENGTITDAVDCALDPLSETKCTLKSFTVEKGIYQTSNFRVQPTESIVRFPNITNLCPFGEVFNATRFASVYAWNRKRISNCVADYSVLYNSASFSTFKCYGVSPTKLNDLCFTNVYADSFVIRGDEVRQIAPGQTGKIADYNYKLPDDFTGCVIAWNSNNLDSKVGGNYNYLYRLFRKSNLKPFERDISTEIYQAGSTPCNGVEGFNCYFPLQSYGFQPTNGVGYQPYRVVVLSFELLHAPATVCGPKKSTNLVKNKCVNFNFNGLTGTGVLTESNKKFLPFQQFGRDIADTTDAVRDPQTLEILDITPCSFGGVSVITPGTNTSNQVAVLYQGVNCTEVPVAIHADQLTPTWRVYSTGSNVFQTRAGCLIGAEHVNNSYECDIPIGAGICASYQTQTNSPRRARSVASQSIIAYTMSLGAENSVAYSNNSIAIPTNFTISVTTEILPVSMTKTSVDCTMYICGDSTECSNLLLQYGSFCTQLNRALTGIAVEQDKNTQEVFAQVKQIYKTPPIKDFGGFNFSQILPDPSKPSKRSFIEDLLFNKVTLADAGFIKQYGDCLGDIAARDLICAQKFNGLTVLPPLLTDEMIAQYTSALLAGTITSGWTFGAGAALQIPFAMQMAYRFNGIGVTQNVLYENQKLIANQFNSAIGKIQDSLSSTAPALGKLQDVVNQNAQALNTLVKQLSSNFGAISSVLNDILSRLDPPEAEVQIDRLITGRLQSLQTYVTQQLIRAAEIRASANLAATKMSECVLGQSKRVDFCGKGYHLMSFPQSAPHGVVFLHVTYVFAQEKNFTTAPAICHDGKAHFPREGVFVSNGTHWFVTQRNFYEPQIITTDNTFVSGNCDVVIGIVNNTVYDPLQPELDSFKEELDKYFKNHTSPDVDLGDISGINASVVNIQKEIDRLNEVAKNLNESLIDLQELGKYEQYIKGGGGSDIIKLLNEQVNKEMQSSNLYMSMSSWCYTHSLDGAGLFLFDHAAEEYEHAKKLIIFLNENNVPVQLTSISAPEHKFEGLTQIFQKAYEHEQHISESINNIVDHAIKSKDHATFNFLQWYVAEQHEEEVLFKDILDKIELIGNENHGLYLADQYVKGIAKSRKS

SEQ ID NO: 4857 - protein, 1379 aa, Artificial Sequence
  SARS-CoV-2/Germany/BavPat3/2020__EPI_ISL_414521 spike protein (1-1211)(K986P_V987P_P1069F) Ferritin construct
MFVFLVLLPLVSSQCVNLTTRTQLPPAYTNSFTRGVYYPDKVFRSSVLHSTQDLFLPFFSNVTWFHAIHVSGTNGTKRFDNPVLPFNDGVYFASTEKSNIIRGWIFGTTLDSKTQSLLIVNNATNVVIKVCEFQFCNDPFLGVYYHKNNKSWMESEFRVYSSANNCTFEYVSQPFLMDLEGKQGNFKNLREFVFKNIDGYFKIYSKHTPINLVRDLPQGFSALEPLVDLPIGINITRFQTLLALHRSYLTPGDSSSGWTAGAAAYYVGYLQPRTFLLKYNENGTITDAVDCALDPLSETKCTLKSFTVEKGIYQTSNFRVQPTESIVRFPNITNLCPFGEVFNATRFASVYAWNRKRISNCVADYSVLYNSASFSTFKCYGVSPTKLNDLCFTNVYADSFVIRGDEVRQIAPGQTGKIADYNYKLPDDFTGCVIAWNSNNLDSKVGGNYNYLYRLFRKSNLKPFERDISTEIYQAGSTPCNGVEGFNCYFPLQSYGFQPTNGVGYQPYRVVVLSFELLHAPATVCGPKKSTNLVKNKCVNFNFNGLTGTGVLTESNKKFLPFQQFGRDIADTTDAVRDPQTLEILDITPCSFGGVSVITPGTNTSNQVAVLYQDVNCTEVPVAIHADQLTPTWRVYSTGSNVFQTRAGCLIGAEHVNNSYECDIPIGAGICASYQTQTNSPRRARSVASQSIIAYTMSLGAENSVAYSNNSIAIPTNFTISVTTEILPVSMTKTSVDCTMYICGDSTECSNLLLQYGSFCTQLNRALTGIAVEQDKNTQQVFAQVKQIYKTPPIKDFGGFNFSQILPDPSKPSKRSFIEDLLFNKVTLADAGFIKQYGDCLGDIAARDLICAQKFNGLTVLPPLLTDEMIAQYTSALLAGTITSGWTFGAGAALQIPFAMQMAYRFNGIGVTQNVLYENQKLIANQFNSAIGKIQDSLSSTASALGKLQDVVNQNAQALNTLVKQLSSNFGAISSVLNDILSRLDPPEAEVQIDRLITGRLQSLQTYVTQQLIRAAEIRASANLAATKMSECVLGQSKRVDFCGKGYHLMSFPQSAPHGVVFLHVTYVFAQEKNFTTAPAICHDGKAHFPREGVFVSNGTHWFVTQRNFYEPQIITTDNTFVSGNCDVVIGIVNNTVYDPLQPELDSFKEELDKYFKNHTSPDVDLGDISGINASVVNIQKEIDRLNEVAKNLNESLIDLQELGKYEQYIKGGGGSDIIKLLNEQVNKEMQSSNLYMSMSSWCYTHSLDGAGLFLFDHAAEEYEHAKKLIIFLNENNVPVQLTSISAPEHKFEGLTQIFQKAYEHEQHISESINNIVDHAIKSKDHATFNFLQWYVAEQHEEEVLFKDILDKIELIGNENHGLYLADQYVKGIAKSRKS

SEQ ID NO: 4858 - protein, 1379 aa, Artificial Sequence
  SARS-CoV-2/France/HF1805/2020__EPI_ISL_414628 spike protein (1-1211)(K986P_V987P_P1069F) Ferritin construct
MFVFLVLLPLVSSQCVNLTTRTQLPPAYTNSFTRGVYYPDKVFRSSVLHSTQDLFLPFFSNVTWFHAIHVSGTNGTKRFDNPVLPFNDGVYFASTEKSNIIRGWIFGTTLDSKTQSLLIVNNATNVVIKVCEFQFCNDPFLGVYYHKNNKSWMESEFRVYSSANNCTFEYVSQPFLMDLEGKQGNFKNLREFVFKNIDGYFKIYSKHTPINLVRDLPQGFSALEPLVDLPIGINITRFQTLLALHRSYLTPGDSSSGWTAGAAAYYVGYLQPRTFLLKYNENGTITDAVDCALDPLSETKCTLKSFTVEKGIYQTSNFRVQPTESIVRFPNITNLCPFGEVFNATRFASVYAWNRKRISNCVADYSVLYNSASFSTFKCYGVSPTKLNDLCFTNVYADSFVIRGDEVRQIAPGQTGKIADYNYKLPDDFTGCVIAWNSNNLDSKVGGNYNYLYRLFRKSNLKPFERDISTEIYQAGSTPCNGVEGFNCYFPLQSYGFQPTNGVGYQPYRVVVLSFELLHAPATVCGPKKSTNLVKNKCVNFNFNGLTGTGVLTESNKKFLPFQQFGRDIADTTDAVRDPQTLEILDITPCSFGGVSVITPGTNTSNQVAVLYQGVNCTEVPVAIHADQLTPTWRVYSTGSNVFQTRAGCLIGAEHVNNSYECDIPIGAGICASYQTQTNSPRRARSVASQSIIAYTMSLGAENSVAYSNNSIAIPTNFTISVTTEILPVSMTKTSVDCTMYICGDSTECSNLLLQYGSFCTQLNRALTGIAVEQDKNTQEVFAQVKQIYKTPPIKDFGGFNFSQILPDPSKPSKRSFIEDLLFNKVTLADAGFIKQYGDCLGDIAARDLICAQKFNGLTVLPPLLTDEMIAQYTSALLAGTITSGWTFGAGAALQIPFAMQMAYRFNGIGVTQNVLYENQKLIANQFNSAIGKIQDSLSSTASALGKLQDVVNQNAQALNTLVKQLSSNFGAISSVLNDILSRLDPPEAEVQIDRLITGRLQSLQTYVTQQLIRAAEIRASANLAATKMSECVLGQSKRVDFCGKGYHLMSFPQSAPHGVVFLHVTYVFAQEKNFTTAPAICHDGKAHFPREGVFVSNGTHWFVTQRNFYEPQIITTDNTFVSGNCDVVIGVVNNTVYDPLQPELDSFKEELDKYFKNHTSPDVDLGDISGINASVVNIQKEIDRLNEVAKNLNESLIDLQELGKYEQYIKGGGGSDIIKLLNEQVNKEMQSSNLYMSMSSWCYTHSLDGAGLFLFDHAAEEYEHAKKLIIFLNENNVPVQLTSISAPEHKFEGLTQIFQKAYEHEQHISESINNIVDHAIKSKDHATFNFLQWYVAEQHEEEVLFKDILDKIELIGNENHGLYLADQYVKGIAKSRKS

SEQ ID NO: 4859 - protein, 1379 aa, Artificial Sequence
  SARS-CoV-2/Netherlands/ZuidHolland_9/2020__EPI_ISL_414445 spike protein (1-1211)(K986P_V987P_P1069F) Ferritin construct
MFVFLVLLPLVSSQCVNLTTRTQLPPAYTNSFTRGVYYPDKVFRSSVLHSTQDLFLPFFSNVTWFHAIHVSGTNGTKRFDNPVLPFNDGVYFASTEKSNIIRGWIFGTTLDSKTQSLLIVNNATNVVIKVCEFQFCNDPFLGVYYHKNNKSWMESEFRVYSSANNCTFEYVSQPFLMDLEGKQGNFKNLREFVFKNIDGYFKIYSKHTPINLVRDLPQGFSALEPLVDLPIGINITRFQTLLALHRSYLTPGDSSSGWTAGAAAYYVGYLQPRTFLLKYNENGTITDAVDCALDPLSETKCTLKSFTVEKGIYQTSNFRVQPTESIVRFPNITNLCPFGEVFNATRFASVYAWNRKRISNCVADYSVLYNSASFSTFKCYGVSPTKLNDLCFTNVYADSFVIRGDEVRQIAPGQTGKIADYNYKLPDDFTGCVIAWNSNNLDSKVGGNYNYLYRLFRKSNLKPFERDISTEIYQAGSTPCNGVEGFNCYFPLQSYGFQPTNGVGYQPYRVVVLSFELLHAPATVCGPKKSTNLVKNKCVNFNFNGLTGTGVLTESNKKFLPFQQFGRDIADTTDAVRDPQTLEILDITPCSFGGVSVITPGTNTSNQVAVLYQGVNCTEVPVAIHADQLTPTWRVYSTGSNVFQTRAGCLIGAEHVNNSYECDIPIGAGICASYQTQTNSPRRARSVASQSIIAYTMSLGAENSVAYSNNSIAIPTNFTISVTTEILPVSMTKTSVDCTMYICGDSTECSNLLLQYGSFCTQLNRALTGIAVEQDKNTQEVFAQVKQIYKTPPIKDFGGFNFSQILPDPSKPSKRSFIEDLLFNKVTLADAGFIKQYGDCLGDIAARDLICVQKFNGLTVLPPLLTDEMIAQYTSALLAGTITSGWTFGAGAALQIPFAMQMAYRFNGIGVTQNVLYENQKLIANQFNSAIGKIQDSLSSTASALGKLQDVVNQNAQALNTLVKQLSSNFGAISSVLNDILSRLDPPEAEVQIDRLITGRLQSLQTYVTQQLIRAAEIRASANLAATKMSECVLGQSKRVDFCGKGYHLMSFPQSAPHGVVFLHVTYVFAQEKNFTTAPAICHDGKAHFPREGVFVSNGTHWFVTQRNFYEPQIITTDNTFVSGNCDVVIGIVNNTVYDPLQPELDSFKEELDKYFKNHTSPDVDLGDISGINASVVNIQKEIDRLNEVAKNLNESLIDLQELGKYEQYIKGGGGSDIIKLLNEQVNKEMQSSNLYMSMSSWCYTHSLDGAGLFLFDHAAEEYEHAKKLIIFLNENNVPVQLTSISAPEHKFEGLTQIFQKAYEHEQHISESINNIVDHAIKSKDHATFNFLQWYVAEQHEEEVLFKDILDKIELIGNENHGLYLADQYVKGIAKSRKS

SEQ ID NO: 4860 - protein, 1379 aa, Artificial Sequence
  SARS-CoV-2/Finland/FIN03032020A/2020__EPI_ISL_413602 spike protein (1-1211)(K986P_V987P_P1069F) Ferritin construct
MFVFLVLLPLVSSQCVNLTTRTQLPPAYTNSFTRGVYYPDKVFRSSVLHSTQDLFLPFFSNVTWFHAIHVSGTNGTKRFDNPVLPFNDGVYFASTEKSNIIRGWIFGTTLDSKTQSLLIVNNATNVVIKVCEFQFCNDPFLGVYYHKNNKSWMESEFRVYSSANNCTFEYVSQPFLMDLEGKQGNFKNLREFVFKNIDGYFKIYSKHTPINLVRDLPQGFSALEPLVDLPIGINITRFQTLLALHRSYLTPGDSSSGWTAGAAAYYVGYLQPRTFLLKYNENGTITDAVDCALDPLSETKCTLKSFTVEKGIYQTSNFRVQPTESIVRFPNITNLCPFGEVFNATRFASVYAWNRKRISNCVADYSVLYNSASFSTFKCYGVSPTKLNDLCFTNVYADSFVIRGDEVRQIAPGQTGKIADYNYKLPDDFTGCVISWNSNNLDSKVGGNYNYLYRLFRKSNLKPFERDISTEIYQAGSTPCNGVEGFNCYFPLQSYGFQPTNGVGYQPYRVVVLSFELLHAPATVCGPKKSTNLVKNKCVNFNFNGLTGTGVLTESNKKFLPFQQFGRDIADTTDAVRDPQTLEILDITPCSFGGVSVITPGTNTSNQVAVLYQGVNCTEVPVAIHADQLTPTWRVYSTGSNVFQTRAGCLIGAEHVNNSYECDIPIGAGICASYQTQTNSPRRARSVASQSIIAYTMSLGAENSVAYSNNSIAIPTNFTISVTTEILPVSMTKTSVDCTMYICGDSTECSNLLLQYGSFCTQLNRALTGIAVEQDKNTQEVFAQVKQIYKTPPIKDFGGFNFSQILPDPSKPSKRSFIEDLLFNKVTLADAGFIKQYGDCLGDIAARDLICAQKFNGLTVLPPLLTDEMIAQYTSALLAGTITSGWTFGAGAALQIPFAMQMAYRFNGIGVTQNVLYENQKLIANQFNSAIGKIQDSLSSTASALGKLQDVVNQNAQALNTLVKQLSSNFGAISSVLNDILSRLDPPEAEVQIDRLITGRLQSLQTYVTQQLIRAAEIRASANLAATKMSECVLGQSKRVDFCGKGYHLMSFPQSAPHGVVFLHVTYVFAQEKNFTTAPAICHDGKAHFPREGVFVSNGTHWFVTQRNFYEPQIITTDNTFVSGNCDVVIGIVNNTVYDPLQPELDSFKEELDKYFKNHTSPDVDLGDISGINASVVNIQKEIDRLNEVAKNLNESLIDLQELGKYEQYIKGGGGSDIIKLLNEQVNKEMQSSNLYMSMSSWCYTHSLDGAGLFLFDHAAEEYEHAKKLIIFLNENNVPVQLTSISAPEHKFEGLTQIFQKAYEHEQHISESINNIVDHAIKSKDHATFNFLQWYVAEQHEEEVLFKDILDKIELIGNENHGLYLADQYVKGIAKSRKS

SEQ ID NO: 4861 - protein, 1379 aa, Artificial Sequence
  SARS-CoV-2/France/GE1977/2020__EPI_ISL_414632 spike protein (1-1211)(K986P_V987P_P1069F) Ferritin construct
MFVFLVLLPLVSSQCVNLTTRTQLPPAYTNSFTRGVYYPDKVFRSSVLHSTQDLFLPFFSNVTWFHAIHVSGTNGTKRFDNPVLPFNDGVYFASTEKSNIIRGWIFGTTLDSKTQSLLIVNNATNVVIKVCEFQFCNDPFLGVYYHKNNKSWMESEFRVYSSANNCTFEYVSQPFLMDLEGKQGNFKNLREFVFKNIDGYFKIYSKHTPINLVRDLPQGFSALEPLVDLPIGINITRFQTLLALHRSYLTPGDSSSGWTAGAAAYYVGYLQPRTFLLKYNENGTITDAVDCALDPLSETKCTLKSFTVEKGIYQTSNFRVQPTESIVRFPNITNLCPFGEVFNATRFASVYAWNRKRISNCVADYSVLYNSASFSTFKCYGVSPTKLNDLCFTNVYADSFVIRGDEVRQIAPGQTGKIADYNYKLPDDFTGCVIAWNSNNLDSKVGGNYNYLYRLFRKSNLKPFERDISTEIYQAGSTPCNGVEGFNCYFPLQSYGFQPTNGVGYQPYRVVVLSFELLHAPATVCGPKKSTNLVKNKCVNFNFNGLTGTGVLTESNKKFLPFQQFGRDIADTTDAVRDPQTLEILDITPCSFGGVSVITPGTNTSNQVAVLYQGVNCTEVPVAIHADQLTPTWRVYSTGSNVFQTRAGCLIGAEHVNNSYECDIPIGAGICASYQTQTNSPRRARSVASQSIIAYTMSLGAENSVAYSNNSIAIPTNFTISVTTEILPVSMTKTSVDCTMYICGDSTECSNLLLQYGSFCTQLNRALTGIAVEQDKNTQEVFAQVKQIYKTPPIKDFGGFNFSQILPDPSKPSKRSFIEDLLFNKVTLADAGFIKQYGDCLGDIAARDLICAQKFNGLTVLPPLLTDEMIAQYTSALLAGTITSGWTFGAGAALQIPFAMQMAYRFNGIGVTQNVLYENQKLIANQFNSAIGKIQDSLFSTASALGKLQDVVNQNAQALNTLVKQLSSNFGAISSVLNDILSRLDPPEAEVQIDRLITGRLQSLQTYVTQQLIRAAEIRASANLAATKMSECVLGQSKRVDFCGKGYHLMSFPQSAPHGVVFLHVTYVFAQEKNFTTAPAICHDGKAHFPREGVFVSNGTHWFVTQRNFYEPQIITTDNTFVSGNCDVVIGIVNNTVYDPLQPELDSFKEELDKYFKNHTSPDVDLGDISGINASVVNIQKEIDRLNEVAKNLNESLIDLQELGKYEQYIKGGGGSDIIKLLNEQVNKEMQSSNLYMSMSSWCYTHSLDGAGLFLFDHAAEEYEHAKKLIIFLNENNVPVQLTSISAPEHKFEGLTQIFQKAYEHEQHISESINNIVDHAIKSKDHATFNFLQWYVAEQHEEEVLFKDILDKIELIGNENHGLYLADQYVKGIAKSRKS

SEQ ID NO: 4862 - protein, 1379 aa, Artificial Sequence
  SARS-CoV-2/Finland/FIN-313/2020__EPI_ISL_414641 spike protein (1-1211)(K986P_V987P_P1069F) Ferritin construct
MFVFLVLLPLVSSQCVNLTTRTQLPPAYTNSFTRGVYYPDKVFRSSVLHSTQDLFLPFFSNVTWFHAIHVSGTNGTKRFDNPVLPFNDGVYFASTEKSNIIRGWIFGTTLDSKTQSLLIVNNATNVVIKVCEFQFCNDPFLGVYYHKNNKSWMESEFRVYSSANNCTFEYVSQPFLMDLEGKQGNFKNLREFVFKNIDGYFKIYSKHTPINLVRDLPQGFSALEPLVDLPIGINITRFKTLLALHRSYLTPGDSSSGWTAGAAAYYVGYLQPRTFLLKYNENGTITDAVDCALDPLSETKCTLKSFTVEKGIYQTSNFRVQPTESIVRFPNITNLCPFGEVFNATRFASVYAWNRKRISNCVADYSVLYNSASFSTFKCYGVSPTKLNDLCFTNVYADSFVIRGDEVRQIAPGQTGKIADYNYKLPDDFTGCVIAWNSNNLDSKVGGNYNYLYRLFRKSNLKPFERDISTEIYQAGSTPCNGVEGFNCYFPLQSYGFQPTNGVGYQPYRVVVLSFELLHAPATVCGPKKSTNLVKNKCVNFNFNGLTGTGVLTESNKKFLPFQQFGRDIADTTDAVRDPQTLEILDITPCSFGGVSVITPGTNTSNQVAVLYQGVNCTEVPVAIHADQLTPTWRVYSTGSNVFQTRAGCLIGAEHVNNSYECDIPIGAGICASYQTQTNSPRRARSVASQSIIAYTMSLGAENSVAYSNNSIAIPTNFTISVTTEILPVSMTKTSVDCTMYICGDSTECSNLLLQYGSFCTQLNRALTGIAVEQDKNTQEVFAQVKQIYKTPPIKDFGGFNFSQILPDPSKPSKRSFIEDLLFNKVTLADAGFIKQYGDCLGDIAARDLICAQKFNGLTVLPPLLTDEMIAQYTSALLAGTITSGWTFGAGAALQIPFAMQMAYRFNGIGVTQNVLYENQKLIANQFNSAIGKIQDSLSSTASALGKLQDVVNQNAQALNTLVKQLSSNFGAISSVLNDILSRLDPPEAEVQIDRLITGRLQSLQTYVTQQLIRAAEIRASANLAATKMSECVLGQSKRVDFCGKGYHLMSFPQSAPHGVVFLHVTYVFAQEKNFTTAPAICHDGKAHFPREGVFVSNGTHWFVTQRNFYEPQIITTDNTFVSGNCDVVIGIVNNTVYDPLQPELDSFKEELDKYFKNHTSPDVDLGDISGINASVVNIQKEIDRLNEVAKNLNESLIDLQELGKYEQYIKGGGGSDIIKLLNEQVNKEMQSSNLYMSMSSWCYTHSLDGAGLFLFDHAAEEYEHAKKLIIFLNENNVPVQLTSISAPEHKFEGLTQIFQKAYEHEQHISESINNIVDHAIKSKDHATFNFLQWYVAEQHEEEVLFKDILDKIELIGNENHGLYLADQYVKGIAKSRKS

SEQ ID NO: 4863 - protein, 1379 aa, Artificial Sequence
  SARS-CoV-2/Netherlands/ZuidHolland_2/2020__EPI_ISL_414556 spike protein (1-1211)(K986P_V987P_P1069F) Ferritin construct
MFVFLVLLPLVSSQCVNLTTRTQLPPAYTNSFTRGVYYPDKVFRSSVLHSTQDLFLPFFSNVTWFHAIHVSGTNGTKRFDNPVLPFNDGVYFASTEKSNIIRGWIFGTTLDSKTQSLLIVNNATNVVIKVCEFQFCNDPFLGVYYHKNNKSWMESEFRVYSSANNCTFEYVSQPFLMDLEGKQGNFKNLREFVFKNIDGYFKIYSKHTPINLVRDLPQGFSALEPLVDLPIGINITRFQTLLALHRSYLTPGDSSSGWTAGAAAYYVGYLQPRTFLLKYNENGTITDAVDCALDPLSETKCTLKSFTVEKGIYQTSNFRVQPTESIVRFPNITNLCPFGEVFNATRFASVYAWNRKRISNCVADYSVLYNSASFSTFKCYGVSPTKLNDLCFTNVYADSFVIRGDEVRQIAPGQTGKIADYNYKLPDDFTGCVIAWNSNNLDSKVGGNYNYLYRLFRKSNLKPFERDISTEIYQAGSTPCNGVEGFNCYFPLQSYGFQPTNGVGYQPYRVVVLSFELLHAPATVCGPKKSTNLVKNKCVNFNFNGLTGTGVLTESNKKFLPFQQFGRDIADTTDAVRDPQTLEILDITPCSFGGVSVITPGTNTSNQVAVLYQGVNCTEVPVAIHADQLTPTWRVYSTGSNVFQTRAGCLIGAEHVNNSYECDIPIGAGICASYQTQTNSPRRARSVASQSIIAYTMSLGAENSVAYSNNSIAIPTNFTISVTTEILPVSMTKTSVDCTMYICGDSTECSNLLLQYGSFCTQLNRALTGIALEQDKNTQEVFAQVKQIYKTPPIKDFGGFNFSQILPDPSKPSKRSFIEDLLFNKVTLADAGFIKQYGDCLGDIAARDLICAQKFNGLTVLPPLLTDEMIAQYTSALLAGTITSGWTFGAGAALQIPFAMQMAYRFNGIGVTQNVLYENQKLIANQFNSAIGKIQDSLSSTASALGKLQDVVNQNAQALNTLVKQLSSNFGAISSVLNDILSRLDPPEAEVQIDRLITGRLQSLQTYVTQQLIRAAEIRASANLAATKMSECVLGQSKRVDFCGKGYHLMSFPQSAPHGVVFLHVTYVFAQEKNFTTAPAICHDGKAHFPREGVFVSNGTHWFVTQRNFYEPQIITTDNTFVSGNCDVVIGIVNNTVYDPLQPELDSFKEELDKYFKNHTSPDVDLGDISGINASVVNIQKEIDRLNEVAKNLNESLIDLQELGKYEQYIKGGGGSDIIKLLNEQVNKEMQSSNLYMSMSSWCYTHSLDGAGLFLFDHAAEEYEHAKKLIIFLNENNVPVQLTSISAPEHKFEGLTQIFQKAYEHEQHISESINNIVDHAIKSKDHATFNFLQWYVAEQHEEEVLFKDILDKIELIGNENHGLYLADQYVKGIAKSRKS

SEQ ID NO: 4864 - protein, 1379 aa, Artificial Sequence
  SARS-CoV-2/USA/WA-UW31/2020__EPI_ISL_414618 spike protein (1-1211)(K986P_V987P_P1069F) Ferritin construct
MFVFLVLLPLVSSQCVNLTTRTQLPPAYTNSFTRGVYYPDKVFRSSVLHSTQDLFLPFFSNVTWFHAIHVSGTNGTKRFDNPVLPFNDGVYFASTEKSNIIRGWIFGTTLDSKTQSLLIVNNATNVVIKVCEFQFCNDPFLGVYYHKNNKSWMESEFRVYSSANNCTFEYVSQPFLMDLEGKQGNFKNLREFVFKNIDGYFKIYSKHTPINLVRDLPQGFSALEPLVDLPIGINITRFQTLLALHRSYLTPGDSSSGWTAGAAAYYVGYLQPRTFLLKYNENGTITDAVDCALDPLSETKCTLKSFTVEKGIYQTSNFRVQPTESIVRFPNITNLCPFGEVFNATRFASVYAWNRKRISNCVADYSVLYNSASFSTFKCYGVSPTKLNDLCFTNVYADSFVIRGDEVRQIAPGQTGKIADYNYKLPDDFTGCVIAWNSNNLDSKVGGNYNYLYRLFRKSNLKPFERDISTEIYQAGSTPCNGAEGFNCYFPLQSYGFQPTNGVGYQPYRVVVLSFELLHAPATVCGPKKSTNLVKNKCVNFNFNGLTGTGVLTESNKKFLPFQQFGRDIADTTDAVRDPQTLEILDITPCSFGGVSVITPGTNTSNQVAVLYQDVNCTEVPVAIHADQLTPTWRVYSTGSNVFQTRAGCLIGAEHVNNSYECDIPIGAGICASYQTQTNSPRRARSVASQSIIAYTMSLGAENSVAYSNNSIAIPTNFTISVTTEILPVSMTKTSVDCTMYICGDSTECSNLLLQYGSFCTQLNRALTGIAVEQDKNTQEVFAQVKQIYKTPPIKDFGGFNFSQILPDPSKPSKRSFIEDLLFNKVTLADAGFIKQYGDCLGDIAARDLICAQKFNGLTVLPPLLTDEMIAQYTSALLAGTITSGWTFGAGAALQIPFAMQMAYRFNGIGVTQNVLYENQKLIANQFNSAIGKIQDSLSSTASALGKLQDVVNQNAQALNTLVKQLSSNFGAISSVLNDILSRLDPPEAEVQIDRLITGRLQSLQTYVTQQLIRAAEIRASANLAATKMSECVLGQSKRVDFCGKGYHLMSFPQSAPHGVVFLHVTYVFAQEKNFTTAPAICHDGKAHFPREGVFVSNGTHWFVTQRNFYEPQIITTDNTFVSGNCDVVIGIVNNTVYDPLQPELDSFKEELDKYFKNHTSPDVDLGDISGINASVVNIQKEIDRLNEVAKNLNESLIDLQELGKYEQYIKGGGGSDIIKLLNEQVNKEMQSSNLYMSMSSWCYTHSLDGAGLFLFDHAAEEYEHAKKLIIFLNENNVPVQLTSISAPEHKFEGLTQIFQKAYEHEQHISESINNIVDHAIKSKDHATFNFLQWYVAEQHEEEVLFKDILDKIELIGNENHGLYLADQYVKGIAKSRKS

SEQ ID NO: 4865 - protein, 1379 aa, Artificial Sequence
  SARS-CoV-2/South Korea/SNU01/2020__EPI_ISL_411929 spike protein (1-1211)(K986P_V987P_P1069F) Ferritin construct
MFVFLVLLPLVSSQCVNLTTRTQLPPAYTNSFTRGVYYPDKVFRSSVLHSTQDLFLPFFSNVTWFHAIHVSGTNGTKRFDNPVLPFNDGVYFASTEKSNIIRGWIFGTTLDSKTQSLLIVNNATNVVIKVCEFQFCNDPFLGVYYHKNNKSWMESEFRVYSSANNCTFEYVSQPFLMDLEGKQGNFKNLREFVFKNIDGYFKIYSKHTPINLVRDLPQGFWALEPLVDLPIGINITRFQTLLALHRSYLTPGDSSSGWTAGAAAYYVGYLQPRTFLLKYNENGTITDAVDCALDPLSETKCTLKSFTVEKGIYQTSNFRVQPTESIVRFPNITNLCPFGEVFNATRFASVYAWNRKRISNCVADYSVLYNSASFSTFKCYGVSPTKLNDLCFTNVYADSFVIRGDEVRQIAPGQTGKIADYNYKLPDDFTGCVIAWNSNNLDSKVGGNYNYLYRLFRKSNLKPFERDISTEIYQAGSTPCNGVEGFNCYFPLQSYGFQPTNGVGYQPYRVVVLSFELLHAPATVCGPKKSTNLVKNKCVNFNFNGLTGTGVLTESNKKFLPFQQFGRDIADTTDAVRDPQTLEILDITPCSFGGVSVITPGTNTSNQVAVLYQDVNCTEVPVAIHADQLTPTWRVYSTGSNVFQTRAGCLIGAEHVNNSYECDIPIGAGICASYQTQTNSPRRARSVASQSIIAYTMSLGAENSVAYSNNSIAIPTNFTISVTTEILPVSMTKTSVDCTMYICGDSTECSNLLLQYGSFCTQLNRALTGIAVEQDKNTQEVFAQVKQIYKTPPIKDFGGFNFSQILPDPSKPSKRSFIEDLLFNKVTLADAGFIKQYGDCLGDIAARDLICAQKFNGLTVLPPLLTDEMIAQYTSALLAGTITSGWTFGAGAALQIPFAMQMAYRFNGIGVTQNVLYENQKLIANQFNSAIGKIQDSLSSTASALGKLQDVVNQNAQALNTLVKQLSSNFGAISSVLNDILSRLDPPEAEVQIDRLITGRLQSLQTYVTQQLIRAAEIRASANLAATKMSECVLGQSKRVDFCGKGYHLMSFPQSAPHGVVFLHVTYVFAQEKNFTTAPAICHDGKAHFPREGVFVSNGTHWFVTQRNFYEPQIITTDNTFVSGNCDVVIGIVNNTVYDPLQPELDSFKEELDKYFKNHTSPDVDLGDISGINASVVNIQKEIDRLNEVAKNLNESLIDLQELGKYEQYIKGGGGSDIIKLLNEQVNKEMQSSNLYMSMSSWCYTHSLDGAGLFLFDHAAEEYEHAKKLIIFLNENNVPVQLTSISAPEHKFEGLTQIFQKAYEHEQHISESINNIVDHAIKSKDHATFNFLQWYVAEQHEEEVLFKDILDKIELIGNENHGLYLADQYVKGIAKSRKS

SEQ ID NO: 4866 - protein, 1379 aa, Artificial Sequence
  SARS-CoV-2/China/WF0004/2020__EPI_ISL_413694 spike protein (1-1211)(K986P_V987P_P1069F) Ferritin construct
MFVFLVLLPLVSSQCVNLTTRTQLPPAYTNSFTRGVYYPDKVFRSSVLHSTQDLFLPFFSNVTWFHAIHVSGTNGTKRFDNPVLPFNDGVYFASTEKSNIIRGWIFGTTLDSKTQSLLIVNNATNVVIKVCEFQFCNDPFLGVYYHKNNKSWTESEFRVYSSANNCTFEYVSQPFLMDLEGKQGNFKNLREFVFKNIDGYFKIYSKHTPINLVRDLPQGFSALEPLVDLPIGINITRFQTLLALHRSYLTPGDSSSGWTAGAAAYYVGYLQPRTFLLKYNENGTITDAVDCALDPLSETKCTLKSFTVEKGIYQTSNFRVQPTESIVRFPNITNLCPFGEVFNATRFASVYAWNRKRISNCVADYSVLYNSASFSTFKCYGVSPTKLNDLCFTNVYADSFVIRGDEVRQIAPGQTGKIADYNYKLPDDFTGCVIAWNSNNLDSKVGGNYNYLYRLFRKSNLKPFERDISTEIYQAGSTPCNGVEGFNCYFPLQSYGFQPTNGVGYQPYRVVVLSFELLHAPATVCGPKKSTNLVKNKCVNFNFNGLTGTGVLTESNKKFLPFQQFGRDIADTTDAVRDPQTLEILDITPCSFGGVSVITPGTNTSNQVAVLYQDVNCTEVPVAIHADQLTPTWRVYSTGSNVFQTRAGCLIGAEHVNNSYECDIPIGAGICASYQTQTNSPRRARSVASQSIIAYTMSLGAENSVAYSNNSIAIPTNFTISVTTEILPVSMTKTSVDCTMYICGDSTECSNLLLQYGSFCTQLNRALTGIAVEQDKNTQEVFAQVKQIYKTPPIKDFGGFNFSQILPDPSKPSKRSFIEDLLFNKVTLADAGFIKQYGDCLGDIAARDLICAQKFNGLTVLPPLLTDEMIAQYTSALLAGTITSGWTFGAGAALQIPFAMQMAYRFNGIGVTQNVLYENQKLIANQFNSAIGKIQDSLSSTASALGKLQDVVNQNAQALNTLVKQLSSNFGAISSVLNDILSRLDPPEAEVQIDRLITGRLQSLQTYVTQQLIRAAEIRASANLAATKMSECVLGQSKRFDFCGKGYHLMSFPQSAPHGVVFLHVTYVFAQEKNFTTAPAICHDGKAHFPREGVFVSNGTHWFVTQRNFYEPQIITTDNTFVSGNCDVVIGIVNNTVYDPLQPELDSFKEELDKYFKNHTSPDVDLGDISGINASVVNIQKEIDRLNEVAKNLNESLIDLQELGKYEQYIKGGGGSDIIKLLNEQVNKEMQSSNLYMSMSSWCYTHSLDGAGLFLFDHAAEEYEHAKKLIIFLNENNVPVQLTSISAPEHKFEGLTQIFQKAYEHEQHISESINNIVDHAIKSKDHATFNFLQWYVAEQHEEEVLFKDILDKIELIGNENHGLYLADQYVKGIAKSRKS

SEQ ID NO: 4867 - protein, 1379 aa, Artificial Sequence
  SARS-CoV-2/China/WF0028/2020__EPI_ISL_413791 spike protein (1-1211)(K986P_V987P_P1069F) Ferritin construct
MFVFLVLLPLVSSQCVNLTTRTQLPPAYTNSFTRGVYYPDKVFRSSVLHSTQDLFLPFFSNVTWFHAIHVSGTNGTKRFDNPVLPFNDGVYFASTEKSNIIRGWIFGTTLDSKTQSLLIVNNATNVVIKVCEFQFCNDPFLGVYYHKNNKSWMESEFRVYSSANNCTFEYVSQPFLMDLEGKQGNFKNLREFVFKNIDGYFKIYSKHTPINLVRDLPQGFSALEPLVDLPIGINITRFQTLLALHRSYLTPGDSSSGWTAGAAAYYVGYLQPRTFLLKYNENGTITDAVDCALDPLSETKCTLKSFTVEKGIYQTSNFRVQPTESIVRFPNITNLCPFGEVFNATRFASVYAWNRKRISNCVADYSVLYNSASFSTFKCYGVSPTKLNDLCFTNVYADSFVIRGDEVRQIAPGQTGKIADYNYKLPDDFTGCVIAWNSNNLDSKVGGNYNYLYRLFRKSNLKPFERDISTEIYQAGSTPCNGVEGFNCYFPLQSYGFQPTNGVGYQPYRVVVLSFELLHAPATVCGPKKSTNLVKNKCVNFNFNGLTGTGVLTESNKKFLPFQQFGRDIADTTDAVRDPQTLEILDITPCSFGGVSVITPGTNTSNQVAVLYQDVNCTEVPVAIHADQLTPTWRVYSTGSNVFQTRAGCLIGAEHVNNSYECDIPIGAGICASYQTQTNSPRRARSVASQSIIAYTMSLGAENSVAYSNNSIAIPTNFTISVTTEILPVSMTKTSVDCTMYICGDSTECSNLLLQYGSFCTQLNRALTGIAVEQDKNTQEVFAQVKQIYKTPPIKDFGGFNFSQILPDPSKPSKRSFIEDLLFNKVTLADAGFIKQYGDCLGDIAARDLICAQKFNGLTVLPPLLTDEMIAQYTSALLAGTITSGWTFGAGAALQIPFAMQMAYRFNGIGVTQNVLYENQKLIANQFNSAIGKIQDSLSSTASALGKLQDVVNQNAQALNTLVKQLSSNFGAISSVLNDILSRLDPPEAEVQIDRLITGRLQSLQTYVTQQLIRAAEIRASANLAATKMSECVLGQSKRVDFCGKGYHLMSFPQSAPHGVVFLHVTYVFAQEKNFTTAPAICHDGKAHFPREGVFVSNGTHWFVTQRNFYEPQIITTDNTFVSGNCDVVIGIVNNTVYDPLQPELESFKEELDKYFKNHTSPDVDLGDISGINASVVNIQKEIDRLNEVAKNLNESLIDLQELGKYEQYIKGGGGSDIIKLLNEQVNKEMQSSNLYMSMSSWCYTHSLDGAGLFLFDHAAEEYEHAKKLIIFLNENNVPVQLTSISAPEHKFEGLTQIFQKAYEHEQHISESINNIVDHAIKSKDHATFNFLQWYVAEQHEEEVLFKDILDKIELIGNENHGLYLADQYVKGIAKSRKS

SEQ ID NO: 4868 - protein, 1379 aa, Artificial Sequence
  SARS-CoV-2/2019-nCoV/USA-CruiseA-18/2020__MT159716.1 spike protein (1-1211)(K986P_V987P_P1069F) Ferritin construct
MFVFLVLLPLVSSQCVNLTTRTQLPPAYTNSFTRGVYYPDKVFRSSVLHSTQDLFLPFFSNVTWFHAIHVSGTNGTKRFDNPVLPFNDGVYFASTEKSNIIRGWIFGTTLDSKTQSLLIVNNATNVVIKVCEFQFCNDPFLGVYYHKNNKSWMESELRVYSSANNCTFEYVSQPFLMDLEGKQGNFKNLREFVFKNIDGYFKIYSKHTPINLVRDLPQGFSALEPLVDLPIGINITRFQTLLALHRSYLTPGDSSSGWTAGAAAYYVGYLQPRTFLLKYNENGTITDAVDCALDPLSETKCTLKSFTVEKGIYQTSNFRVQPTESIVRFPNITNLCPFGEVFNATRFASVYAWNRKRISNCVADYSVLYNSASFSTFKCYGVSPTKLNDLCFTNVYADSFVIRGDEVRQIAPGQTGKIADYNYKLPDDFTGCVIAWNSNNLDSKVGGNYNYLYRLFRKSNLKPFERDISTEIYQAGSTPCNGVEGFNCYFPLQSYGFQPTNGVGYQPYRVVVLSFELLHAPATVCGPKKSTNLVKNKCVNFNFNGLTGTGVLTESNKKFLPFQQFGRDIADTTDAVRDPQTLEILDITPCSFGGVSVITPGTNTSNQVAVLYQDVNCTEVPVAIHADQLTPTWRVYSTGSNVFQTRAGCLIGAEHVNNSYECDIPIGAGICASYQTQTNSPRRARSVASQSIIAYTMSLGAENSVAYSNNSIAIPTNFTISVTTEILPVSMTKTSVDCTMYICGDSTECSNLLLQYGSFCTQLNRALTGIAVEQDKNTQEVFAQVKQIYKTPPIKDFGGFNFSQILPDPSKPSKRSFIEDLLFNKVTLADAGFIKQYGDCLGDIAARDLICAQKFNGLTVLPPLLTDEMIAQYTSALLAGTITSGWTFGAGAALQIPFAMQMAYRFNGIGVTQNVLYENQKLIANQFNSAIGKIQDSLSSTASALGKLQDVVNQNAQALNTLVKQLSSNFGAISSVLNDILSRLDPPEAEVQIDRLITGRLQSLQTYVTQQLIRAAEIRASANLAATKMSECVLGQSKRVDFCGKGYHLMSFPQSAPHGVVFLHVTYVFAQEKNFTTAPAICHDGKAHFPREGVFVSNGTHWFVTQRNFYEPQIITTDNTFVSGNCDVVIGIVNNTVYDPLQPELDSFKEELDKYFKNHTSPDVDLGDISGINASVVNIQKEIDRLNEVAKNLNESLIDLQELGKYEQYIKGGGGSDIIKLLNEQVNKEMQSSNLYMSMSSWCYTHSLDGAGLFLFDHAAEEYEHAKKLIIFLNENNVPVQLTSISAPEHKFEGLTQIFQKAYEHEQHISESINNIVDHAIKSKDHATFNFLQWYVAEQHEEEVLFKDILDKIELIGNENHGLYLADQYVKGIAKSRKS

SEQ ID NO: 4869 - protein, 1379 aa, Artificial Sequence
  SARS-CoV-2/SARS-CoV-2/Yunnan-01/human/2020/CHN__MT049951.1 spike protein (1-1211)(K986P_V987P_P1069F) Ferritin construct
MFVFLVLLPLVSSQCVNLTTRTQLPPANTNSFTRGVYYPDKVFRSSVLHSTQDLFLPFFSNVTWFHAIHVSGTNGTKRFDNPVLPFNDGVYFASTEKSNIIRGWIFGTTLDSKTQSLLIVNNATNVVIKVCEFQFCNDPFLGVYYHKNNKSWMESEFRVYSSANNCTFEYVSQPFLMDLEGKQGNFKNLREFVFKNIDGYFKIYSKHTPINLVRDLPQGFSALEPLVDLPIGINITRFQTLLALHRSYLTPGDSSSGWTAGAAAYYVGYLQPRTFLLKYNENGTITDAVDCALDPLSETKCTLKSFTVEKGIYQTSNFRVQPTESIVRFPNITNLCPFGEVFNATRFASVYAWNRKRISNCVADYSVLYNSASFSTFKCYGVSPTKLNDLCFTNVYADSFVIRGDEVRQIAPGQTGKIADYNYKLPDDFTGCVIAWNSNNLDSKVGGNYNYLYRLFRKSNLKPFERDISTEIYQAGSTPCNGVEGFNCYFPLQSYGFQPTNGVGYQPYRVVVLSFELLHAPATVCGPKKSTNLVKNKCVNFNFNGLTGTGVLTESNKKFLPFQQFGRDIADTTDAVRDPQTLEILDITPCSFGGVSVITPGTNTSNQVAVLYQDVNCTEVPVAIHADQLTPTWRVYSTGSNVFQTRAGCLIGAEHVNNSYECDIPIGAGICASYQTQTNSPRRARSVASQSIIAYTMSLGAENSVAYSNNSIAIPTNFTISVTTEILPVSMTKTSVDCTMYICGDSTECSNLLLQYGSFCTQLNRALTGIAVEQDKNTQEVFAQVKQIYKTPPIKDFGGFNFSQILPDPSKPSKRSFIEDLLFNKVTLADAGFIKQYGDCLGDIAARDLICAQKFNGLTVLPPLLTDEMIAQYTSALLAGTITSGWTFGAGAALQIPFAMQMAYRFNGIGVTQNVLYENQKLIANQFNSAIGKIQDSLSSTASALGKLQDVVNQNAQALNTLVKQLSSNFGAISSVLNDILSRLDPPEAEVQIDRLITGRLQSLQTYVTQQLIRAAEIRASANLAATKMSECVLGQSKRVDFCGKGYHLMSFPQSAPHGVVFLHVTYVFAQEKNFTTAPAICHDGKAHFPREGVFVSNGTHWFVTQRNFYEPQIITTDNTFVSGNCDVVIGIVNNTVYDPLQPELDSFKEELDKYFKNHTSPDVDLGDISGINASVVNIQKEIDRLNEVAKNLNESLIDLQELGKYEQYIKGGGGSDIIKLLNEQVNKEMQSSNLYMSMSSWCYTHSLDGAGLFLFDHAAEEYEHAKKLIIFLNENNVPVQLTSISAPEHKFEGLTQIFQKAYEHEQHISESINNIVDHAIKSKDHATFNFLQWYVAEQHEEEVLFKDILDKIELIGNENHGLYLADQYVKGIAKSRKS

SEQ ID NO: 4870 - protein, 1379 aa, Artificial Sequence
  SARS-CoV-2/USA/WA-UW292/2020__EPI_ISL_418077 spike protein (1-1211)(K986P_V987P_P1069F) Ferritin construct
MFVFLVLLPLVSSQCVNLTTRTQLPPAYTNSFTRGVYYPDKVFRSSVLHSTQDLFLPFFSNVTWFHAIHVSGTNGTKRFDNPVLPFNDGVYFASTEKSNIIRGWIFGTTLDSKTQSLLIVNNATNVVIKVCEFQFCNDPFLGVYYHKNNKSWMESEFRVYSSANNCTFEYVSQPFLMDLEGKQGNFKNLREFVFKNIDGYFKIYSKHTPINLVRDLPQGFSALEPLVDLPIGINITRFQTLLALHRSYLTPGDSSSGWTAGAAAYYVGYLQPRTFLLKYNENGTITDAVDCALDPLSETKCTLKSFTVEKGIYQTSNFRVQPTESIVRFPNITNLCPFGEVFNATRFASVYAWNRKRISNCVADYSVLYNSASFSTFKCYGVSPTKLNDLCFTNVYADSFVIRGDEVRQIAPGQTGKIADYNYKLPDDFTGCVIAWNSNNLDSKVGGNYNYLYRLFRKSNLKPFERDISTEIYQASSTPCNGVEGFNCYFPLQSYGFQPTNGVGYQPYRVVVLSFELLHAPATVCGPKKSTNLVKNKCVNFNFNGLTGTGVLTESNKKFLPFQQFGRDIADTTDAVRDPQTLEILDITPCSFGGVSVITPGTNTSNQVAVLYQDVNCTEVPVAIHADQLTPTWRVYSTGSNVFQTRAGCLIGAEHVNNSYECDIPIGAGICASYQTQTNSPRRARSVASQSIIAYTMSLGAENSVAYSNNSIAIPTNFTISVTTEILPVSMTKTSVDCTMYICGDSTECSNLLLQYGSFCTQLNRALTGIAVEQDKNTQEVFAQVKQIYKTPPIKDFGGFNFSQILPDPSKPSKRSFIEDLLFNKVTLADAGFIKQYGDCLGDIAARDLICAQKFNGLTVLPPLLTDEMIAQYTSALLAGTITSGWTFGAGAALQIPFAMQMAYRFNGIGVTQNVLYENQKLIANQFNSAIGKIQDSLSSTASALGKLQDVVNQNAQALNTLVKQLSSNFGAISSVLNDILSRLDPPEAEVQIDRLITGRLQSLQTYVTQQLIRAAEIRASANLAATKMSECVLGQSKRVDFCGKGYHLMSFPQSAPHGVVFLHVTYVFAQEKNFTTAPAICHDGKAHFPREGVFVSNGTHWFVTQRNFYEPQIITTDNTFVSGNCDVVIGIVNNTVYDPLQPELDSFKEELDKYFKNHTSPDVDLGDISGINASVVNIQKEIDRLNEVAKNLNESLIDLQELGKYEQYIKGGGGSDIIKLLNEQVNKEMQSSNLYMSMSSWCYTHSLDGAGLFLFDHAAEEYEHAKKLIIFLNENNVPVQLTSISAPEHKFEGLTQIFQKAYEHEQHISESINNIVDHAIKSKDHATFNFLQWYVAEQHEEEVLFKDILDKIELIGNENHGLYLADQYVKGIAKSRKS

SEQ ID NO: 4871 - protein, 1379 aa, Artificial Sequence
  SARS-CoV-2/Iceland/192/2020__EPI_ISL_417819 spike protein (1-1211)(K986P_V987P_P1069F) Ferritin construct
MFVFFVLLPLVSSQCVNLTTRTQLPPAYTNSFTRGVYYPDKVFRSSVLHSTQDLFLPFFSNVTWFHAIHVSGTNGTKRFDNPVLPFNDGVYFASTEKSNIIRGWIFGTTLDSKTQSLLIVNNATNVVIKVCEFQFCNDPFLGVYYHKNNKSWMESEFRVYSSANNCTFEYVSQPFLMDLEGKQGNFKNLREFVFKNIDGYFKIYSKHTPINLVRDLPQGFSALEPLVDLPIGINITRFQTLLALHRSYLTPGDSSSGWTAGAAAYYVGYLQPRTFLLKYNENGTITDAVDCALDPLSETKCTLKSFTVEKGIYQTSNFRVQPTESIVRFPNITNLCPFGEVFNATRFASVYAWNRKRISNCVADYSVLYNSASFSTFKCYGVSPTKLNDLCFTNVYADSFVIRGDEVRQIAPGQTGKIADYNYKLPDDFTGCVIAWNSNNLDSKVGGNYNYLYRLFRKSNLKPFERDISTEIYQAGSTPCNGVEGFNCYFPLQSYGFQPTNGVGYQPYRVVVLSFELLHAPATVCGPKKSTNLVKNKCVNFNFNGLTGTGVLTESNKKFLPFQQFGRDIADTTDAVRDPQTLEILDITPCSFGGVSVITPGTNTSNQVAVLYQGVNCTEVPVAIHADQLTPTWRVYSTGSNVFQTRAGCLIGAEHVNNSYECDIPIGAGICASYQTQTNSPRRARSVASQSIIAYTMSLGAENSVAYSNNSIAIPTNFTISVTTEILPVSMTKTSVDCTMYICGDSTECSNLLLQYGSFCTQLNRALTGIAVEQDKNTQEVFAQVKQIYKTPPIKDFGGFNFSQILPDPSKPSKRSFIEDLLFNKVTLADAGFIKQYGDCLGDIAARDLICAQKFNGLTVLPPLLTDEMIAQYTSALLAGTITSGWTFGAGAALQIPFAMQMAYRFNGIGVTQNVLYENQKLIANQFNSAIGKIQDSLSSTASALGKLQDVVNQNAQALNTLVKQLSSNFGAISSVLNDILSRLDPPEAEVQIDRLITGRLQSLQTYVTQQLIRAAEIRASANLAATKMSECVLGQSKRVDFCGKGYHLMSFPQSAPHGVVFLHVTYVFAQEKNFTTAPAICHDGKAHFPREGVFVSNGTHWFVTQRNFYEPQIITTDNTFVSGNCDVVIGIVNNTVYDPLQPELDSFKEELDKYFKNHTSPDVDLGDISGINASVVNIQKEIDRLNEVAKNLNESLIDLQELGKYEQYIKGGGGSDIIKLLNEQVNKEMQSSNLYMSMSSWCYTHSLDGAGLFLFDHAAEEYEHAKKLIIFLNENNVPVQLTSISAPEHKFEGLTQIFQKAYEHEQHISESINNIVDHAIKSKDHATFNFLQWYVAEQHEEEVLFKDILDKIELIGNENHGLYLADQYVKGIAKSRKS

SEQ ID NO: 4872 - protein, 1379 aa, Artificial Sequence
  SARS-CoV-2/Belgium/ULG-6939/2020__EPI_ISL_417020 spike protein (1-1211)(K986P_V987P_P1069F) Ferritin construct
MFVFLVLLPLVSSQCVNLTTRTQLPPAYTNSFTRGVYYPDKVFRSSVLHSTQDLFLPFFSNVTWFHAIHVSGTNGTKRFDNPVLPFNDGVYFASTEKSNIIRGWIFGTTLDSKTQSLLIVNNATNVVIKVCEFQFCNDPFLGVYYHKNNKSWMESEFRVYSSANNCTFEYVSQPFLMDLEGKQGNFKNLREFVFKNIDGYFKIYSKHTPINLVRDLPQGFSALEPLVDLPIGINITRFQTLLALHRSYLTPGDSSSGWTAGAAAYYVGYLQPRTFLLKYNENGTITDAVDCALDPLSETKCTLKSFTVEKGIYQTSNFRVQPTESIVRFPNITNLCPFGEVFNATRFASVYAWNRKRISNCVADYSVLYNSASFSTFKCYGVSPTKLNDLCFTNVYADSFVIRGDEVRQIAPGQTGKIADYNYKLPDDFTGCVIAWNSNNLDSKVGGNYNYLYRLFRKSNLKPFERDISTEIYQAGSTPCNGVEGFNCYFPLQSYGFQPTNGVGYQPYRVVVLSFELLHAPATVCGPKKSTNLVKNKCVNFNFNGLTGTGVLTESNKKFLPFQQFGRDIADTTDAVRDPQTLEILDITPCSFGGVSVITPGTNTSNQVAVLYQGVNCTEVPVAIHADQLTPTWRVYSTGSNVFQTRAGCLIGAEHVNNSYECDIPIGAGICASYQTQTNSPRRARSVASQSIIAYTMSLGAENSVVYSNNSIAIPTNFTISVTTEILPVSMTKTSVDCTMYICGDSTECSNLLLQYGSFCTQLNRALTGIAVEQDKNTQEVFAQVKQIYKTPPIKDFGGFNFSQILPDPSKPSKRSFIEDLLFNKVTLADAGFIKQYGDCLGDIAARDLICAQKFNGLTVLPPLLTDEMIAQYTSALLAGTITSGWTFGAGAALQIPFAMQMAYRFNGIGVTQNVLYENQKLIANQFNSAIGKIQDSLSSTASALGKLQDVVNQNAQALNTLVKQLSSNFGAISSVLNDILSRLDPPEAEVQIDRLITGRLQSLQTYVTQQLIRAAEIRASANLAATKMSECVLGQSKRVDFCGKGYHLMSFPQSAPHGVVFLHVTYVFAQEKNFTTAPAICHDGKAHFPREGVFVSNGTHWFVTQRNFYEPQIITTDNTFVSGNCDVVIGIVNNTVYDPLQPELDSFKEELDKYFKNHTSPDVDLGDISGINASVVNIQKEIDRLNEVAKNLNESLIDLQELGKYEQYIKGGGGSDIIKLLNEQVNKEMQSSNLYMSMSSWCYTHSLDGAGLFLFDHAAEEYEHAKKLIIFLNENNVPVQLTSISAPEHKFEGLTQIFQKAYEHEQHISESINNIVDHAIKSKDHATFNFLQWYVAEQHEEEVLFKDILDKIELIGNENHGLYLADQYVKGIAKSRKS

SEQ ID NO: 4873 - protein, 1379 aa, Artificial Sequence
  SARS-CoV-2/France/HF2496/2020__EPI_ISL_418231 spike protein (1-1211)(K986P_V987P_P1069F) Ferritin construct
MFVFLVLLPLVSSQCVNLTTRTQLPPAYTNSFTRGVYYPDKVFRSSVLHSTQDLFLPFFSNVTWFHAIHVSGTNGTKRFDNPVLPFNDGVYFASTEKSNIIRGWIFGTTLDSKTQSLLIVNNATNVVIKVCEFQFCNDPFLGVYYHKNNKSWMESEFRVYSSANNCTFEYVSQPFLMDLEGKQGNFKNLREFVFKNIDGYFKIYSKHTPINLVRDLPQGFSALEPLVDLPIGINITRFQTLLALHRSYLTPGDSSSGWTAGAAAYYVGYLQPRTFLLKYNENGTITDAVDCALDPLSETKCTLKSFTVEKGIYQTSNFRVQPTESIVRFPNITNLCPFGEVFNATRFASVYAWNRKRISNCVADYSVLYNSASFSTFKCYGVSPTKLNDLCFTNVYADSFVIRGDEVRQIAPGQTGKIADYNYKLPDDFTGCVIAWNSNNLDSKVGGNYNYLYRLFRKSNLKPFERDISTEIYQAGSTPCNGVEGFNCYFPLQSYGFQPTNGVGYQPYRVVVLSFELLHAPATVCGPKKSTNLVKNKCVNFNFNGLTGTGVLTESNKKFLPFQQFGRDIADTTDAVRDPQTLEILDITPCSFGGVSVITPGTNTSNQVAVLYQGVNCTEVPVAIHADQLTPTWRVYSTGSNVFQTRAGCLIGAEHVNNSYECDIPIGAGICASYQTQTNSPRRARSVASQSIIAYTMSLGAENSVAYSNNSIAIPTNFTISVTTEILPVSMTKTSVDCTMYICGDSTECSNLLLQYGSFCTQLNRALTGIAVEQDKNTQEVFAQVKQIYKTPPIKDFGGFNFSQILPDPSKPSKRSFIEDLLFNKVTLADAGFIKQYGDCLGDIVARDLICAQKFNGLTVLPPLLTDEMIAQYTSALLAGTITSGWTFGAGAALQIPFAMQMAYRFNGIGVTQNVLYENQKLIANQFNSAIGKIQDSLSSTASALGKLQDVVNQNAQALNTLVKQLSSNFGAISSVLNDILSRLDPPEAEVQIDRLITGRLQSLQTYVTQQLIRAAEIRASANLAATKMSECVLGQSKRVDFCGKGYHLMSFPQSAPHGVVFLHVTYVFAQEKNFTTAPAICHDGKAHFPREGVFVSNGTHWFVTQRNFYEPQIITTDNTFVSGNCDVVIGIVNNTVYDPLQPELDSFKEELDKYFKNHTSPDVDLGDISGINASVVNIQKEIDRLNEVAKNLNESLIDLQELGKYEQYIKGGGGSDIIKLLNEQVNKEMQSSNLYMSMSSWCYTHSLDGAGLFLFDHAAEEYEHAKKLIIFLNENNVPVQLTSISAPEHKFEGLTQIFQKAYEHEQHISESINNIVDHAIKSKDHATFNFLQWYVAEQHEEEVLFKDILDKIELIGNENHGLYLADQYVKGIAKSRKS

SEQ ID NO: 4874 - protein, 1379 aa, Artificial Sequence
  SARS-CoV-2/USA/WA-UW291/2020__EPI_ISL_418076 spike protein (1-1211)(K986P_V987P_P1069F) Ferritin construct
MFVFLVLLPLVSSQCVNLTTRTQLPPAYTNSFTRGVYYPDKVFRSSVLHSTQDLFLPFFSNVTWFHAIHVSGTNGTKRFDNPVLPFNDGVYFASTEKSNIIRGWIFGTTLDSKTQSLLIVNNATNVVIKVCEFQFCNDPFLGVYYHKNNKSWMESEFRVYSSANNCTFEYVSQPFLMDLEGKQGNFKNLREFVFKNIDGYFKIYSKHTPINLVRDLPQGFSALEPLVDLPIGINITRFQTLLALHRSYLTPGDSSSGWTAGAAAYYVGYLQPRTFLLKYNENGTITDAVDCALDPLSETKCTLKSFTVEKGIYQTSNFRVQPTESIVRFPNITNLCPFGEVFNATRFASVYAWNRKRISNCVADYSVLYNSASFSTFKCYGVSPTKLNDLCFTNVYADSFVIRGDEVRQIAPGQTGKIADYNYKLPDDFTGCVIAWNSNNLDSKVGGNYNYLYRLFRKSNLKPFERDISTEIYQAGSTPCNGVEGFNCYFPLQSYGFQPTNGVGYQPYRVVVLSFELLHAPATVCGPKKSTNLVKNKCVNFNFNGLTGTGVLTESNKKFLPFQQFGRDIADTTDAVRDPQTLEILDITPCSFGGVSVITPGTNTSNQVAVLYQGVNCTEVPVAIHADQLTPTWRVYSTGSNVFQTRAGCLIGAEHVNNSYECDIPIGAGICASYQTQTNSPRRARSVASQSIIAYTMSLGAENSVAYSNNSIAIPTNFTISVTTEILPVSMTKTSVDCTMYICGDSTECSNLLLQYGSFCTQLNRALTGIAVEQDKNTQEVFAQVKQIYKTPPIKDFGGFNFSQILPDPSKPSKRSFIEDLLFNKVTLADAGFIKQYGDCLGDIAARDLICAQKFNGLTVLPPLLTDEMIAQYTSALLAGTITSGWTFGAGAALQIPFAMQMAYRFNGIGVTQNVLYENQKLIANQFNSAIGKIQYSLSSTASALGKLQDVVNQNAQALNTLVKQLSSNFGAISSVLNDILSRLDPPEAEVQIDRLITGRLQSLQTYVTQQLIRAAEIRASANLAATKMSECVLGQSKRVDFCGKGYHLMSFPQSAPHGVVFLHVTYVFAQEKNFTTAPAICHDGKAHFPREGVFVSNGTHWFVTQRNFYEPQIITTDNTFVSGNCDVVIGIVNNTVYDPLQPELDSFKEELDKYFKNHTSPDVDLGDISGINASVVNIQKEIDRLNEVAKNLNESLIDLQELGKYEQYIKGGGGSDIIKLLNEQVNKEMQSSNLYMSMSSWCYTHSLDGAGLFLFDHAAEEYEHAKKLIIFLNENNVPVQLTSISAPEHKFEGLTQIFQKAYEHEQHISESINNIVDHAIKSKDHATFNFLQWYVAEQHEEEVLFKDILDKIELIGNENHGLYLADQYVKGIAKSRKS

SEQ ID NO: 4875 - protein, 1379 aa, Artificial Sequence; identical to SEQ ID NO: 4838
  SARS-CoV-2/Portugal/PT0034/2020__EPI_ISL_418019 spike protein (1-1211)(K986P_V987P_P1069F) Ferritin construct

SEQ ID NO: 4876 - protein, 1379 aa, Artificial Sequence
  SARS-CoV-2/Iceland/202/2020__EPI_ISL_417750 spike protein (1-1211)(K986P_V987P_P1069F) Ferritin construct
MFVFLVLLPLVSSQCVNLTTRTQLPPAYTNSFTRGVYYPDKVFRSSVLHSTQDLFLPFFSNVTWFHAIHVSGTNGTKRFDNPVLPFNDGVYFASTEKSNIIRGWIFGTTLDSKTQSLLIVNNATNVVIKVCEFQFCNDPFLGVYYHKNNKSWMESEFRVYSSANNCTFEYVSQPFLMDLEGKQGNFKNLREFVFKNIDGYFKIYSKHTPINLVRDLPQGFSALEPLVDLPIGINITRFQTLLALHRSYLTPGDSSSGWTAGAAAYYVGYLQPRTFLLKYNENGTITDAVDCALDPLSETKCTLKSFTVEKGIYQTSNFRVQPTESIVRFPNITNLCPFGEVFNATRFASVYAWNRKRISNCVADYSVLYNSASFSTFKCYGVSPTKLNDLCFTNVYADSFVIRGDEVRQIAPGQTGKIADYNYKLPDDFTGCVIAWNSNNLDSKVGGNYNYLYRLFRKSNLKPFERDISTEIYQAGSTPCNGVEGFNCYFPLQSYGFQPTNGVGYQPYRVVVLSFELLHAPATVCGPKKSTNLVKNKCVNFNFNGLTGTGVLTESNKKFLPFQQFGRDIADTTDAVRDPQTLEILDITPCSFGGVSVITPGTNTSNQVAVLYQDVNCTEVPVAIHADQLTPTWRVYSTGSNVFQTRAGCLIGAEHVNNSYECDIPIGAGICASYQTQTNSPRRARSVASQSIIAYTMSLGAENSVAYSNNSIAIPTNFTISVTTEILPVSMTKTSVDCTMYICGDSTECSNLLLQYGSFCTQLNRALTGIAVEQDKNTQEVFAQVKQIYKTPPIKDFGGFNFSQILPDPSKPSKRSFIEDLLFNKVTLADAGFIKQYGDCLGDIAARDLICAQKFNGLTVLPPLLTDEMIAQYTSALLAGTITSGWTFGAGAALQIPFAMQMAYRFNGIGVTQNVLYENQKLIANQFNSAIGKIQDSLSSTASALGKLQDVVNQNAQALNTLVKQLSSNFGAISSVLNDILSRLDPPEAEVQIDRLITGRLQSLQTYVTQQLIRAAEIRASANLAATKMSECVLGQSKRVDFCGKGYHLMSFPQSAPHGVVFLHVTYVFAQEKNFTTAPAICHDGKAHFPREGVFVSNGTHWFVTQRNFYEPQIITTDNTFVSGNCDVVIGIVNNTVYDPLQPELDSFKEELDKYFKNHTSPDVDLGDIPGINASVVNIQKEIDRLNEVAKNLNESLIDLQELGKYEQYIKGGGGSDIIKLLNEQVNKEMQSSNLYMSMSSWCYTHSLDGAGLFLFDHAAEEYEHAKKLIIFLNENNVPVQLTSISAPEHKFEGLTQIFQKAYEHEQHISESINNIVDHAIKSKDHATFNFLQWYVAEQHEEEVLFKDILDKIELIGNENHGLYLADQYVKGIAKSRKS

SEQ ID NO: 4877 - protein, 1379 aa, Artificial Sequence
  SARS-CoV-2/USA/WA-UW261/2020__EPI_ISL_418046 spike protein (1-1211)(K986P_V987P_P1069F) Ferritin construct
MFVFLVLLPLVSSQCVNLTTRTQLPPAYTNSFTRGVYYPDKVFRSSVLHSTQDLFLPFFSNVTWFHAIHVSGTNGTKRFDNPVLPFNDGVYFASTEKSNIIRGWIFGTTLDSKTQSLLIVNNATNVVIKVCEFQFCNDPFLGVYYHKNNKSWMESEFRVYSSANNCTFEYVSQPFLMDLEGKQGNFKNLREFVFKNIDGYFKIYSKHTPINLVRDLPQGFSALEPLVDLPIGINITRFQTLLALHRSYLTPGDSSSGWTAGAAAYYVGYLQPRTFLLKYNENGTITDAVDCALDPLSETKCTLKSFTVEKGIYQTSNFRVQPTESIVRFPNITNLCPFGEVFNATRFTSVYAWNRKRISNCVADYSVLYNSASFSTFKCYGVSPTKLNDLCFTNVYADSFVIRGDEVRQIAPGQTGKIADYNYKLPDDFTGCVIAWNSNNLDSKVGGNYNYLYRLFRKSNLKPFERDISTEIYQAGSTPCNGVEGFNCYFPLQSYGFQPTNGVGYQPYRVVVLSFELLHAPATVCGPKKSTNLVKNKCVNFNFNGLTGTGVLTESNKKFLPFQQFGRDIADTTDAVRDPQTLEILDITPCSFGGVSVITPGTNTSNQVAVLYQDVNCTEVPVAIHADQLTPTWRVYSTGSNVFQTRAGCLIGAEHVNNSYECDIPIGAGICASYQTQTNSPRRARSVASQSIIAYTMSLGAENSVAYSNNSIAIPTNFTISVTTEILPVSMTKTSVDCTMYICGDSTECSNLLLQYGSFCTQLNRALTGIAVEQDKNTQEVFAQVKQIYKTPPIKDFGGFNFSQILPDPSKPSKRSFIEDLLFNKVTLADAGFIKQYGDCLGDIAARDLICAQKFNGLTVLPPLLTDEMIAQYTSALLAGTITSGWTFGAGAALQIPFAMQMAYRFNGIGVTQNVLYENQKLIANQFNSAIGKIQDSLSSTASALGKLQDVVNQNAQALNTLVKQLSSNFGAISSVLNDILSRLDPPEAEVQIDRLITGRLQSLQTYVTQQLIRAAEIRASANLAATKMSECVLGQSKRVDFCGKGYHLMSFPQSAPHGVVFLHVTYVFAQEKNFTTAPAICHDGKAHFPREGVFVSNGTHWFVTQRNFYEPQIITTDNTFVSGNCDVVIGIVNNTVYDPLQPELDSFKEELDKYFKNHTSPDVDLGDISGINASVVNIQKEIDRLNEVAKNLNESLIDLQELGKYEQYIKGGGGSDIIKLLNEQVNKEMQSSNLYMSMSSWCYTHSLDGAGLFLFDHAAEEYEHAKKLIIFLNENNVPVQLTSISAPEHKFEGLTQIFQKAYEHEQHISESINNIVDHAIKSKDHATFNFLQWYVAEQHEEEVLFKDILDKIELIGNENHGLYLADQYVKGIAKSRKS

SEQ ID NO: 4878 - protein, 1379 aa, Artificial Sequence
  SARS-CoV-2/Portugal/PT0035/2020__EPI_ISL_418020 spike protein (1-1211)(K986P_V987P_P1069F) Ferritin construct
MFVFLVLLPLVSSQCVNLTTRTQLPPAYTNSFTRGVYYPDKVFRSSVLHSTQDLFLPFFSNVTWFHAIHVSGTNGTKRFDNPVLPFNDGVYFASTEKSNIIRGWIFGTTLDSKTQSLLIVNNATNVVIKVCEFQFCNDPFLGVYYHKNNKSWMESEFRVYSSANNCTFEYVSQPFLMDLEGKQGNFKNLREFVFKNIDGYFKIYSKHTPINLVRDLPQGFSALEPLVDLPIGINITRFQTLLALHRSYLTPGDSSSGWTAGAAAYYVGYLQPRTFLLKYNENGTITDAVDCALDPLSETKCTLKSFTVEKGIYQTSNFRVQPTESIVRFPNITNLCPFGEVFNATRFASVYAWNRKRISNCVADYSVLYNSASFSTFKCYGVSPTKLNDLCFTNVYADSFVIRGDEVRQIAPGQTGKIADYNYKLPDDFTGCVIAWNSNNLDSKVGGNYNYLYRLFRKSNLKPFERDISTEIYQAGSTPCNGVEGFNCYFPLQSYGFQPTNGVGYQPYRVVVLSFELLHAPATVCGPKKSTNLVKNKCVNFNFNGLTGTGVLTESNKKFLPFQQFGRDIADTTDAVRDPQTLEILDITPCSFGGVSVITPGTNTSNQVAVLYQDVNCTEVPVAIHADQLTPTWRVYSTGSNVFQTRAGCLIGAEHVNNSYECDIPIGAGICASYQTQTNSPRRARSVASQSIIAYTMSLGAENSVAYSNNSIAIPTNFTISVTTEILPVSMTKTSVDCTMYICGDSTECSNLLLQYGSFCTQLNRALTGIAVEQDKNTQEVFAQVKQIYKTPPIKDFGGFNFSQILPDPSKPSKRSFIEDLLFNKVTLADAGFIKQYGDCLGDISARDLICAQKFNGLTVLPPLLTDEMIAQYTSALLAGTITSGWTFGAGAALQIPFAMQMAYRFNGIGVTQNVLYENQKLIANQFNSAIGKIQDSLSSTASALGKLQDVVNQNAQALNTLVKQLSSNFGAISSVLNDILSRLDPPEAEVQIDRLITGRLQSLQTYVTQQLIRAAEIRASANLAATKMSECVLGQSKRVDFCGKGYHLMSFPQSAPHGVVFLHVTYVFAQEKNFTTAPAICHDGKAHFPREGVFVSNGTHWFVTQRNFYEPQIITTDNTFVSGNCDVVIGIVNNTVYDPLQPELDSFKEELDKYFKNHTSPDVDLGDISGINASVVNIQKEIDRLNEVAKNLNESLIDLQELGKYEQYIKGGGGSDIIKLLNEQVNKEMQSSNLYMSMSSWCYTHSLDGAGLFLFDHAAEEYEHAKKLIIFLNENNVPVQLTSISAPEHKFEGLTQIFQKAYEHEQHISESINNIVDHAIKSKDHATFNFLQWYVAEQHEEEVLFKDILDKIELIGNENHGLYLADQYVKGIAKSRKS

SEQ ID NO: 4879 - protein, 1379 aa, Artificial Sequence
  SARS-CoV-2/USA/NY-NYUMC7/2020__EPI_ISL_418192 spike protein (1-1211)(K986P_V987P_P1069F) Ferritin construct
MFVFLVLLPLVSSQCVNLTTRTQLPPAYTNSFTRGVYYPDKVFRSSVLHSTQDLFLPFFSNVTWFHAIHVSGTNGTKRFDNPVLPFNDGVYFASTEKSNIIRGWIFGTTLDSKTQSLLIVNNATNVVIKVCEFQFCNDPFLGVYHHKNNKSWMESEFRVYSSANNCTFEYVSQPFLMDLEGKQGNFKNLREFVFKNIDGYFKIYSKHTPINLVRDLPQGFSALEPLVDLPIGINITRFQTLLALHRSYLTPGDSSSGWTAGAAAYYVGYLQPRTFLLKYNENGTITDAVDCALDPLSETKCTLKSFTVEKGIYQTSNFRVQPTESIVRFPNITNLCPFGEVFNATRFASVYAWNRKRISNCVADYSVLYNSASFSTFKCYGVSPTKLNDLCFTNVYADSFVIRGDEVRQIAPGQTGKIADYNYKLPDDFTGCVIAWNSNNLDSKVGGNYNYLYRLFRKSNLKPFERDISTEIYQAGSTPCNGVEGFNCYFPLQSYGFQPTNGVGYQPYRVVVLSFELLHAPATVCGPKKSTNLVKNKCVNFNFNGLTGTGVLTESNKKFLPFQQFGRDIADTTDAVRDPQTLEILDITPCSFGGVSVITPGTNTSNQVAVLYQGVNCTEVPVAIHADQLTPTWRVYSTGSNVFQTRAGCLIGAEHVNNSYECDIPIGAGICASYQTQTNSPRRARSVASQSIIAYTMSLGAENSVAYSNNSIAIPTNFTISVTTEILPVSMTKTSVDCTMYICGDSTECSNLLLQYGSFCTQLNRALTGIAVEQDKNTQEVFAQVKQIYKTPPIKDFGGFNFSQILPDPSKPSKRSFIEDLLFNKVTLADAGFIKQYGDCLGDIAARDLICAQKFNGLTVLPPLLTDEMIAQYTSALLAGTITSGWTFGAGAALQIPFAMQMAYRFNGIGVTQNVLYENQKLIANQFNSAIGKIQDSLSSTASALGKLQDVVNQNAQALNTLVKQLSSNFGAISSVLNDILSRLDPPEAEVQIDRLITGRLQSLQTYVTQQLIRAAEIRASANLAATKMSECVLGQSKRVDFCGKGYHLMSFPQSAPHGVVFLHVTYVFAQEKNFTTAPAICHDGKAHFPREGVFVSNGTHWFVTQRNFYEPQIITTDNTFVSGNCDVVIGIVNNTVYDPLQPELDSFKEELDKYFKNHTSPDVDLGDISGINASVVNIQKEIDRLNEVAKNLNESLIDLQELGKYEQYIKGGGGSDIIKLLNEQVNKEMQSSNLYMSMSSWCYTHSLDGAGLFLFDHAAEEYEHAKKLIIFLNENNVPVQLTSISAPEHKFEGLTQIFQKAYEHEQHISESINNIVDHAIKSKDHATFNFLQWYVAEQHEEEVLFKDILDKIELIGNENHGLYLADQYVKGIAKSRKS

SEQ ID NO: 4880 - protein, 1379 aa, Artificial Sequence
  SARS-CoV-2/Iceland/189/2020__EPI_ISL_417709 spike protein (1-1211)(K986P_V987P_P1069F) Ferritin construct
MFVFLVLLPLVSSQCVNLTTRTQLPPAYTNSFTRGVYYPDKVFRSSVLHSTQDLFLPFFSNVTWFHAIHVSGTNGTKRFDNPVLPFNDGVYFASTEKSNIIRGWIFGTTLDSKTQSLLIVNNATNVVIKVCEFQFCNDPFLGVYYHKNNKSWMESEFRVYSSANNCTFEYVSQPFLMDLEGKQGNFKNLREFVFKNIDGYFKIYSKHTPINLVRDLPQGFSALEPLVDLPIGINITRFQTLLALHRSYLTPGDSSSGWTAGAAAYYVGYLQPRTFLLKYNENGTITDAVDCALDPLSETKCTLKSFTVEKGIYQTSNFRVQPTESIVRFPNITNLCPFGEVFNATRFASVYAWNRKRISNCVADYSVLYNSASFSTFKCYGVSPTKLNDLCFTNVYADSFVIRGDEVRQIAPGQTGKIADYNYKLPDDFTGCVIAWNSNNLDSKVGGNYNYLYRLFRKSNLKPFERDISTEIYQAGSTPCNGVEGFNCYFPLQSYGFQPTNGVGYQPYRVVVLSFELLHAPATVCGPKKSTNLVKNKCVNFNFNGLTGTGVLTESNKKFLPFQQFGRDIADTTDAVRDPQTLEILDITPCSFGGVSVITPGTNTSNQVAVLYQGVNCTEVPVAIHADQLTPTWRVYSTGSNVFQTRAGCLIGAEHVNNSYECDIPIGAGICASYQTQTNSPRRARSVASQSIIAYTMSLGAENSVAYSNNSIAIPTNFTISVTTEILPVSMTKTSVDCTMYICGDSTECSNLLLQYGSFCTQLNRALTGIAVEQDKNTQEVFAQVKQIYKTPPIKDFGGFNFSQILPDPSKPSKRSFIEDLLFNKVTLADAGFTKQYGDCLGDIAARDLICAQKFNGLTVLPPLLTDEMIAQYTSALLAGTITSGWTFGAGAALQIPFAMQMAYRFNGIGVTQNVLYENQKLIANQFNSAIGKIQDSLSSTASALGKLQDVVNQNAQALNTLVKQLSSNFGAISSVLNDILSRLDPPEAEVQIDRLITGRLQSLQTYVTQQLIRAAEIRASANLAATKMSECVLGQSKRVDFCGKGYHLMSFPQSAPHGVVFLHVTYVFAQEKNFTTAPAICHDGKAHFPREGVFVSNGTHWFVTQRNFYEPQIITTDNTFVSGNCDVVIGIVNNTVYDPLQPELDSFKEELDKYFKNHTSPDVDLGDISGINASVVNIQKEIDRLNEVAKNLNESLIDLQELGKYEQYIKGGGGSDIIKLLNEQVNKEMQSSNLYMSMSSWCYTHSLDGAGLFLFDHAAEEYEHAKKLIIFLNENNVPVQLTSISAPEHKFEGLTQIFQKAYEHEQHISESINNIVDHAIKSKDHATFNFLQWYVAEQHEEEVLFKDILDKIELIGNENHGLYLADQYVKGIAKSRKS

SEQ ID NO: 4881 - protein, 1379 aa, Artificial Sequence
  SARS-CoV-2/Australia/NSW56/2020__EPI_ISL_417408 spike protein (1-1211)(K986P_V987P_P1069F) Ferritin construct
MFVFLVLLPLVSSQCVNLTTRTQLPPAYTNSFTRGVYYPDKVFRSSVLHSTQDLFLPFFSNVTWFHAIHVSGTNGTKRFDNPVLPFNDGVYFASTEKSNIIRGWIFGTTLDSKTQSLLIVNNATNVVIKVCEFQFCNDPFLGVYYHKNNKSWMESEFRVYSSANNCTFEYVSQPFLMDLEGKQGNFKNLREFVFKNIDGYFKIYSKHTPINLVRDLPQGFSALEPLVDLPIGINITRFQTLLALHRSYLTPGDSSSGWTAGAAAYYVGYLQPRTFLLKYNENGTITDAVDCALDPLSETKCTLKSFTVEKGIYQTSNFRVQPTESIVRFPNITNLCPFGEVFNATRFASVYAWNRKRISNCVADYSVLYNSASFSTFKCYGVSPTKLNDLCFTNVYADSFVIRGDEVRQIAPGQTGKIADYNYKLPDDFTGCVIAWNSNNLDSKVGGNYNYLYRLFRKSNLKPFERDISTEIYQAGSTPCNGVEGFNCYFPLQSYGFQPTNGVGYQPYRVVVLSFELLHAPATVCGPKKSTNLVKNKCVNFNFNGLTGTGVLTESNKKFLPFQQFGRDIADTTDAVRDPQTLEILDITPCSFGGVSVITPGTNTSNQVAVLYQDVNCTEVPVAIHADQLTPTWRVYSTGSNVFQTRAGCLIGAEHVNNSYECDIPIGAGICASYQTQTNSPRRARSVASQSIIAYTMSLGAENSVAYSNNSIAIPTNFTISVTTEILPVSMTKTSVDCTMYICGDSTECSNLLLQYGSFCTQLNRALTGIAVEQDKNTQEVFAQVKQIYKTPPIKDFGGFNFSQILPDSSKPSKRSFIEDLLFNKVTLADAGFIKQYGDCLGDIAARDLICAQKFNGLTVLPPLLTDEMIAQYTSALLAGTITSGWTFGAGAALQIPFAMQMAYRFNGIGVTQNVLYENQKLIANQFNSAIGKIQDSLSSTASALGKLQDVVNQNAQALNTLVKQLSSNFGAISSVLNDILSRLDPPEAEVQIDRLITGRLQSLQTYVTQQLIRAAEIRASANLAATKMSECVLGQSKRVDFCGKGYHLMSFPQSAPHGVVFLHVTYVFAQEKNFTTAPAICHDGKAHFPREGVFVSNGTHWFVTQRNFYEPQIITTDNTFVSGNCDVVIGIVNNTVYDPLQPELDSFKEELDKYFKNHTSPDVDLGDISGINASVVNIQKEIDRLNEVAKNLNESLIDLQELGKYEQYIKGGGGSDIIKLLNEQVNKEMQSSNLYMSMSSWCYTHSLDGAGLFLFDHAAEEYEHAKKLIIFLNENNVPVQLTSISAPEHKFEGLTQIFQKAYEHEQHISESINNIVDHAIKSKDHATFNFLQWYVAEQHEEEVLFKDILDKIELIGNENHGLYLADQYVKGIAKSRKS

SEQ ID NO: 4882 - protein, 1379 aa, Artificial Sequence
  SARS-CoV-2/Iceland/280/2020__EPI_ISL_417608 spike protein (1-1211)(K986P_V987P_P1069F) Ferritin construct
MFVFLVLLPLVSSQCVNLTTRTQLPPAYTNSFTRGVYYPDKVFRSSVLHSTQDLFLPFFSNVTWFHAIHVSGTNGTKRFDNPVLPFNDGVYFASTEKSNIIRGWIFGTTLDSKTQSLLIVNNATNVVIKVCEFQFCNDPFLGVYYHKNNKSWMESEFRVYSSANNCTFEYVSQPFLMDLEGKQGNFKNLREFVFKNIDGYFKIYSKHTPINLVRDLPQGFSALEPLVDLPIGINITRFQTLLALHRSYLTPGDSSSGWTAGAAAYYVGYLQPRTFLLKYNENGTITDAVDCALDPLSETKCTLKSFTVEKGIYQTSNFRVQPTESIVRFPNITNLCPFGEVFNATRFASVYAWNRKRISNCVADYSVLYNSASFSTFKCYGVSPTKLNDLCFTNVYADSFVIRGDEVRQIAPGQTGKIADYNYKLPDDFTGCVIAWNSNNLDSKVGGNYNYLYRLFRKSNLKPFERDISTEIYQAGSTPCNGVEGFNCYFPLQSYGFQPTNGVGYQPYRVVVLSFELLHAPATVCGPKKSTNLVKNKCVNFNFNGLTGTGVLTESNKKFLPFQQFGRDIADTTDAVRDPQTLEILDITPCSFGGVSVITPGTNTSNQVAVLYQGVNCTEVPVAIHADQLTPTWRVYSTGSNVFQTRAGCLIGAEHVNNSYECDIPIGAGICASYHTQTNSPRRARSVASQSIIAYTMSLGAENSVAYSNNSIAIPTNFTISVTTEILPVSMTKTSVDCTMYICGDSTECSNLLLQYGSFCTQLNRALTGIAVEQDKNTQEVFAQVKQIYKTPPIKDFGGFNFSQILPDPSKPSKRSFIEDLLFNKVTLADAGFIKQYGDCLGDIAARDLICAQKFNGLTVLPPLLTDEMIAQYTSALLAGTITSGWTFGAGAALQIPFAMQMAYRFNGIGVTQNVLYENQKLIANQFNSAIGKIQDSLSSTASALGKLQDVVNQNAQALNTLVKQLSSNFGAISSVLNDILSRLDPPEAEVQIDRLITGRLQSLQTYVTQQLIRAAEIRASANLAATKMSECVLGQSKRVDFCGKGYHLMSFPQSAPHGVVFLHVTYVFAQEKNFTTAPAICHDGKAHFPREGVFVSNGTHWFVTQRNFYEPQIITTDNTFVSGNCDVVIGIVNNTVYDPLQPELDSFKEELDKYFKNHTSPDVDLGDISGINASVVNIQKEIDRLNEVAKNLNESLIDLQELGKYEQYIKGGGGSDIIKLLNEQVNKEMQSSNLYMSMSSWCYTHSLDGAGLFLFDHAAEEYEHAKKLIIFLNENNVPVQLTSISAPEHKFEGLTQIFQKAYEHEQHISESINNIVDHAIKSKDHATFNFLQWYVAEQHEEEVLFKDILDKIELIGNENHGLYLADQYVKGIAKSRKS

SEQ ID NO: 4883 - protein, 1379 aa, Artificial Sequence; identical to SEQ ID NO: 4838
  SARS-CoV-2/Iceland/247/2020__EPI_ISL_417575 spike protein (1-1211)(K986P_V987P_P1069F) Ferritin construct

SEQ ID NO: 4884 - protein, 1379 aa, Artificial Sequence
  SARS-CoV-2/Iceland/238/2020__EPI_ISL_417566 spike protein (1-1211)(K986P_V987P_P1069F) Ferritin construct
MFVFLVLLPLVSSQCVNLTTRTQLPPAYTNSFTRGVYYPDKVFRSSVLHSTQDLFLPFFSNVTWFHAIHVSGTNGTKRFDNPVLPFNDGVYFASTEKSNIIRGWIFGTTLDSKTQSLLIVNNATNVVIKVCEFQFCNDPFLGVYYHKNNKSWMESEFRVYSSANNCTFEYVSQPFLMDLEGKQGNFKNLREFVFKNIDGYFKIYSKHTPINLVRDLPQGFSALEPLVDLPIGINITRFQTLLALHRSYLTPGDSSSGWTAGAAAYYVGYLQPRTFLLKYNENGTITDAVDCALDPLSETKCTLKSFTVEKGIYQTSNFRVQPTESIVRFPNITNLCPFGEVFNATRFASVYAWNRKRISNCVADYSVLYNSASFSTFKCYGVSPTKLNDLCFTNVYADSFVIRGDEVRQIAPGQTGKIADYNYKLPDDFTGCVIAWNSNNLDSKVGGNYNYLYRLFRKSNLKPFERDISTEIYQAGSTPCNGVEGFNCYFPLQSYGFQPTNGVGYQPYRVVVLSFELLHAPATVCGPKKSTNLVKNKCVNFNFNGLTGTGVLTESNKKFLPFQQFGRDIADTTDAVRDPQTLEILDITPCSFGGVSVITPGTNTSNQVAVLYQGVNCTEVPVAIHADQLTPTWRVYSTGSNVFQTRAGCLIGAEHVNNSYECDIPIGAGICASYQTQTNSPRRARSVASQSIIAYTMSLGAENSVAYSNNSIAIPTNFTISVTTEILPVSMTKTSVDCTMYICGDSTECSNLLLQYGSFCTQLNRALTGIAVEQDKNTQEVFAQVKQIYKTPPIKDFGGFNFSQILPDPSKPSKRSFIEDLLFNKVTLADVGFIKQYGDCLGDIAARDLICAQKFNGLTVLPPLLTDEMIAQYTSALLAGTITSGWTFGAGAALQIPFAMQMAYRFNGIGVTQNVLYENQKLIANQFNSAIGKIQDSLSSTASALGKLQDVVNQNAQALNTLVKQLSSNFGAISSVLNDILSRLDPPEAEVQIDRLITGRLQSLQTYVTQQLIRAAEIRASANLAATKMSECVLGQSKRVDFCGKGYHLMSFPQSAPHGVVFLHVTYVFAQEKNFTTAPAICHDGKAHFPREGVFVSNGTHWFVTQRNFYEPQIITTDNTFVSGNCDVVIGIVNNTVYDPLQPELDSFKEELDKYFKNHTSPDVDLGDISGINASVVNIQKEIDRLNEVAKNLNESLIDLQELGKYEQYIKGGGGSDIIKLLNEQVNKEMQSSNLYMSMSSWCYTHSLDGAGLFLFDHAAEEYEHAKKLIIFLNENNVPVQLTSISAPEHKFEGLTQIFQKAYEHEQHISESINNIVDHAIKSKDHATFNFLQWYVAEQHEEEVLFKDILDKIELIGNENHGLYLADQYVKGIAKSRKS

SEQ ID NO: 4885 - protein, 1379 aa, Artificial Sequence
  SARS-CoV-2/Greece/16/2020__EPI_ISL_418265 spike protein (1-1211)(K986P_V987P_P1069F) Ferritin construct
MFVFLVLLPLVSSQCVNLTTRTQLPPAYTNSFTRGVYYPDKVFRSSVLHSTQDLFLPFFSNVTWFHAIHVSGTNGTKRFDNPVLPFNDGVYFASTEKSNIIRGWIFGTTLDSKTQSLLIVNNATNVVIKVCEFQFCNDPFLGVYYHKNNKSWMESEFRVYSSANNCTFEYVSQPFLMDLEGKQGNFKNLREFVFKNVDGYFKIYSKHTPINLVRDLPQGFSALEPLVDLPIGINITRFQTLLALHRSYLTPGDSSSGWTAGAAAYYVGYLQPRTFLLKYNENGTITDAVDCALDPLSETKCTLKSFTVEKGIYQTSNFRVQPTESIVRFPNITNLCPFGEVFNATRFASVYAWNRKRISNCVADYSVLYNSASFSTFKCYGVSPTKLNDLCFTNVYADSFVIRGDEVRQIAPGQTGKIADYNYKLPDDFTGCVIAWNSNNLDSKVGGNYNYLYRLFRKSNLKPFERDISTEIYQAGSTPCNGVEGFNCYFPLQSYGFQPTNGVGYQPYRVVVLSFELLHAPATVCGPKKSTNLVKNKCVNFNFNGLTGTGVLTESNKKFLPFQQFGRDIADTTDAVRDPQTLEILDITPCSFGGVSVITPGTNTSNQVAVLYQDVNCTEVPVAIHADQLTPTWRVYSTGSNVFQTRAGCLIGAEHVNNSYECDIPIGAGICASYQTQTNSPRRARSVASQSIIAYTMSLGAENSVAYSNNSIAIPTNFTISVTTEILPVSMTKTSVDCTMYICGDSTECSNLLLQYGSFCTQLNRALTGIAVEQDKNTQEVFAQVKQIYKTPPIKDFGGFNFSQILPDPSKPSKRSFIEDLLFNKVTLADAGFIKQYGDCLGDIAARDLICAQKFNGLTVLPPLLTDEMIAQYTSALLAGTITSGWTFGAGAALQIPFAMQMAYRFNGIGVTQNVLYENQKLIANQFNSAIGKIQDSLSSTASALGKLQDVVNQNAQALNTLVKQLSSNFGAISSVLNDILSRLDPPEAEVQIDRLITGRLQSLQTYVTQQLIRAAEIRASANLAATKMSECVLGQSKRVDFCGKGYHLMSFPQSAPHGVVFLHVTYVFAQEKNFTTAPAICHDGKAHFPREGVFVSNGTHWFVTQRNFYEPQIITTDNTFVSGNCDVVIGIVNNTVYDPLQPELDSFKEELDKYFKNHTSPDVDLGDISGINASVVNIQKEIDRLNEVAKNLNESLIDLQELGKYEQYIKGGGGSDIIKLLNEQVNKEMQSSNLYMSMSSWCYTHSLDGAGLFLFDHAAEEYEHAKKLIIFLNENNVPVQLTSISAPEHKFEGLTQIFQKAYEHEQHISESINNIVDHAIKSKDHATFNFLQWYVAEQHEEEVLFKDILDKIELIGNENHGLYLADQYVKGIAKSRKS

SEQ ID NO: 4886 - protein, 1379 aa, Artificial Sequence
  SARS-CoV-2/Iceland/319/2020__EPI_ISL_417648 spike protein (1-1211)(K986P_V987P_P1069F) Ferritin construct
MFVFLVLLPLVSSQCVNLTTRTQLPPAYTNSFTRGVYYPDKVFRSSVLHSTQDLFLPFFSNVTWFHAIHVSGTNGTKRFDNPVLPFNDGVYFASTEKSNIIRGWIFGTTLDSKTQSLLIVNNATNVVIKVCEFQFCNDPFLGVYYHKNNKSWMESEFRVYSSANNCTFEYVSQPFLIDLEGKQGNFKNLREFVFKNIDGYFKIYSKHTPINLVRDLPQGFSALEPLVDLPIGINITRFQTLLALHRSYLTPGDSSSGWTAGAAAYYVGYLQPRTFLLKYNENGTITDAVDCALDPLSETKCTLKSFTVEKGIYQTSNFRVQPTESIVRFPNITNLCPFGEVFNATRFASVYAWNRKRISNCVADYSVLYNSASFSTFKCYGVSPTKLNDLCFTNVYADSFVIRGDEVRQIAPGQTGKIADYNYKLPDDFTGCVIAWNSNNLDSKVGGNYNYLYRLFRKSNLKPFERDISTEIYQAGSTPCNGVEGFNCYFPLQSYGFQPTNGVGYQPYRVVVLSFELLHAPATVCGPKKSTNLVKNKCVNFNFNGLTGTGVLTESNKKFLPFQQFGRDIADTTDAVRDPQTLEILDITPCSFGGVSVITPGTNTSNQVAVLYQGVNCTEVPVAIHADQLTPTWRVYSTGSNVFQTRAGCLIGAEHVNNSYECDIPIGAGICASYQTQTNSPRRARSVASQSIIAYTMSLGAENSVAYSNNSIAIPTNFTISVTTEILPVSMTKTSVDCTMYICGDSTECSNLLLQYGSFCTQLNRALTGIAVEQDKNTQEVFAQVKQIYKTPPIKDFGGFNFSQILPDPSKPSKRSFIEDLLFNKVTLADAGFIKQYGDCLGDIAARDLICAQKFNGLTVLPPLLTDEMIAQYTSALLAGTITSGWTFGAGAALQIPFAMQMAYRFNGIGVTQNVLYENQKLIANQFNSAIGKIQDSLSSTASALGKLQDVVNQNAQALNTLVKQLSSNFGAISSVLNDILSRLDPPEAEVQIDRLITGRLQSLQTYVTQQLIRAAEIRASANLAATKMSECVLGQSKRVDFCGKGYHLMSFPQSAPHGVVFLHVTYVFAQEKNFTTAPAICHDGKAHFPREGVFVSNGTHWFVTQRNFYEPQIITTDNTFVSGNCDVVIGIVNNTVYDPLQPELDSFKEELDKYFKNHTSPDVDLGDISGINASVVNIQKEIDRLNEVAKNLNESLIDLQELGKYEQYIKGGGGSDIIKLLNEQVNKEMQSSNLYMSMSSWCYTHSLDGAGLFLFDHAAEEYEHAKKLIIFLNENNVPVQLTSISAPEHKFEGLTQIFQKAYEHEQHISESINNIVDHAIKSKDHATFNFLQWYVAEQHEEEVLFKDILDKIELIGNENHGLYLADQYVKGIAKSRKS

SEQ ID NO: 4887 - protein, 1379 aa, Artificial Sequence
  SARS-CoV-2/Congo/94/2020__EPI_ISL_417947 spike protein (1-1211)(K986P_V987P_P1069F) Ferritin construct
MFVFLVLLPLVSSQCVNLTTRTQLPPAYTNSFTRGVYYPDKVFRSSVLHSTQDLFLPFFSNVTWFHAIHVSGTNGTKRFDNPVLPFNDGVYFASTEKSNIIRGWIFGTTLDSKTQSLLIVNNATNVVIKVCEFQFCNDPFLGVYYHKNNKSWMESEFRVYSSANNCTFEYVSQPFLMDLEGKQGNFKNLREFVFKNIDGYFKIYSKHTPINLVRDLPQGFSALEPLVDLPIGINITRFQTLLALHRSYLTPGDSSSGWTAGAAAYYVGYLQPRTFLLKYNENGTITDAVDCALDPLSETKCTLKSFTVEKGIYQTSNFRVQPTESIVRFPNITNLCPFGEVFNATRFASVYAWNRKRISNCVADYSVLYNSASFSTFKCYGVSPTKLNDLCFTNVYADSFVIRGDEVRQIAPGQTGKIADYNYKLPDDFTGCVIAWNSNNLDSKVGGNYNYLYRLFRKSNLKPFERDISTEIYQAGSTPCNGVEGFNCYFPLQSYGFQPTNGVGYQPYRVVVLSFELLHAPATVCGPKKSTNLVKNKCVNFNFNGLTGTGVLTESNKKFLPFQQFGRDIADTTDAVRDPQTLEILDITPCSFGGVSVITPGTNTSNQVAVLYQGVNCTEVPVAIHADQLTPTWRVYSTGSNVFQTRAGCLIGAEHVNNSYECDIPIGAGICASYQTQTNSPRRARSVASQSIIAYTMSLGAENSVAYSNNSIAIPTNFTISVTTEILPVSMTKTSVDCTMYICGDSTECSNLLLQYGSFCTQLNRALTGIAVEQDKNTQEVFAQVKQIYKTPPIKDFGGFNFSQILPDPSKPSKRSFIEDILFNKVTLADAGFIKQYGDCLGDIAARDLICAQKFNGLTVLPPLLTDEMIAQYTSALLAGTITSGWTFGAGAALQIPFAMQMAYRFNGIGVTQNVLYENQKLIANQFNSAIGKIQDSLSSTASALGKLQDVVNQNAQALNTLVKQLSSNFGAISSVLNDILSRLDPPEAEVQIDRLITGRLQSLQTYVTQQLIRAAEIRASANLAATKMSECVLGQSKRVDFCGKGYHLMSFPQSAPHGVVFLHVTYVFAQEKNFTTAPAICHDGKAHFPREGVFVSNGTHWFVTQRNFYEPQIITTDNTFVSGNCDVVIGIVNNTVYDPLQPELDSFKEELDKYFKNHTSPDVDLGDISGINASVVNIQKEIDRLNEVAKNLNESLIDLQELGKYEQYIKGGGGSDIIKLLNEQVNKEMQSSNLYMSMSSWCYTHSLDGAGLFLFDHAAEEYEHAKKLIIFLNENNVPVQLTSISAPEHKFEGLTQIFQKAYEHEQHISESINNIVDHAIKSKDHATFNFLQWYVAEQHEEEVLFKDILDKIELIGNENHGLYLADQYVKGIAKSRKS

SEQ ID NO: 4888 - protein, 1379 aa, Artificial Sequence
  SARS-CoV-2/Congo/158/2020__EPI_ISL_417950 spike protein (1-1211)(K986P_V987P_P1069F) Ferritin construct
MFVFLVLLPLVSSQCVNLTTRTQLPPAYTNSFTRGVYYPDKVFRSSVLHSTQDLFLPFFSNVTWFHAIHVSGTNGTKRFDNPVLPFNDGVYFASTEKSNIIRGWIFGTTLDSKTQSLLIVNNATNVVIKVCEFQFCNDPFLGVYYHKNNKSWMESEFRVYSSANNCTFEYVSQPFLMDLEGKQGNFKNLREFVFKNIDGYFKIYSKHTPINLVRDLPQGFSALEPLVDLPIGINITRFQTLLALHRSYLTPGDSSSGWTAGAAAYYVGYLQPRTFLLKYNENGTITDAVDCALDPLSETKCTLKSFTVEKGIYQTSNFRVQPTESIVRFPNITNLCPFGEVFNATRFASVYAWNRKRISNCVADYSVLYNSASFSTFKCYGVSPTKLNDLCFTNVYADSFVIRGDEVRQIAPGQTGKIADYNYKLPDDFTGCVIAWNSNNLDSKVGGNYNYLYRLFRKSNLKPFERDISTEIYQAGSTPCNGVEGFNCYFPLQSYGFQPTNGVGYQPYRVVVLSFELLHAPATVCGPKKSTNLVKNKCVNFNFNGLTGTGVLTESNKKFLPFQQFGRDIADTTDAVRDPQTLEILDITPCSFGGVSVITPGTNTSNQVAVLYQDVNCTEVPVAIHADQLTPTWRVYSTGSNVFQTRAGCLIGAEHVNNSYECDIPIGAGICASYQTQTNSPRRARSVASQSIIAYTMSLGAENSVAYSNNSIAIPTNFTISVTTEILPVSMTKTSVDCTMYICGDSTECSNLLLQYGSFCTQLNRALTGIAVEQDKNTQEVFAQVKQIYKTPPIKDFGGFNFSQILPDPSKPSKRSFIEDLLFNKVTLADAGFIKQYGDCLGDIAARDLICAQKFNGLTVLPPLLTDEMIAQYTSALLAGTITSGWTFGAGAALQIPFAMQMAYRFNGIGVTQNVLYENQKLIANQFNSAIGKIQDSLSSTASALGKLQDVVNQNAQALNTLVKQLSSNFGAISSVLNDILSRLDPPEAEVQIDRLITGRLQSLQTYVTQQLIRAAEIRASANLAATKMSECVLGQSKRVDFCGKGYHLMSFPQSAPHGVVFLHVTYVFAQEKNFTTAPAICHDGKAHFPREGVFVSNGTHWFVTQRNFYEPQIITTDNTFLSGNCDVVIGIVNNTVYDPLQPELDSFKEELDKYFKNHTSPDVDLGDISGINASVVNIQKEIDRLNEVAKNLNESLIDLQELGKYEQYIKGGGGSDIIKLLNEQVNKEMQSSNLYMSMSSWCYTHSLDGAGLFLFDHAAEEYEHAKKLIIFLNENNVPVQLTSISAPEHKFEGLTQIFQKAYEHEQHISESINNIVDHAIKSKDHATFNFLQWYVAEQHEEEVLFKDILDKIELIGNENHGLYLADQYVKGIAKSRKS

SEQ ID NO: 4889 - protein, 1379 aa, Artificial Sequence
  SARS-CoV-2/USA/UT-00034/2020__EPI_ISL_417977 spike protein (1-1211)(K986P_V987P_P1069F) Ferritin construct
MFVFLVLLPLVSSQCVNLTTRTQLPPAYTNSFTRGVYYPDKVFRSSVLHSTQDLFLPFFSNVTWFHAIHVSGTNGTKRFDNPVLPFNDGVYFASTEKSNIIRGWIFGTTLDSKTQSLLIVNNATNVVIKVCEFQFCNDPFLGVYYYKNNKSWMESEFRVYSSANNCTFEYVSQPFLMDLEGKQGNFKNLREFVFKNIDGYFKIYSKHTPINLVRDLPQGFSALEPLVDLPIGINITRFQTLLALHRSYLTPGDSSSGWTAGAAAYYVGYLQPRTFLLKYNENGTITDAVDCALDPLSETKCTLKSFTVEKGIYQTSNFRVQPTESIVRFPNITNLCPFGEVFNATRFASVYAWNRKRISNCVADYSVLYNSASFSTFKCYGVSPTKLNDLCFTNVYADSFVIRGDEVRQIAPGQTGKIADYNYKLPDDFTGCVIAWNSNNLDSKVGGNYNYLYRLFRKSNLKPFERDISTEIYQAGSTPCNGVEGFNCYFPLQSYGFQPTNGVGYQPYRVVVLSFELLHAPATVCGPKKSTNLVKNKCVNFNFNGLTGTGVLTESNKKFLPFQQFGRDIADTTDAVRDPQTLEILDITPCSFGGVSVITPGTNTSNQVAVLYQGVNCTEVPVAIHADQLTPTWRVYSTGSNVFQTRAGCLIGAEHVNNSYECDIPIGAGICASYQTQTNSPRRARSVASQSIIAYTMSLGAENSVAYSNNSIAIPTNFTISVTTEILPVSMTKTSVDCTMYICGDSTECSNLLLQYGSFCTQLNRALTGIAVEQDKNTQEVFAQVKQIYKTPPIKDFGGFNFSQILPDPSKPSKRSFIEDLLFNKVTLADAGFIKQYGDCLGDIAARDLICAQKFNGLTVLPPLLTDEMIAQYTSALLAGTITSGWTFGAGAALQIPFAMQMAYRFNGIGVTQNVLYENQKLIANQFNSAIGKIQDSLSSTASALGKLQDVVNQNAQALNTLVKQLSSNFGAISSVLNDILSRLDPPEAEVQIDRLITGRLQSLQTYVTQQLIRAAEIRASANLAATKMSECVLGQSKRVDFCGKGYHLMSFPQSAPHGVVFLHVTYVFAQEKNFTTAPAICHDGKAHFPREGVFVSNGTHWFVTQRNFYEPQIITTDNTFVSGNCDVVIGIVNNTVYDPLQPELDSFKEELDKYFKNHTSPDVDLGDISGINASVVNIQKEIDRLNEVAKNLNESLIDLQELGKYEQYIKGGGGSDIIKLLNEQVNKEMQSSNLYMSMSSWCYTHSLDGAGLFLFDHAAEEYEHAKKLIIFLNENNVPVQLTSISAPEHKFEGLTQIFQKAYEHEQHISESINNIVDHAIKSKDHATFNFLQWYVAEQHEEEVLFKDILDKIELIGNENHGLYLADQYVKGIAKSRKS

SEQ ID NO: 4890 - protein, 1379 aa, Artificial Sequence
  SARS-CoV-2/USA/UT-00033/2020__EPI_ISL_417976 spike protein (1-1211)(K986P_V987P_P1069F) Ferritin construct
MFVFLVLLPLVSSQCVNLTTRTQLPPAYTNSFTRGVYYPDKVFRSSVLHSTQDLFLPFFSNVTWFHAIHVSGTNGTKRFDNPVLPFNDGVYFASTEKSNIIRGWIFGTTLDSKTQSLLIVNNATNVVIKVCEFQFCNDPFLGVYYHKNNKSWMESEFRVYSSANNCTFEYVSQPFLMDLEGKQGNFKNLREFVFKNIDGYFKIYSKHTPINLVRDLPQGFSALEPLVDLPIGINITRFQTLLALHRSYLTPGDSSSGLTAGAAAYYVGYLQPRTFLLKYNENGTITDAVDCALDPLSETKCTLKSFTVEKGIYQTSNFRVQPTESIVRFPNITNLCPFGEVFNATRFASVYAWNRKRISNCVADYSVLYNSASFSTFKCYGVSPTKLNDLCFTNVYADSFVIRGDEVRQIAPGQTGKIADYNYKLPDDFTGCVIAWNSNNLDSKVGGNYNYLYRLFRKSNLKPFERDISTEIYQAGSTPCNGVEGFNCYFPLQSYGFQPTNGVGYQPYRVVVLSFELLHAPATVCGPKKSTNLVKNKCVNFNFNGLTGTGVLTESNKKFLPFQQFGRDIADTTDAVRDPQTLEILDITPCSFGGVSVITPGTNTSNQVAVLYQGVNCTEVPVAIHADQLTPTWRVYSTGSNVFQTRAGCLIGAEHVNNSYECDIPIGAGICASYQTQTNSPRRARSVASQSIIAYTMSLGAENSVAYSNNSIAIPTNFTISVTTEILPVSMTKTSVDCTMYICGDSTECSNLLLQYGSFCTQLNRALTGIAVEQDKNTQEVFAQVKQIYKTPPIKDFGGFNFSQILPDPSKPSKRSFIEDLLFNKVTLADAGFIKQYGDCLGDIAARDLICAQKFNGLTVLPPLLTDEMIAQYTSALLAGTITSGWTFGAGAALQIPFAMQMAYRFNGIGVTQNVLYENQKLIANQFNSAIGKIQDSLSSTASALGKLQDVVNQNAQALNTLVKQLSSNFGAISSVLNDILSRLDPPEAEVQIDRLITGRLQSLQTYVTQQLIRAAEIRASANLAATKMSECVLGQSKRVDFCGKGYHLMSFPQSAPHGVVFLHVTYVFAQEKNFTTAPAICHDGKAHFPREGVFVSNGTHWFVTQRNFYEPQIITTDNTFVSGNCDVVIGIVNNTVYDPLQPELDSFKEELDKYFKNHTSPDVDLGDISGINASVVNIQKEIDRLNEVAKNLNESLIDLQELGKYEQYIKGGGGSDIIKLLNEQVNKEMQSSNLYMSMSSWCYTHSLDGAGLFLFDHAAEEYEHAKKLIIFLNENNVPVQLTSISAPEHKFEGLTQIFQKAYEHEQHISESINNIVDHAIKSKDHATFNFLQWYVAEQHEEEVLFKDILDKIELIGNENHGLYLADQYVKGIAKSRKS

SEQ ID NO: 4891 - protein, 1379 aa, Artificial Sequence
  SARS-CoV-2/USA/WI-13/2020__EPI_ISL_417516 spike protein (1-1211)(K986P_V987P_P1069F) Ferritin construct
MFVFLVLLPLVSSQCVNLTTRTQLPPAYTNSFTRGVYYPDKVFRSSVLHSTQDLFLPFFSNVTWFHAIHVSGTNGTKRFDNPVLPFNDGVYFASTEKSNIIRGWIFGTTLDSKTQSLLIVNNATNVVIKVCEFQFCNDPFLGVYYHKNNKSWMESEFRVYSSANNCTFEYVSQPFLMDLEGKQGNFKNLREFVFKNIDGYFKIYSKHTPINLVRDLPQGFSALEPLVDLPIGINITRFQTLLALHRSYLTPGDSSSGWTAGAAAYYVGYLQPRTFLLKYNENGTITDAVDCALDPLSETKCTLKSFTVEKGIYQTSNFRVLPTESIVRFPNITNLCPFGEVFNATRFASVYAWNRKRISNCVADYSVLYNSASFSTFKCYGVSPTKLNDLCFTNVYADSFVIRGDEVRQIAPGQTGKIADYNYKLPDDFTGCVIAWNSNNLDSKVGGNYNYLYRLFRKSNLKPFERDISTEIYQAGSTPCNGVEGFNCYFPLQSYGFQPTNGVGYQPYRVVVLSFELLHAPATVCGPKKSTNLVKNKCVNFNFNGLTGTGVLTESNKKFLPFQQFGRDIADTTDAVRDPQTLEILDITPCSFGGVSVITPGTNTSNQVAVLYQGVNCTEVPVAIHADQLTPTWRVYSTGSNVFQTRAGCLIGAEHVNNSYECDIPIGAGICASYQTQTNSPRRARSVASQSIIAYTMSLGAENSVAYSNNSIAIPTNFTISVTTEILPVSMTKTSVDCTMYICGDSTECSNLLLQYGSFCTQLNRALTGIAVEQDKNTQEVFAQVKQIYKTPPIKDFGGFNFSQILPDPSKPSKRSFIEDLLFNKVTLADAGFIKQYGDCLGDIAARDLICAQKFNGLTVLPPLLTDEMIAQYTSALLAGTITSGWTFGAGAALQIPFAMQMAYRFNGIGVTQNVLYENQKLIANQFNSAIGKIQDSLSSTASALGKLQDVVNQNAQALNTLVKQLSSNFGAISSVLNDILSRLDPPEAEVQIDRLITGRLQSLQTYVTQQLIRAAEIRASANLAATKMSECVLGQSKRVDFCGKGYHLMSFPQSAPHGVVFLHVTYVFAQEKNFTTAPAICHDGKAHFPREGVFVSNGTHWFVTQRNFYEPQIITTDNTFVSGNCDVVIGIVNNTVYDPLQPELDSFKEELDKYFKNHTSPDVDLGDISGINASVVNIQKEIDRLNEVAKNLNESLIDLQELGKYEQYIKGGGGSDIIKLLNEQVNKEMQSSNLYMSMSSWCYTHSLDGAGLFLFDHAAEEYEHAKKLIIFLNENNVPVQLTSISAPEHKFEGLTQIFQKAYEHEQHISESINNIVDHAIKSKDHATFNFLQWYVAEQHEEEVLFKDILDKIELIGNENHGLYLADQYVKGIAKSRKS

SEQ ID NO: 4892 - protein, 1378 aa, Artificial Sequence
  SARS-CoV-2/India/1-27/2020__EPI_ISL_413522 spike protein (1-1210)(K985P_V986P_P1068F) Ferritin construct
MFVFLVLLPLVSSQCVNLTTRTQLPPAYTNSFTRGVYYPDKVFRSSVLHSTQDLFLPFFSNVTWFHAIHVSGTNGTKRFDNPVLPFNDGVYFASTEKSNIIRGWIFGTTLDSKTQSLLIVNNATNVVIKVCEFQFCNDPFLGVYHKNNKSWMESEFRVYSSANNCTFEYVSQPFLMDLEGKQGNFKNLREFVFKNIDGYFKIYSKHTPINLVRDLPQGFSALEPLVDLPIGINITRFQTLLALHRSYLTPGDSSSGWTAGAAAYYVGYLQPRTFLLKYNENGTITDAVDCALDPLSETKCTLKSFTVEKGIYQTSNFRVQPTESIVRFPNITNLCPFGEVFNATRFASVYAWNRKRISNCVADYSVLYNSASFSTFKCYGVSPTKLNDLCFTNVYADSFVIRGDEVIQIAPGQTGKIADYNYKLPDDFTGCVIAWNSNNLDSKVGGNYNYLYRLFRKSNLKPFERDISTEIYQAGSTPCNGVEGFNCYFPLQSYGFQPTNGVGYQPYRVVVLSFELLHAPATVCGPKKSTNLVKNKCVNFNFNGLTGTGVLTESNKKFLPFQQFGRDIADTTDAVRDPQTLEILDITPCSFGGVSVITPGTNTSNQVAVLYQDVNCTEVPVAIHADQLTPTWRVYSTGSNVFQTRAGCLIGAEHVNNSYECDIPIGAGICASYQTQTNSPRRARSVASQSIIAYTMSLGAENSVAYSNNSIAIPTNFTISVTTEILPVSMTKTSVDCTMYICGDSTECSNLLLQYGSFCTQLNRALTGIAVEQDKNTQEVFAQVKQIYKTPPIKDFGGFNFSQILPDPSKPSKRSFIEDLLFNKVTLADAGFIKQYGDCLGDIAARDLICAQKFNGLTVLPPLLTDEMIAQYTSALLAGTITSGWTFGAGAALQIPFAMQMAYRFNGIGVTQNVLYENQKLIANQFNSAIGKIQDSLSSTASALGKLQDVVNQNAQALNTLVKQLSSNFGAISSVLNDILSRLDPPEAEVQIDRLITGRLQSLQTYVTQQLIRAAEIRASANLAATKMSECVLGQSKRVDFCGKGYHLMSFPQSAPHGVVFLHVTYVFAQEKNFTTAPAICHDGKAHFPREGVFVSNGTHWFVTQRNFYEPQIITTDNTFVSGNCDVVIGIVNNTVYDPLQPELDSFKEELDKYFKNHTSPDVDLGDISGINASVVNIQKEIDRLNEVAKNLNESLIDLQELGKYEQYIKGGGGSDIIKLLNEQVNKEMQSSNLYMSMSSWCYTHSLDGAGLFLFDHAAEEYEHAKKLIIFLNENNVPVQLTSISAPEHKFEGLTQIFQKAYEHEQHISESINNIVDHAIKSKDHATFNFLQWYVAEQHEEEVLFKDILDKIELIGNENHGLYLADQYVKGIAKSRKS

SEQ ID NO: 4893 - protein, 1373 aa, Artificial Sequence
  SARS-CoV-2/pangolin/Guangxi/P4L/2017__EPI_ISL_410538 spike protein (1-1205)(K980P_V981P_P1063F) Ferritin construct
MFVFLFVLPLVSSQCVNLTTRTGIPPGYTNSSTRGVYYPDKVFRSSILHLTQDLFLPFFSNVTWFNTINYQGGFKKFDNPVLPFNDGVYFASTEKSNIIRGWIFGTTLDARTQSLLIVNNATNVVIKVCEFQFCTDPFLGVYYHNNNKTWVENEFRVYSSANNCTFEYISQPFLMDLEGKQGNFKNLREFVFKNVDGYFKIYSKHTPIDLVRDLPRGFAALEPLVDLPIGINITRFQTLLALHRSYLTPGNLESGWTTGAAAYYVGYLQQRTFLLSYNQNGTITDAVDCSLDPLSETKCTLKSLTVEKGIYQTSNFRVQPTISIVRFPNITNLCPFGEVFNASKFASVYAWNRKRISNCVADYSVLYNSTSFSTFKCYGVSPTKLNDLCFTNVYADSFVVKGDEVRQIAPGQTGVIADYNYKLPDDFTGCVIAWNSVKQDALTGGNYGYLYRLFRKSKLKPFERDISTEIYQAGSTPCNGQVGLNCYYPLERYGFHPTTGVNYQPFRVVVLSFELLNGPATVCGPKLSTTLVKDKCVNFNFNGLTGTGVLTTSKKQFLPFQQFGRDISDTTDAVRDPQTLEILDITPCSFGGVSVITPGTNTSNQVAVLYQDVNCTEVPMAIHAEQLTPAWRVYSAGANVFQTRAGCLVGAEHVNNSYECDIPVGAGICASYHSMSSLRSVNQRSIIAYTMSLGAENSVAYSNNSIAIPTNFTISVTTEILPVSMTKTSVDCTMYICGDSIECSNLLLQYGSFCTQLNRALTGIAVEQDKNTQEVFAQVKQIYKTPPIKDFGGFNFSQILPDPSKPSKRSFIEDLLFNKVTLADAGFIKQYGDCLGDIAARDLICAQKFNGLTVLPPLLTDEMIAQYTSALLAGTITSGWTFGAGAALQIPFAMQMAYRFNGIGVTQNVLYENQKLIANQFNSAIGKIQDSLSSTASALGKLQDVVNQNAQALNTLVKQLSSNFGAISSVLNDILSRLDPPEAEVQIDRLITGRLQSLQTYVTQQLIRAAEIRASANLAATKMSECVLGQSKRVDFCGKGYHLMSFPQSAPHGVVFLHVTYVFAQEKNFTTAPAICHEGKAHFPREGVFVSNGTHWFITQRNFYEPQIITTDNTFVSGSCDVVIGIVNNTVYDPLQPELDSFKEELDKYFKNHTSPDVDLGDISGINASVVNIQKEIDRLNEVAKNLNESPIDLQELGKYEQYIKGGGGSDIIKLLNEQVNKEMQSSNLYMSMSSWCYTHSLDGAGLFLFDHAAEEYEHAKKLIIFLNENNVPVQLTSISAPEHKFEGLTQIFQKAYEHEQHISESINNIVDHAIKSKDHATFNFLQWYVAEQHEEEVLFKDILDKIELIGNENHGLYLADQYVKGIAKSRKS

SEQ ID NO: 4894 - protein, 1373 aa, Artificial Sequence
  SARS-CoV-2/pangolin/Guangxi/P5L/2017__EPI_ISL_410540 spike protein (1-1205)(K980P_V981P_P1063F) Ferritin construct
MFVFLFVLPLVSSQCVNLTTRTGIPPGYTNSSTRGVYYPDKVFRSSILHLTQDLFLPFFSNVTWFNTINYQGGFKKFDNPVLPFNDGVYFASTEKSNIIRGWIFGTTLDARTQSLLIVNNATNVVIKVCEFQFCTDPFLGVYYHNNNKTWVENEFRVYSSANNCTFEYISQPFLMDLEGKQGNFKNLREFVFKNVDGYFKIYSKHTPIDLVRDLPRGFAALEPLVDLPIGINITRFQTLLALHRSYLTPGKLESGWTTGAAAYYVGYLQQRTFLLSYNQNGTITDAVDCSLDPLSETKCTLKSLTVEKGIYQTSNFRVQPTISIVRFPNITNLCPFGEVFNASKFASVYAWNRKRISNCVADYSVLYNSTSFSTFKCYGVSPTKLNDLCFTNVYADSFVVKGDEVRQIAPGQTGVIADYNYKLPDDFTGCVIAWNSVKQDALTGGNYGYLYRLFRKSKLKPFERDISTEIYQAGSTPCNGQVGLNCYYPLERYGFHPTTGVNYQPFRVVVLSFELLNGPATVCGPKLSTTLVKDKCVNFNFNGLTGTGVLTTSKKQFLPFQQFGRDISDTTDAVRDPQTLEILDITPCSFGGVSVITPGTNTSNQVAVLYQDVNCTEVPMAIHAEQLTPAWRVYSAGANVFQTRAGCLVGAEHVNNSYECDIPVGAGICASYHSMSSFRSVNQRSIIAYTMSLGAENSVAYSNNSIAIPTNFTISVTTEILPVSMTKTSVDCTMYICGDSIECSNLLLQYGSFCTQLNRALTGIAVEQDKNTQEVFAQVKQIYKTPPIKDFGGFNFSQILPDPSKPSKRSFIEDLLFNKVTLADAGFIKQYGDCLGDIAARDLICAQKFNGLTVLPPLLTDEMIAQYTSALLAGTITSGWTFGAGAALQIPFAMQMAYRFNGIGVTQNVLYENQKLIANQFNSAIGKIQDSLSSTASALGKLQDVVNQNAQALNTLVKQLSSNFGAISSVLNDILSRLDPPEAEVQIDRLITGRLQSLQTYVTQQLIRAAEIRASANLAATKMSECVLGQSKRVDFCGKGYHLMSFPQSAPHGVVFLHVTYVFAQEKNFTTAPAICHEGKAHFPREGVFVSNGTHWFITQRNFYEPQIITTDNTFVSGSCDVVIGIVNNTVYDPLQPELDSFKEELDKYFKNHTSPDVDLGDISGINASVVNIQKEIDRLNEVAKNLNESLIDLQELGKYEQYIKGGGGSDIIKLLNEQVNKEMQSSNLYMSMSSWCYTHSLDGAGLFLFDHAAEEYEHAKKLIIFLNENNVPVQLTSISAPEHKFEGLTQIFQKAYEHEQHISESINNIVDHAIKSKDHATFNFLQWYVAEQHEEEVLFKDILDKIELIGNENHGLYLADQYVKGIAKSRKS

SEQ ID NO: 4895 - protein, 1373 aa, Artificial Sequence
  SARS-CoV-2/pangolin/Guangxi/P5E/2017__EPI_ISL_410541 spike protein (1-1205)(K980P_V981P_P1063F) Ferritin construct
MFVFLFVLPLVSSQCVNLTTRTGIPPGYTNSSTRGVYYPDKVFRSSILHLTQDLFLPFFSNVTWFNTITYQGGSKKFDNPVLPFNDGVYFASTEKSNIIRGWIFGTTLDARTQSLLIVNNATNVVIKVCEFQFCTDPFLGVYYHNNNKTWVENEFRVYSSANNCTFEYISQPFLMDLEGKQGNFKNLREFVFKNVDGYFKIYSKHTPIDLVRDLPRGFAALEPLVDLPIGINITRFQTLLALHRSYLTPGKLESGWTTGAAAYYVGYLQQRTFLLSYNQNGTITDAVDCSLDPLSETKCTLKSLTVEKGIYQTSNFRVQPTISIVRFPNITNLCPFGEVFNASKFASVYAWNRKRISNCVADYSVLYNSTSFSTFKCYGVSPTKLNDLCFTNVYADSFVVKGDEVRQIAPGQTGVIADYNYKLPDDFTGCVIAWNSVKQDALTGDNYGYLYRLFRKSKLKPFERDISTEIYQAGSTPCNGQVGLNCYYPLERYGFHPTTGVNYQPFRVVVLSFELLNGPATVCGPKLSTTLVKDKCVNFNFNGLTGTGVLTTSKKQFLPFQQFGRDISDTTDAVRDPQTLEILDITPCSFGGVSVITPGTNTSNQVAVLYQDVNCTEVPMAIHAEQLTPAWRVYSAGANVFQTRAGCLVGAEHVNNSYECDIPVGAGICASYHSMSSFRSVNQRSIIAYTMSLGAENSVAYSNNSIAIPTNFTISVTTEILPVSMTKTSVDCTMYICGDSIECSNLLLQYGSFCTQLNRALTGIAVEQDKNTQEVFAQVKQIYKTPPIKDFGGFNFSQILPDPSKPSKRSFIEDLLFNKVTLADAGFIKQYGDCLGDIAARDLICAQKFNGLTVLPPLLTDEMIAQYTSALLAGTITSGWTFGAGAALQIPFAMQMAYRFNGIGVTQNVLYENQKLIANQFNSAIGKIQDSLSSTASALGKLQDVVNQNAQALNTLVKQLSSNFGAISSVLNDILSRLDPPEAEVQIDRLITGRLQSLQTYVTQQLIRAAEIRASANLAATKMSECVLGQSKRVDFCGKGYHLMSFPQSAPHGVVFLHVTYVFAQEKNFTTAPAICHEGKAHFPREGVFVSNGTHWFITQRNFYEPQIITTDNTFVSGSCDVVIGIVNNTVYDPLQPELDSFKEELDKYFKNHTSPDVDLGDISGINASVVNIQKEIDRLNEVAKNLNESLIDLQELGKYEQYIKGGGGSDIIKLLNEQVNKEMQSSNLYMSMSSWCYTHSLDGAGLFLFDHAAEEYEHAKKLIIFLNENNVPVQLTSISAPEHKFEGLTQIFQKAYEHEQHISESINNIVDHAIKSKDHATFNFLQWYVAEQHEEEVLFKDILDKIELIGNENHGLYLADQYVKGIAKSRKS

SEQ ID NO: 4896 - protein, 1371 aa, Artificial Sequence
  SARS-CoV-2/pangolin/Guangxi/P1E/2017__EPI_ISL_410539 spike protein (1-1203)(K978P_V979P_P1061F) Ferritin construct
MFVFLFVLPLVSSQCVNLTTRTGIQPGYTNSSTRGVYYPDKVFRSSILHLTQDLFLPFFSNVTWFNTINYQGGFKKFDNPVLPFNDGVYFASTEKSNIIRGWIFGTTLDARTQSLLIVNNATNVVIKVCEFQFCTDPFLGVYYHNNNKTWVENEFRVYSSANNCTFEYISQPFLMDLEGKQGNFKNLREFVFKNVDGYFKIYSKHTPIDLVRDLPRGFAALEPLVDLPIGINITRFQTLLALHRSYLTPGKLESGWTTGAAAYYVGYLQQRTFLLSYNQNGTITDAVDCSLDPLSETKCTLKSLTVEKGIYQTSNFRVQPTISIVRFPNITNLCPFGEVFNASKFASVYAWNRKRISNCVADYSVLYNSTSFSTFKCYGVSPTKLNDLCFTNVYADSFVVKGDEVRQIAPGQTGVIADYNYKLPDDFTGCVIAWNSVKQDALTGGNYLYRLFRKSKLKPFERDISTEIYQAGSTPCNGQVGLNCYYPLERYGFHPTTGVNYQPFRVVVLSFELLNGPATVCGPKLSTTLVKDKCVNFNFNGLTGTGVLTTSKKQFLPFQQFGRDISDTTDAVRDPQTLEILDITPCSFGGVSVITPGTNTSNQVAVLYQDVNCTEVPMAIHAEQLTPAWRVYSAGANVFQTRAGCLVGAEHVNNSYECDIPVGAGICASYHSMSSLRSVNQRSIIAYTMSLGAENSVAYSNNSIAIPTNFTISVTTEILPVSMTKTSVDCTMYICGDSIECSNLLLQYGSFCTQLNRALTGIAVEQDKNTQEVFAQVKQIYKTPPIKDFGGFNFSQILPDPSKPSKRSFIEDLLFNKVTLADAGFIKQYGDCLGDIAARDLICAQKFNGLTVLPPLLTDEMIAQYTSALLAGTITSGWTFGAGAALQIPFAMQMAYRFNGIGVTQNVLYENQKLIANQFNSAIGKIQDSLSSTASALGKLQDVVNQNAQALNTLVKQLSSNFGAISSVLNDILSRLDPPEAEVQIDRLITGRLQSLQTYVTQQLIRAAEIRASANLAATKMSECVLGQSKRVDFCGKGYHLMSFPQSAPHGVVFLHVTYVFAQEKNFTTAPAICHEGKAHFPREGVFVSNGTHWFITQRNFYEPQIITTDNTFVSGSCDVVIGIVNNTVYDPLQPELDSFKEELDKYFKNHTSPDVDLGDISGINASVVNIQKEIDRLNEVAKNLNESLIDLQELGKYEQYIKGGGGSDIIKLLNEQVNKEMQSSNLYMSMSSWCYTHSLDGAGLFLFDHAAEEYEHAKKLIIFLNENNVPVQLTSISAPEHKFEGLTQIFQKAYEHEQHISESINNIVDHAIKSKDHATFNFLQWYVAEQHEEEVLFKDILDKIELIGNENHGLYLADQYVKGIAKSRKS

SEQ ID NO: 4897 - protein, 1379 aa, Artificial Sequence
  SARS-CoV-2/Wuhan/WIV05/2019__EPI_ISL_402128 spike protein (1-1211)(K986P_V987P_ H1048Q_H1064N_ H1083N_H1101N) Ferritin construct
MFVFLVLLPLVSSQCVNLTTRTQLPPAYTNSFTRGVYYPDKVFRSSVLHSTQDLFLPFFSNVTWFHAIHVSGTNGTKRFDNPVLPFNDGVYFASTEKSNIIRGWIFGTTLDSKTQSLLIVNNATNVVIKVCEFQFCNDPFLGVYYHKNNKSWMESEFRVYSSANNCTFEYVSQPFLMDLEGKQGNFKNLREFVFKNIDGYFKIYSKHTPINLVRDLPQGFSALEPLVDLPIGINITRFQTLLALHRSYLTPGDSSSGWTAGAAAYYVGYLQPRTFLLKYNENGTITDAVDCALDPLSETKCTLKSFTVEKGIYQTSNFRVQPTESIVRFPNITNLCPFGEVFNATRFASVYAWNRKRISNCVADYSVLYNSASFSTFKCYGVSPTKLNDLCFTNVYADSFVIRGDEVRQIAPGQTGKIADYNYKLPDDFTGCVIAWNSNNLDSKVGGNYNYLYRLFRKSNLKPFERDISTEIYQAGSTPCNGVEGFNCYFPLQSYGFQPTNGVGYQPYRVVVLSFELLHAPATVCGPKKSTNLVKNKCVNFNFNGLTGTGVLTESNKKFLPFQQFGRDIADTTDAVRDPQTLEILDITPCSFGGVSVITPGTNTSNQVAVLYQDVNCTEVPVAIHADQLTPTWRVYSTGSNVFQTRAGCLIGAEHVNNSYECDIPIGAGICASYQTQTNSPRRARSVASQSIIAYTMSLGAENSVAYSNNSIAIPTNFTISVTTEILPVSMTKTSVDCTMYICGDSTECSNLLLQYGSFCTQLNRALTGIAVEQDKNTQEVFAQVKQIYKTPPIKDFGGFNFSQILPDPSKPSKRSFIEDLLFNKVTLADAGFIKQYGDCLGDIAARDLICAQKFNGLTVLPPLLTDEMIAQYTSALLAGTITSGWTFGAGAALQIPFAMQMAYRFNGIGVTQNVLYENQKLIANQFNSAIGKIQDSLSSTASALGKLQDVVNQNAQALNTLVKQLSSNFGAISSVLNDILSRLDPPEAEVQIDRLITGRLQSLQTYVTQQLIRAAEIRASANLAATKMSECVLGQSKRVDFCGKGYQLMSFPQSAPHGVVFLNVTYVPAQEKNFTTAPAICNDGKAHFPREGVFVSNGTNWFVTQRNFYEPQIITTDNTFVSGNCDVVIGIVNNTVYDPLQPELDSFKEELDKYFKNHTSPDVDLGDISGINASVVNIQKEIDRLNEVAKNLNESLIDLQELGKYEQYIKGGGGSDIIKLLNEQVNKEMQSSNLYMSMSSWCYTHSLDGAGLFLFDHAAEEYEHAKKLIIFLNENNVPVQLTSISAPEHKFEGLTQIFQKAYEHEQHISESINNIVDHAIKSKDHATFNFLQWYVAEQHEEEVLFKDILDKIELIGNENHGLYLADQYVKGIAKSRKS

SEQ ID NO: 4898 - protein, 1375 aa, Artificial Sequence
  SARS-CoV-2/bat/Yunnan/RaTG13/2013__EPI_ISL_402131 spike protein (1-1207)(K982P_V983P_ H1044Q_H1060N_ H1079N_H1097N) Ferritin construct
MFVFLVLLPLVSSQCVNLTTRTQLPPAYTNSSTRGVYYPDKVFRSSVLHLTQDLFLPFFSNVTWFHAIHVSGTNGIKRFDNPVLPFNDGVYFASTEKSNIIRGWIFGTTLDSKTQSLLIVNNATNVVIKVCEFQFCNDPFLGVYYHKNNKSWMESEFRVYSSANNCTFEYVSQPFLMDLEGKQGNFKNLREFVFKNIDGYFKIYSKHTPINLVRDLPPGFSALEPLVDLPIGINITRFQTLLALHRSYLTPGDSSSGWTAGAAAYYVGYLQPRTFLLKYNENGTITDAVDCALDPLSETKCTLKSFTVEKGIYQTSNFRVQPTDSIVRFPNITNLCPFGEVFNATTFASVYAWNRKRISNCVADYSVLYNSTSFSTFKCYGVSPTKLNDLCFTNVYADSFVITGDEVRQIAPGQTGKIADYNYKLPDDFTGCVIAWNSKHIDAKEGGNFNYLYRLFRKANLKPFERDISTEIYQAGSKPCNGQTGLNCYYPLYRYGFYPTDGVGHQPYRVVVLSFELLNAPATVCGPKKSTNLVKNKCVNFNFNGLTGTGVLTESNKKFLPFQQFGRDIADTTDAVRDPQTLEILDITPCSFGGVSVITPGTNASNQVAVLYQDVNCTEVPVAIHADQLTPTWRVYSTGSNVFQTRAGCLIGAEHVNNSYECDIPIGAGICASYQTQTNSRSVASQSIIAYTMSLGAENSVAYSNNSIAIPTNFTISVTTEILPVSMTKTSVDCTMYICGDSTECSNLLLQYGSFCTQLNRALTGIAVEQDKNTQEVFAQVKQIYKTPPIKDFGGFNFSQILPDPSKPSKRSFIEDLLFNKVTLADAGFIKQYGDCLGDIAARDLICAQKFNGLTVLPPLLTDEMIAQYTSALLAGTITSGWTFGAGAALQIPFAMQMAYRFNGIGVTQNVLYENQKLIANQFNSAIGKIQDSLSSTASALGKLQDVVNQNAQALNTLVKQLSSNFGAISSVLNDILSRLDPPEAEVQIDRLITGRLQSLQTYVTQQLIRAAEIRASANLAATKMSECVLGQSKRVDFCGKGYQLMSFPQSAPHGVVFLNVTYVPAQEKNFTTAPAICNDGKAHFPREGVFVSNGTNWFVTQRNFYEPQIITTDNTFVSGSCDVVIGIVNNTVYDPLQPELDSFKEELDKYFKNHTSPDVDLGDISGINASVVNIQKEIDRLNEVAKNLNESLIDLQELGKYEQYIKGGGGSDIIKLLNEQVNKEMQSSNLYMSMSSWCYTHSLDGAGLFLFDHAAEEYEHAKKLIIFLNENNVPVQLTSISAPEHKFEGLTQIFQKAYEHEQHISESINNIVDHAIKSKDHATFNFLQWYVAEQHEEEVLFKDILDKIELIGNENHGLYLADQYVKGIAKSRKS

SEQ ID NO: 4899 - protein, 1379 aa, Artificial Sequence
  SARS-CoV-2/Wuhan/HBCDC-HB-01/2019__EPI_ISL_402132 spike protein (1-1211)(K986P_V987P_ H1048Q_H1064N_ H1083N_H1101N) Ferritin construct
MFVFLVLLPLVSSQCVNLTTRTQLPPAYTNSITRGVYYPDKVFRSSVLHSTQDLFLPFFSNVTWFHAIHVSGTNGTKRFDNPVLPFNDGVYFASTEKSNIIRGWIFGTTLDSKTQSLLIVNNATNVVIKVCEFQFCNDPFLGVYYHKNNKSWMESEFRVYSSANNCTFEYVSQPFLMDLEGKQGNFKNLREFVFKNIDGYFKIYSKHTPINLVRDLPQGFSALEPLVDLPIGINITRFQTLLALHRSYLTPGDSSSGWTAGAAAYYVGYLQPRTFLLKYNENGTITDAVDCALDPLSETKCTLKSFTVEKGIYQTSNFRVQPTESIVRFPNITNLCPFGEVFNATRFASVYAWNRKRISNCVADYSVLYNSASFSTFKCYGVSPTKLNDLCFTNVYADSFVIRGDEVRQIAPGQTGKIADYNYKLPDDFTGCVIAWNSNNLDSKVGGNYNYLYRLFRKSNLKPFERDISTEIYQAGSTPCNGVEGFNCYFPLQSYGFQPTNGVGYQPYRVVVLSFELLHAPATVCGPKKSTNLVKNKCVNFNFNGLTGTGVLTESNKKFLPFQQFGRDIADTTDAVRDPQTLEILDITPCSFGGVSVITPGTNTSNQVAVLYQDVNCTEVPVAIHADQLTPTWRVYSTGSNVFQTRAGCLIGAEHVNNSYECDIPIGAGICASYQTQTNSPRRARSVASQSIIAYTMSLGAENSVAYSNNSIAIPTNFTISVTTEILPVSMTKTSVDCTMYICGDSTECSNLLLQYGSFCTQLNRALTGIAVEQDKNTQEVFAQVKQIYKTPPIKDFGGFNFSQILPDPSKPSKRSFIEDLLFNKVTLADAGFIKQYGDCLGDIAARDLICAQKFNGLTVLPPLLTDEMIAQYTSALLAGTITSGWTFGAGAALQIPFAMQMAYRFNGIGVTQNVLYENQKLIANQFNSAIGKIQDSLSSTASALGKLQDVVNQNAQALNTLVKQLSSNFGAISSVLNDILSRLDPPEAEVQIDRLITGRLQSLQTYVTQQLIRAAEIRASANLAATKMSECVLGQSKRVDFCGKGYQLMSFPQSAPHGVVFLNVTYVPAQEKNFTTAPAICNDGKAHFPREGVFVSNGTNWFVTQRNFYEPQIITTDNTFVSGNCDVVIGIVNNTVYDPLQPELDSFKEELDKYFKNHTSPDVDLGDISGINASVVNIQKEIDRLNEVAKNLNESLIDLQELGKYEQYIKGGGGSDIIKLLNEQVNKEMQSSNLYMSMSSWCYTHSLDGAGLFLFDHAAEEYEHAKKLIIFLNENNVPVQLTSISAPEHKFEGLTQIFQKAYEHEQHISESINNIVDHAIKSKDHATFNFLQWYVAEQHEEEVLFKDILDKIELIGNENHGLYLADQYVKGIAKSRKS

SEQ ID NO: 4900 - protein, 1379 aa, Artificial Sequence
  SARS-CoV-2/Guangdong/20SF028/2020__EPI_ISL_403936 spike protein (1-1211)(K986P_V987P_ H1048Q_H1064N_ H1083N_H1101N) Ferritin construct
MFVFLVLLPLVSSQCVNLTTRTQLPPAYTNSFTRGVYYPDKVFRSSVLYSTQDLFLPFFSNVTWFHAIHVSGTNGTKRFDNPVLPFNDGVYFASTEKSNIIRGWIFGTTLDSKTQSLLIVNNATNVVIKVCEFQFCNDPFLGVYYHKNNKSWMESEFRVYSSANNCTFEYVSQPFLMDLEGKQGNFKNLREFVFKNIDGYFKIYSKHTPINLVRDLPQGFSALEPLVDLPIGINITRFQTLLALHRSYLTPGDSSSGWTAGAAAYYVGYLQPRTFLLKYNENGTITDAVDCALDPLSETKCTLKSFTVEKGIYQTSNFRVQPTESIVRFPNITNLCPFGEVFNATRFASVYAWNRKRISNCVADYSVLYNSASFSTFKCYGVSPTKLNDLCFTNVYADSFVIRGDEVRQIAPGQTGKIADYNYKLPDDFTGCVIAWNSNNLDSKVGGNYNYLYRLFRKSNLKPFERDISTEIYQAGSTPCNGVEGFNCYFPLQSYGFQPTNGVGYQPYRVVVLSFELLHAPATVCGPKKSTNLVKNKCVNFNFNGLTGTGVLTESNKKFLPFQQFGRDIADTTDAVRDPQTLEILDITPCSFGGVSVITPGTNTSNQVAVLYQDVNCTEVPVAIHADQLTPTWRVYSTGSNVFQTRAGCLIGAEHVNNSYECDIPIGAGICASYQTQTNSPRRARSVASQSIIAYTMSLGAENSVAYSNNSIAIPTNFTISVTTEILPVSMTKTSVDCTMYICGDSTECSNLLLQYGSFCTQLNRALTGIAVEQDKNTQEVFAQVKQIYKTPPIKDFGGFNFSQILPDPSKPSKRSFIEDLLFNKVTLADAGFIKQYGDCLGDIAARDLICAQKFNGLTVLPPLLTDEMIAQYTSALLAGTITSGWTFGAGAALQIPFAMQMAYRFNGIGVTQNVLYENQKLIANQFNSAIGKIQDSLSSTASALGKLQDVVNQNAQALNTLVKQLSSNFGAISSVLNDILSRLDPPEAEVQIDRLITGRLQSLQTYVTQQLIRAAEIRASANLAATKMSECVLGQSKRVDFCGKGYQLMSFPQSAPHGVVFLNVTYVPAQEKNFTTAPAICNDGKAHFPREGVFVSNGTNWFVTQRNFYEPQIITTDNTFVSGNCDVVIGIVNNTVYDPLQPELDSFKEELDKYFKNHTSPDVDLGDISGINASVVNIQKEIDRLNEVAKNLNESLIDLQELGKYEQYIKGGGGSDIIKLLNEQVNKEMQSSNLYMSMSSWCYTHSLDGAGLFLFDHAAEEYEHAKKLIIFLNENNVPVQLTSISAPEHKFEGLTQIFQKAYEHEQHISESINNIVDHAIKSKDHATFNFLQWYVAEQHEEEVLFKDILDKIELIGNENHGLYLADQYVKGIAKSRKS

SEQ ID NO: 4901 - protein, 1379 aa, Artificial Sequence
  SARS-CoV-2/Shenzhen/SZTH-001/2020__EPI_ISL_406592 spike protein (1-1211)(K986P_V987P_ H1048Q_H1064N_ H1083N_H1101N) Ferritin construct
MFVFLVLLPLVSSQCVNLTTRTQLPPAYTNSFTRGVYYPDKVFRSSVLHSTQDLFLPFFSNVTWFHAIHVSGTNGTKRFDNPVLPFNDGVYFASTEKSNIIRGWIFGTTLDSKTQSLLIVNNATNVVIKVCEFQFCNDPFLGVYYHKNNKSWMESEFRVYSSANNCTFEYVSQPFLMDLEGKQGNFKNLREFVFKNIDGYFKIYSKHTPINLVRDLPQGFSALEPLVDLPIGINITRFQTLLALHRSYLTPGDSSSGWTAGAAAYYVGYLQPRTFLLKYNENGTITDAVDCALDPLSETKCTLKSFTVEKGIYQTSNFRVQPTESIVRFPNITNLCPFGEVFNATRFASVYAWNRKRISNCVADYSVLYNSASFSTFKCYGVSPTKLNDLCFTNVYADSFVIRGDEVRQIAPGQTGKIADYNYKLPDDFTGCVIAWNSNNLDSKVGGNYNYLYRLFRKSNLKPFERDISTEIYQAGSTPCNGVEGFNCYFPLQSYGFQPTNGVGYQPYRVVVLSFELLHAPATVCGPKKSTNLVKNKCVNFNFNGLTGTGVLTESNKKFLPFQQFGRDIADTTDAVRDPQTLEILDITPCSFGGVSVITPGTNTSNQVAVLYQDVNCTEVPVAIHADQLTPTWRVYSTGSNVFQTRAGCLIGAEHVNNSYECDIPIGAGICASYQTQTNSPRRARSVASQSIIAYTMSLGAENSVAYSNNSIAIPTNFTISVTTEILPVSMTKTSVDCTMYICGDSTECSNLLLQYGSFCTQLNRALTGIAVEQDKNTQEVFAQVKQIYKTPPIKDFGGFNFSQILPDPSKPSKRSFIEDLLFNKVTLADAGFIKQYGDCLGDIAARDLICAQKFNGLTVLPPLLTDEMIAQYTSALLAGTITSGWTFGAGAALQIPFAMQMAYRFNGIGVTQNVLYENQKLIANQFNSAIGKIQDSLSSTASALGKLQDVVNQNAQALNTLVKQLSSNFGAISSVLNDILSRLDPPEAEVQIDRLITGRLQSLQTYVTQQLIRAAEIRASANLAATKMSECVLGQSKRVDFCGKGYQLMSFPQSAPHGVVFLNVTYVPAQEKNFTTAPAICNDGKAHFPREGVFVSNGTNWFVTQRNFYEPQIITTDNTFVSGNCDVLIGIVNNTVYDPLQPELDSFKEELDKYFKNHTSPDVDLGDISGINASVVNIQKEIDRLNEVAKNLNESLIDLQELGKYEQYIKGGGGSDIIKLLNEQVNKEMQSSNLYMSMSSWCYTHSLDGAGLFLFDHAAEEYEHAKKLIIFLNENNVPVQLTSISAPEHKFEGLTQIFQKAYEHEQHISESINNIVDHAIKSKDHATFNFLQWYVAEQHEEEVLFKDILDKIELIGNENHGLYLADQYVKGIAKSRKS

SEQ ID NO: 4902 - protein, 1379 aa, Artificial Sequence
  SARS-CoV-2/Shenzhen/SZTH-004/2020__EPI_ISL_406595 spike protein (1-1211)(K986P_V987P_ H1048Q_H1064N_ H1083N_H1101N) Ferritin construct
MFVFLVLLPLVSSQCVNLTTRTQLPPAYTNSFTRGVYYPDKVFRSSVLHSTQDLFLPFFSNVTWFHAIHVSGTNGTKRFDNPVLPFNDGVYFASTEKSNIIRGWIFGTTLDSKTQSLLIVNNATNVVIKVCEFQFCNDPFLGVYYHKNNKSWMESEFRVYSSANNCTFEYVSQPFLMDLEGKQGNFKNLREFVFKNIDGYFKIYSKHTPINLVRDLPQGFSALEPLVDLPIGINITRFQTLLALHRSYLTPGDSSSGWTAGAAAYYVGYLQPRTFLLKYNENGTITDAVDCALDPLSETKCTLKSFTVEKGIYQTSNFRVQPTESIVRFPNITNLCPFGEVFNATRFASVYAWDRKRISNCVAYYSVLYNSASFSTFKCYGVSPTKLNDLCFTNVYADSFVIRGDEVRQIAPGQTGKIADYNYKLPDDFTGCVIAWNSNNLDSKVGGNYNYLYRLFRKSNLKPFERDISTEIYQAGSTPCNGVEGFNCYFPLQSYGFQPTNGVGYQPYRVVVLSFELLHAPATVCGPKKSTNLVKNKCVNFNFNGLTGTGVLTESNKKFLPFQQFGRDIADTTDAVRDPQTLEILDITPCSFGGVSVITPGTNTSNQVAVLYQDVNCTEVPVAIHADQLTPTWRVYSTGSNVFQTRAGCLIGAEHVNNSYECDIPIGAGICASYQTQTNSPRRARSVASQSIIAYTMSLGAENSVAYSNNSIAIPTNFTISVTTEILPVSMTKTSVDCTMYICGDSTECSNLLLQYGSFCTQLNRALTGIAVEQDKNTQEVFAQVKQIYKTPPIKDFGGFNFSQILPDPSKPSKRSFIEDLLFNKVTLADAGFIKQYGDCLGDIAARDLICAQKFNGLTVLPPLLTDEMIAQYTSALLAGTITSGWTFGAGAALQIPFAMQMAYRFNGIGVTQNVLYENQKLIANQFNSAIGKIQDSLSSTASALGKLQDVVNQNAQALNTLVKQLSSNFGAISSVLNDILSRLDPPEAEVQIDRLITGRLQSLQTYVTQQLIRAAEIRASANLAATKMSECVLGQSKRVDFCGKGYQLMSFPQSAPHGVVFLNVTYVPAQEKNFTTAPAICNDGKAHFPREGVFVSNGTNWFVTQRNFYEPQIITTDNTFVSGNCDVVIGIVNNTVYDPLQPELDSFKEELDKYFKNHTSPDVDLGDISGINASVVNIQKEIDRLNEVAKNLNESLIDLQELGKYEQYIKGGGGSDIIKLLNEQVNKEMQSSNLYMSMSSWCYTHSLDGAGLFLFDHAAEEYEHAKKLIIFLNENNVPVQLTSISAPEHKFEGLTQIFQKAYEHEQHISESINNIVDHAIKSKDHATFNFLQWYVAEQHEEEVLFKDILDKIELIGNENHGLYLADQYVKGIAKSRKS

SEQ ID NO: 4903 - protein, 1379 aa, Artificial Sequence
  SARS-CoV-2/France/IDF0372/2020__EPI_ISL_406596 spike protein (1-1211)(K986P_V987P_ H1048Q_H1064N_ H1083N_H1101N) Ferritin construct
MFVFLVLLPLVSSQCVNLTTRTQLPPAYTNSFTRGVYYPDKVFRSSVLHSTQDLFLPFFSNVTWFHAIHVSGTNGTKRFDNPVLPFNDGVYFASTEKSNIIRGWIFGTTLDSKTQSLLIVNNATNVVIKVCEFQFCNDPFLGVYYHKNNKSWMESEFRVYSSANNCTFEYVSQPFLMDLEGKQGNFKNLREFVFKNIDGYFKIYSKHTPINLVRDLPQGFSALEPLVDLPIGINITRFQTLLALHRSYLTPGDSSSGWTAGAAAYYVGYLQPRTFLLKYNENGTITDAVDCALDPLSETKCTLKSFTVEKGIYQTSNFRVQPTESIVRFPNITNLCPFGEVFNATRFASVYAWNRKRISNCVADYSFLYNSASFSTFKCYGVSPTKLNDLCFTNVYADSFVIRGDEVRQIAPGQTGKIADYNYKLPDDFTGCVIAWNSNNLDSKVGGNYNYLYRLFRKSNLKPFERDISTEIYQAGSTPCNGVEGFNCYFPLQSYGFQPTNGVGYQPYRVVVLSFELLHAPATVCGPKKSTNLVKNKCVNFNFNGLTGTGVLTESNKKFLPFQQFGRDIADTTDAVRDPQTLEILDITPCSFGGVSVITPGTNTSNQVAVLYQDVNCTEVPVAIHADQLTPTWRVYSTGSNVFQTRAGCLIGAEHVNNSYECDIPIGAGICASYQTQTNSPRRARSVASQSIIAYTMSLGAENSVAYSNNSIAIPTNFTISVTTEILPVSMTKTSVDCTMYICGDSTECSNLLLQYGSFCTQLNRALTGIAVEQDKNTQEVFAQVKQIYKTPPIKDFGGFNFSQILPDPSKPSKRSFIEDLLFNKVTLADAGFIKQYGDCLGDIAARDLICAQKFNGLTVLPPLLTDEMIAQYTSALLAGTITSGWTFGAGAALQIPFAMQMAYRFNGIGVTQNVLYENQKLIANQFNSAIGKIQDSLSSTASALGKLQDVVNQNAQALNTLVKQLSSNFGAISSVLNDILSRLDPPEAEVQIDRLITGRLQSLQTYVTQQLIRAAEIRASANLAATKMSECVLGQSKRVDFCGKGYQLMSFPQSAPHGVVFLNVTYVPAQEKNFTTAPAICNDGKAHFPREGVFVSNGTNWFVTQRNFYEPQIITTDNTFVSGNCDVVIGIVNNTVYDPLQPELDSFKEELDKYFKNHTSPDVDLGDISGINASVVNIQKEIDRLNEVAKNLNESLIDLQELGKYEQYIKGGGGSDIIKLLNEQVNKEMQSSNLYMSMSSWCYTHSLDGAGLFLFDHAAEEYEHAKKLIIFLNENNVPVQLTSISAPEHKFEGLTQIFQKAYEHEQHISESINNIVDHAIKSKDHATFNFLQWYVAEQHEEEVLFKDILDKIELIGNENHGLYLADQYVKGIAKSRKS

SEQ ID NO: 4904 - protein, 1379 aa, Artificial Sequence
  SARS-CoV-2/Australia/VIC01/2020__EPI_ISL_406844 spike protein (1-1211)(K986P_V987P_ H1048Q_H1064N_ H1083N_H1101N) Ferritin construct
MFVFLVLLPLVSSQCVNLTTRTQLPPAYTNSFTRGVYYPDKVFRSSVLHSTQDLFLPFFSNVTWFHAIHVSGTNGTKRFDNPVLPFNDGVYFASTEKSNIIRGWIFGTTLDSKTQSLLIVNNATNVVIKVCEFQFCNDPFLGVYYHKNNKSWMESEFRVYSSANNCTFEYVSQPFLMDLEGKQGNFKNLREFVFKNIDGYFKIYSKHTPINLVRDLPQGFSALEPLVDLPIGINITRFQTLLALHRRYLTPGDSSSGWTAGAAAYYVGYLQPRTFLLKYNENGTITDAVDCALDPLSETKCTLKSFTVEKGIYQTSNFRVQPTESIVRFPNITNLCPFGEVFNATRFASVYAWNRKRISNCVADYSVLYNSASFSTFKCYGVSPTKLNDLCFTNVYADSFVIRGDEVRQIAPGQTGKIADYNYKLPDDFTGCVIAWNSNNLDSKVGGNYNYLYRLFRKSNLKPFERDISTEIYQAGSTPCNGVEGFNCYFPLQSYGFQPTNGVGYQPYRVVVLSFELLHAPATVCGPKKSTNLVKNKCVNFNFNGLTGTGVLTESNKKFLPFQQFGRDIADTTDAVRDPQTLEILDITPCSFGGVSVITPGTNTSNQVAVLYQDVNCTEVPVAIHADQLTPTWRVYSTGSNVFQTRAGCLIGAEHVNNSYECDIPIGAGICASYQTQTNSPRRARSVASQSIIAYTMSLGAENSVAYSNNSIAIPTNFTISVTTEILPVSMTKTSVDCTMYICGDSTECSNLLLQYGSFCTQLNRALTGIAVEQDKNTQEVFAQVKQIYKTPPIKDFGGFNFSQILPDPSKPSKRSFIEDLLFNKVTLADAGFIKQYGDCLGDIAARDLICAQKFNGLTVLPPLLTDEMIAQYTSALLAGTITSGWTFGAGAALQIPFAMQMAYRFNGIGVTQNVLYENQKLIANQFNSAIGKIQDSLSSTASALGKLQDVVNQNAQALNTLVKQLSSNFGAISSVLNDILSRLDPPEAEVQIDRLITGRLQSLQTYVTQQLIRAAEIRASANLAATKMSECVLGQSKRVDFCGKGYQLMSFPQSAPHGVVFLNVTYVPAQEKNFTTAPAICNDGKAHFPREGVFVSNGTNWFVTQRNFYEPQIITTDNTFVSGNCDVVIGIVNNTVYDPLQPELDSFKEELDKYFKNHTSPDVDLGDISGINASVVNIQKEIDRLNEVAKNLNESLIDLQELGKYEQYIKGGGGSDIIKLLNEQVNKEMQSSNLYMSMSSWCYTHSLDGAGLFLFDHAAEEYEHAKKLIIFLNENNVPVQLTSISAPEHKFEGLTQIFQKAYEHEQHISESINNIVDHAIKSKDHATFNFLQWYVAEQHEEEVLFKDILDKIELIGNENHGLYLADQYVKGIAKSRKS

SEQ ID NO: 4905 - protein, 1379 aa, Artificial Sequence
  SARS-CoV-2/Germany/BavPat1/2020__EPI_ISL_406862 spike protein (1-1211)(K986P_V987P_ H1048Q_H1064N_ H1083N_H1101N) Ferritin construct
MFVFLVLLPLVSSQCVNLTTRTQLPPAYTNSFTRGVYYPDKVFRSSVLHSTQDLFLPFFSNVTWFHAIHVSGTNGTKRFDNPVLPFNDGVYFASTEKSNIIRGWIFGTTLDSKTQSLLIVNNATNVVIKVCEFQFCNDPFLGVYYHKNNKSWMESEFRVYSSANNCTFEYVSQPFLMDLEGKQGNFKNLREFVFKNIDGYFKIYSKHTPINLVRDLPQGFSALEPLVDLPIGINITRFQTLLALHRSYLTPGDSSSGWTAGAAAYYVGYLQPRTFLLKYNENGTITDAVDCALDPLSETKCTLKSFTVEKGIYQTSNFRVQPTESIVRFPNITNLCPFGEVFNATRFASVYAWNRKRISNCVADYSVLYNSASFSTFKCYGVSPTKLNDLCFTNVYADSFVIRGDEVRQIAPGQTGKIADYNYKLPDDFTGCVIAWNSNNLDSKVGGNYNYLYRLFRKSNLKPFERDISTEIYQAGSTPCNGVEGFNCYFPLQSYGFQPTNGVGYQPYRVVVLSFELLHAPATVCGPKKSTNLVKNKCVNFNFNGLTGTGVLTESNKKFLPFQQFGRDIADTTDAVRDPQTLEILDITPCSFGGVSVITPGTNTSNQVAVLYQGVNCTEVPVAIHADQLTPTWRVYSTGSNVFQTRAGCLIGAEHVNNSYECDIPIGAGICASYQTQTNSPRRARSVASQSIIAYTMSLGAENSVAYSNNSIAIPTNFTISVTTEILPVSMTKTSVDCTMYICGDSTECSNLLLQYGSFCTQLNRALTGIAVEQDKNTQEVFAQVKQIYKTPPIKDFGGFNFSQILPDPSKPSKRSFIEDLLFNKVTLADAGFIKQYGDCLGDIAARDLICAQKFNGLTVLPPLLTDEMIAQYTSALLAGTITSGWTFGAGAALQIPFAMQMAYRFNGIGVTQNVLYENQKLIANQFNSAIGKIQDSLSSTASALGKLQDVVNQNAQALNTLVKQLSSNFGAISSVLNDILSRLDPPEAEVQIDRLITGRLQSLQTYVTQQLIRAAEIRASANLAATKMSECVLGQSKRVDFCGKGYQLMSFPQSAPHGVVFLNVTYVPAQEKNFTTAPAICNDGKAHFPREGVFVSNGTNWFVTQRNFYEPQIITTDNTFVSGNCDVVIGIVNNTVYDPLQPELDSFKEELDKYFKNHTSPDVDLGDISGINASVVNIQKEIDRLNEVAKNLNESLIDLQELGKYEQYIKGGGGSDIIKLLNEQVNKEMQSSNLYMSMSSWCYTHSLDGAGLFLFDHAAEEYEHAKKLIIFLNENNVPVQLTSISAPEHKFEGLTQIFQKAYEHEQHISESINNIVDHAIKSKDHATFNFLQWYVAEQHEEEVLFKDILDKIELIGNENHGLYLADQYVKGIAKSRKS

SEQ ID NO: 4906 - protein, 1379 aa, Artificial Sequence
  SARS-CoV-2/Wuhan/HBCDC-HB-02/2020__EPI_ISL_412978 spike protein (1-1211)(K986P_V987P_ H1048Q_H1064N_ H1083N_H1101N) Ferritin construct
MFVFLVLLPLVSSQCVNLTTRTQLPPAYTNSFTRGVYYPDKVFRSSVLHSTQDLFLPFFSNVTWFHAIHVSGTNGTKRFDNPVLPFNDGVYFASTEKSNIIRGWIFGTTLDSKTQSLLIVNNATNVVIKVCEFQFCNDPFLGVYYHKNNKSWMESEFRVYSSANNCTFEYVSQPFLMDLEGKQGNFKNLREFVFKNIDGYFKIYSKHTPINLVRDLPQGFSALEPLVDLPIGINITRFQTLLALHRSYLTPGDSSSGWTAGAAAYYVGYLQPRTFLLKYNENGTITDAVDCALDPLSETKCTLKSFTVEKGIYQTSNFRVQPTESIVRFPNITNLCPFGEVFNATRFASVYAWNRKRISNCVADYSVLYNSASFSTFKCYGVSPTKLNDLCFTNVYADSFVIRGDEVRQIAPGQTGKIADYNYKLPDDFTGCVIAWNSNNLDSKVGGNYNYLYRLFRKSNLKPFERDISTEIYQAGSTPCNGVEGFNCYFPLQSYGFQPTNGVGYQPYRVVVLSFELLHAPATVCGPKKSTNLVKNKCVNFNFNGLTGTGVLTESNKKFLPFQQFGRDIADTTDAVRDPQTLEILDITPCSFGGVSVITPGTNTSNQVAVLYQDVNCTEVPVAIHADQLTPTWRVYSTGSNVFQTRAGCLIGAEHVNNSYECDIPIGAGICASYQTQTNSPRRARSVASQSIIAYTMSLGAENSVAYSNNSIAIPTNFTISVTTEILPVSMTKTSVDCTMYICGDSTECSNFLLQYGSFCTQLNRALTGIAVEQDKNTQEVFAQVKQIYKTPPIKDFGGFNFSQILPDPSKPSKRSFIEDLLFNKVTLADAGFIKQYGDCLGDIAARDLICAQKFNGLTVLPPLLTDEMIAQYTSALLAGTITSGWTFGAGAALQIPFAMQMAYRFNGIGVTQNVLYENQKLIANQFNSAIGKIQDSLSSTASALGKLQDVVNQNAQALNTLVKQLSSNFGAISSVLNDILSRLDPPEAEVQIDRLITGRLQSLQTYVTQQLIRAAEIRASANLAATKMSECVLGQSKRVDFCGKGYQLMSFPQSAPHGVVFLNVTYVPAQEKNFTTAPAICNDGKAHFPREGVFVSNGTNWFVTQRNFYEPQIITTDNTFVSGNCDVVIGIVNNTVYDPLQPELDSFKEELDKYFKNHTSPDVDLGDISGINASVVNIQKEIDRLNEVAKNLNESLIDLQELGKYEQYIKGGGGSDIIKLLNEQVNKEMQSSNLYMSMSSWCYTHSLDGAGLFLFDHAAEEYEHAKKLIIFLNENNVPVQLTSISAPEHKFEGLTQIFQKAYEHEQHISESINNIVDHAIKSKDHATFNFLQWYVAEQHEEEVLFKDILDKIELIGNENHGLYLADQYVKGIAKSRKS

SEQ ID NO: 4907 - protein, 1379 aa, Artificial Sequence
  SARS-CoV-2/Australia/QLD02/2020__EPI_ISL_407896 spike protein (1-1211)(K986P_V987P_ H1048Q_H1064N_ H1083N_H1101N) Ferritin construct
MFVFLVLLPLVSSQCVNLTTRTQLPPAYTNSFTRGVYYPDKVFRSSVLHSTQDLFLPFFSNVTWFHAIHVSGTNGTKRFDNPVLPFNDGVYFASTEKSNIIRGWIFGTTLDSKTQSLLIVNNATNVVIKVCEFQFCNDPFLGVYYHKNNKSWMESEFRVYSSANNCTFEYVSQPFLMDLEGKQGNFKNLREFVFKNIDGYFKIYSKHTPINLVRDLPQGFSALEPLVDLPIGINITRFQTLLALHRSYLTPGDSSSGWTAGAAAYYVGYLQPRTFLLKYNENGTITDAVDCALDPLSETKCTLKSFTVEKGIYQTSNFRVQPTESIVRFPNITNLCPFGEVFNATRFASVYAWNRKRISNCVADYSVLYNSASFSTFKCYGVSPTKLNDLCFTNVYADSFVIRGDEVRQIAPGQTGKIADYNYKLPDDFTGCVIAWNSNNLDSKVGGNYNYLYRLFRKSNLKPFERDISTEIYQAGSTPCNGVEGFNCYFPLQSYGFQPTNGVGYQPYRVVVLSFELLHAPATVCGPKKSTNLVKNKCVNFNFNGLTGTGVLTESNKKFLPFQQFGRDIADTTDAVRDPQTLEILDITPCSFGGVSVITPGTNTSNQVAVLYQDVNCTEVPVAIHADQLTPTWRVYSTGSNVFQTRAGCLIGAEHVNNSYECDIPIGAGICASYQTQTNSPRRARSVASQSIIAYTMSLGAENSVAYSNNSIAIPTNFTISVTTEILPVSMTKTSVDCTMYICGDSTECSNLLLQYGSFCTQLNRALTGIAVEQDKNTQEVFAQVKQIYKTPPIKDFGGFNFSQILPDPSKPSKRSFIEDLLFNKVTLADAGFIKQYGDCLGDIAARDLICAQKFNGLTVLPPLLTDEMIAQYTSALLAGTITSGWTFGAGAALQIPFAMQMAYRFNGIGVTQNVLYENQKLIANQFNSAIGKIQDSLSSTASALGKLQDVVNQNAQALNTLVKQLSSNFGAISSVLNDILSRLDPPEAEVQIDRLITGRLQSLQTYVTQQLIRAAEIRASANLAATKMSECVLGQSKRVDFCGKGYQLMSFPQSAPHGVVFLNVTYVPAQEKNFTTAPAICNDGKAHFPREGVFVSNGTNWFVTQRNFYEPQIITTDNTFVSGNCDVVIGIVNNTVYDPLQLELDSFKEELDKYFKNHTSPDVDLGDISGINASVVNIQKEIDRLNEVAKNLNESLIDLQELGKYEQYIKGGGGSDIIKLLNEQVNKEMQSSNLYMSMSSWCYTHSLDGAGLFLFDHAAEEYEHAKKLIIFLNENNVPVQLTSISAPEHKFEGLTQIFQKAYEHEQHISESINNIVDHAIKSKDHATFNFLQWYVAEQHEEEVLFKDILDKIELIGNENHGLYLADQYVKGIAKSRKS

SEQ ID NO: 4908 - protein, 1379 aa, Artificial Sequence
  SARS-CoV-2/India/1-31/2020__EPI_ISL_413523 spike protein (1-1211)(K986P_V987P_ H1048Q_H1064N_ H1083N_H1101N) Ferritin construct
MFVFLVLLPLVSSQCVNLTTRTQLPPAYTNSFTRGVYYPDKVFRSSVLHSTQDLFLPFFSNVTWFHAIHVSGTNGTKRFDNPVLPFNDGVYFASTEKSNIIRGWIFGTTLDSKTQSLLIVNNATNVVIKVCEFQFCNDPFLGVYYHKNNKSWMESEFRVYSSANNCTFEYVSQPFLMDLEGKQGNFKNLREFVFKNIDGYFKIYSKHTPINLVRDLPQGFSALEPLVDLPIGINITRFQTLLALHRSYLTPGDSSSGWTAGAAAYYVGYLQPRTFLLKYNENGTITDAVDCALDPLSETKCTLKSFTVEKGIYQTSNFRVQPTESIVRFPNITNLCPFGEVFNATRFASVYAWNRKRISNCVADYSVLYNSASFSTFKCYGVSPTKLNDLCFTNVYADSFVIRGDEVRQIAPGQTGKIADYNYKLPDDFTGCVIAWNSNNLDSKVGGNYNYLYRLFRKSNLKPFERDISTEIYQAGSTPCNGVEGFNCYFPLQSYGFQPTNGVGYQPYRVVVLSFELLHAPATVCGPKKSTNLVKNKCVNFNFNGLTGTGVLTESNKKFLPFQQFGRDIADTTDAVRDPQTLEILDITPCSFGGVSVITPGTNTSNQVAVLYQDVNCTEVPVAIHADQLTPTWRVYSTGSNVFQTRAGCLIGAEHVNNSYECDIPIGAGICASYQTQTNSPRRARSVASQSIIAYTMSLGAENSVAYSNNSIAIPTNFTISVTTEILPVSMTKTSVDCTMYICGDSTECSNLLLQYGSFCTQLNRALTGIAVEQDKNTQEVFAQVKQIYKTPPIKDFGGFNFSQILPDPSKPSKRSFIEDLLFNKVTLADAGFIKQYGDCLGDIAARDLICAQKFNGLTVLPPLLTDEMIAQYTSALLAGTITSGWTFGAGAALQIPFAMQMAYRFNGIGVTQNVLYENQKLIANQFNSVIGKIQDSLSSTASALGKLQDVVNQNAQALNTLVKQLSSNFGAISSVLNDILSRLDPPEAEVQIDRLITGRLQSLQTYVTQQLIRAAEIRASANLAATKMSECVLGQSKRVDFCGKGYQLMSFPQSAPHGVVFLNVTYVPAQEKNFTTAPAICNDGKAHFPREGVFVSNGTNWFVTQRNFYEPQIITTDNTFVSGNCDVVIGIVNNTVYDPLQPELDSFKEELDKYFKNHTSPDVDLGDISGINASVVNIQKEIDRLNEVAKNLNESLIDLQELGKYEQYIKGGGGSDIIKLLNEQVNKEMQSSNLYMSMSSWCYTHSLDGAGLFLFDHAAEEYEHAKKLIIFLNENNVPVQLTSISAPEHKFEGLTQIFQKAYEHEQHISESINNIVDHAIKSKDHATFNFLQWYVAEQHEEEVLFKDILDKIELIGNENHGLYLADQYVKGIAKSRKS

SEQ ID NO: 4909 - protein, 1379 aa, Artificial Sequence
  SARS-CoV-2/Guangdong/GD2020087-P0008/2020__EPI_ISL_413863 spike protein (1-1211)(K986P_V987P_ H1048Q_H1064N_ H1083N_H1101N) Ferritin construct
MFVFLVLLPLVSSQCVNLTTRTQLPPAYTNSFTRGVYYPDKVFRSSVLHSTQDLFLPFFSNVTWFHAIHVSGTNGTKRFDNPVLPFNDGVYFASTEKSNIIRGWIFGTTLDSKTQSLLIVNNATNVVIKVCEFQFCNDPFLGVYYHKNNKSWMESEFRVYSSANNCTFEYVSQPFLMDLEGKQGNFKNLREFVFKNIDGYFKIYSKHTPINLVRDLPQGFSALEPLVDLPIGINITRFQTLLALHRSYLTPGDSSSGWTAGAAAYYVGYLQPRTFLLKYNENGTITDAVDCALDPLSETKCTLKSFTVEKGIYQTSNFRVQPTESIVRFPNITNLCPFGEVFNATRFASVYAWNRKRISNCVADYSVLYNSASFSTFKCYGVSPTKLNDLCFTNVYADSFVIRGDEVREIAPGQTGKIADYNYKLPDDFTGCVIAWNSNNLDSKVGGNYNYLYRLFRKSNLKPFERDISTEIYQAGSTPCNGVEGFNCYFPLQSYGFQPTNGVGYQPYRVVVLSFELLHAPATVCGPKKSTNLVKNKCVNFNFNGLTGTGVLTESNKKFLPFQQFGRDIADTTDAVRDPQTLEILDITPCSFGGVSVITPGTNTSNQVAVLYQDVNCTEVPVAIHADQLTPTWRVYSTGSNVFQTRAGCLIGAEHVNNSYECDIPIGAGICASYQTQTNSPRRARSVASQSIIAYTMSLGAENSVAYSNNSIAIPTNFTISVTTEILPVSMTKTSVDCTMYICGDSTECSNLLLQYGSFCTQLNRALTGIAVEQDKNTQEVFAQVKQIYKTPPIKDFGGFNFSQILPDPSKPSKRSFIEDLLFNKVTLADAGFIKQYGDCLGDIAARDLICAQKFNGLTVLPPLLTDEMIAQYTSALLAGTITSGWTFGAGAALQIPFAMQMAYRFNGIGVTQNVLYENQKLIANQFNSAIGKIQDSLSSTASALGKLQDVVNQNAQALNTLVKQLSSNFGAISSVLNDILSRLDPPEAEVQIDRLITGRLQSLQTYVTQQLIRAAEIRASANLAATKMSECVLGQSKRVDFCGKGYQLMSFPQSAPHGVVFLNVTYVPAQEKNFTTAPAICNDGKAHFPREGVFVSNGTNWFVTQRNFYEPQIITTDNTFVSGNCDVVIGIVNNTVYDPLQPELDSFKEELDKYFKNHTSPDVDLGDISGINASVVNIQKEIDRLNEVAKNLNESLIDLQELGKYEQYIKGGGGSDIIKLLNEQVNKEMQSSNLYMSMSSWCYTHSLDGAGLFLFDHAAEEYEHAKKLIIFLNENNVPVQLTSISAPEHKFEGLTQIFQKAYEHEQHISESINNIVDHAIKSKDHATFNFLQWYVAEQHEEEVLFKDILDKIELIGNENHGLYLADQYVKGIAKSRKS

SEQ ID NO: 4910 - protein, 1379 aa, Artificial Sequence
  SARS-CoV-2/Sweden/01/2020__EPI_ISL_411951 spike protein (1-1211)(K986P_V987P_ H1048Q_H1064N_ H1083N_H1101N) Ferritin construct
MFVFLVLLPLVSSQCVNLTTRTQLPPAYTNSFTRGVYYPDKVFRSSVLHSTQDLFLPFFSNVTWFHAIHVSGTNGTKRFDNPVLPFNDGVYFASTEKSNIIRGWIFGTTLDSKTQSLLIVNNATNVVIKVCEFQFCNDPFLGVYYHKNNKSWMESEFRVYSSANNCTFEYVSQPFLMDLEGKQGNFKNLREFVFKNIDGYFKIYSKHTPINLVRDLPQGFSALEPLVDLPIGINITRFQTLLALHRSYLTPGDSSSGWTAGAAAYYVGYLQPRTFLLKYNENGTITDAVDCALDPLSETKCTLKSFTVEKGIYQTSNFRVQPTESIVRFPNITNLCPFGEVFNATRFASVYAWNRKRISNCVADYSVLYNSASFSTFKCYGVSPTKLNDLCFTNVYADSFVIRGDEVRQIAPGQTGKIADYNYKLPDDFTGCVIAWNSNNLDSKVGGNYNYLYRLFRKSNLKPFERDISTEIYQAGSTPCNGVEGFNCYFPLQSYGFQPTNGVGYQPYRVVVLSFELLHAPATVCGPKKSTNLVKNKCVNFNFNGLTGTGVLTESNKKFLPFQQFGRDIADTTDAVRDPQTLEILDITPCSFGGVSVITPGTNTSNQVAVLYQDVNCTEVPVAIHADQLTPTWRVYSTGSNVFQTRAGCLIGAEHVNNSYECDIPIGAGICASYQTQTNSPRRARSVASQSIIAYTMSLGAENSVAYSNNSIAIPTNFTISVTTEILPVSMTKTSVDCTMYICGDSTECSNLLLQYGSFCTQLNRALTGIAVEQDKNTQEVFAQVKQIYKTPPIKDCGGFNFSQILPDPSKPSKRSFIEDLLFNKVTLADAGFIKQYGDCLGDIAARDLICAQKFNGLTVLPPLLTDEMIAQYTSALLAGTITSGWTFGAGAALQIPFAMQMAYRFNGIGVTQNVLYENQKLIANQFNSAIGKIQDSLSSTASALGKLQDVVNQNAQALNTLVKQLSSNFGAISSVLNDILSRLDPPEAEVQIDRLITGRLQSLQTYVTQQLIRAAEIRASANLAATKMSECVLGQSKRVDFCGKGYQLMSFPQSAPHGVVFLNVTYVPAQEKNFTTAPAICNDGKAHFPREGVFVSNGTNWFVTQRNFYEPQIITTDNTFVSGNCDVVIGIVNNTVYDPLQPELDSFKEELDKYFKNHTSPDVDLGDISGINASVVNIQKEIDRLNEVAKNLNESLIDLQELGKYEQYIKGGGGSDIIKLLNEQVNKEMQSSNLYMSMSSWCYTHSLDGAGLFLFDHAAEEYEHAKKLIIFLNENNVPVQLTSISAPEHKFEGLTQIFQKAYEHEQHISESINNIVDHAIKSKDHATFNFLQWYVAEQHEEEVLFKDILDKIELIGNENHGLYLADQYVKGIAKSRKS

SEQ ID NO: 4911 - protein, 1379 aa, Artificial Sequence
  SARS-CoV-2/Tianmen/HBCDC-HB-07/2020__EPI_ISL_412983 spike protein (1-1211)(K986P_V987P_ H1048Q_H1064N_ H1083N_H1101N) Ferritin construct
MFVFLVLLPLVSSQCVNLTTRTQLPPAYTNSFTRGVYYPDKVFRSSVLHSTQDLFLPFFSNVTWFHAIHVSGTNGTKRFDNPVLPFNDGVYFASTEKSNIIRGWIFGTTLDSKTQSLLIVNNATNVVIKVCEFQFCNDPFLGVYYHKNNKSWMESEFRVYSSANNCTFEYVSQPFLMDLEGKQGNFKNLREFVFKNIDGYFKIYSKHTPINLVRDLPQGFSALEPLVDLPIGINITRFQTLLALHRSYLTPGDSSSGWTAGAAAYYVGYLQPRTFLLKYNENGTITDAVDCALDPLSETKCTLKSFTVEKGIYQTSNFRVQPTESIVRFPNITNLCPFGEVFNATRFASVYAWNRKRISNCVADYSVLYNSASFSTFKCYGVSPTKLNDLCFTNVYADSFVIRGDEVRQIAPGQTGKIADYNYKLPDDFTGCVIAWNSNNLDSKVGGNYNYLYRLFRKSNLKPFERDISTEIYQAGSTPCNGVEGFNCYFPLQSYGFQPTNGVGYQPYRVVVLSFELLHAPATVCGPKKSTNLVKNKCVNFNFNGLTGTGVLTESNKKFLPFQQFGRDIADTTDAVRDPQTLEILDITPCSFGGVSVITPGTNTSNQVAVLYQDLNCTEVPVAIHADQLTPTWRVYSTGSNVFQTRAGCLIGAEHVNNSYECDIPIGAGICASYQTQTNSPRRARSVASQSIIAYTMSLGAENSVAYSNNSIAIPTNFTISVTTEILPVSMTKTSVDCTMYICGDSTECSNLLLQYGSFCTQLNRALTGIAVEQDKNTQEVFAQVKQIYKTPPIKDFGGFNFSQILPDPSKPSKRSFIEDLLFNKVTLADAGFIKQYGDCLGDIAARDLICAQKFNGLTVLPPLLTDEMIAQYTSALLAGTITSGWTFGAGAALQIPFAMQMAYRFNGIGVTQNVLYENQKLIANQFNSAIGKIQDSLSSTASALGKLQDVVNQNAQALNTLVKQLSSNFGAISSVLNDILSRLDPPEAEVQIDRLITGRLQSLQTYVTQQLIRAAEIRASANLAATKMSECVLGQSKRVDFCGKGYQLMSFPQSAPHGVVFLNVTYVPAQEKNFTTAPAICNDGKAHFPREGVFVSNGTNWFVTQRNFYEPQIITTDNTFVSGNCDVVIGIVNNTVYDPLQPELDSFKEELDKYFKNHTSPDVDLGDISGINASVVNIQKEIDRLNEVAKNLNESLIDLQELGKYEQYIKGGGGSDIIKLLNEQVNKEMQSSNLYMSMSSWCYTHSLDGAGLFLFDHAAEEYEHAKKLIIFLNENNVPVQLTSISAPEHKFEGLTQIFQKAYEHEQHISESINNIVDHAIKSKDHATFNFLQWYVAEQHEEEVLFKDILDKIELIGNENHGLYLADQYVKGIAKSRKS

SEQ ID NO: 4912 - protein, 1379 aa, Artificial Sequence
  SARS-CoV-2/Hong Kong/case42_VM20002493/2020__EPI_ISL_414527 spike protein (1-1211)(K986P_V987P_ H1048Q_H1064N_ H1083N_H1101N) Ferritin construct
MFVFLVLLPLVSSQCVNLTTRTQLPPAYTNSFTRGVYYPDKVFRSSVLHSTQDLFLPFFSNVTWFHAIHVSGTNGTKRFDNPVLPFNDGVYFASTEKSNIIRGWIFGTTLDSKTQSLLIVNNATNVVIKVCEFQFCNDPFLGVYYHKNNKSWMESEFRVYSSANNCTFEYVSQPFLMDLEGKQGNFKNLREFVFKNIDGYFKIYSKHTPINLVRDLPQGFSALEPLVDLPIGINITRFQTLLALHRSYLTPGDSSSGWTAGAAAYYVGYLQPRTFLLKYNENGTITDAVDCALDPLSETKCTLKSFTVEKGIYQTSNFRVQPTESIVRFPNITNLCPFGEVFNATRFASVYAWNRKRISNCVADYSVLYNSASFSTFKCYGVSPTKLNDLCFTNVYADSFVIRGDEVRQIAPGQTGKIADYNYKLPDDFTGCVIAWNSNNLDSKVGGNYNYLYRLFRKSNLKPFERDISTEIYQAGSTPCNGVEGFNCYFPLQSYGFQPTNGVGYQPYRVVVLSFELLHAPATVCGPKKSTNLVKNKCVNFNFNGLTGTGVLTESNKKFLPFQQFGRDIADTTDAVRDPQTLEILDITPCSFGGVSVITPGTNTSNQVAVLYQDVNCTEVPVAIHADQLTPTWRVYSTGSNVFQTRAGCLIGAEHVNNSYECDIPIGAGICASYQTQTNSPRRARSVASQSIIAYTMSLGAENSVAYSNNSIAIPTNFAISVTTEILPVSMTKTSVDCTMYICGDSTECSNLLLQYGSFCTQLNRALTGIAVEQDKNTQEVFAQVKQIYKTPPIKDFGGFNFSQILPDPSKPSKRSFIEDLLFNKVTLADAGFIKQYGDCLGDIAARDLICAQKFNGLTVLPPLLTDEMIAQYTSALLAGTITSGWTFGAGAALQIPFAMQMAYRFNGIGVTQNVLYENQKLIANQFNSAIGKIQDSLSSTASALGKLQDVVNQNAQALNTLVKQLSSNFGAISSVLNDILSRLDPPEAEVQIDRLITGRLQSLQTYVTQQLIRAAEIRASANLAATKMSECVLGQSKRVDFCGKGYQLMSFPQSAPHGVVFLNVTYVPAQEKNFTTAPAICNDGKAHFPREGVFVSNGTNWFVTQRNFYEPQIITTDNTFVSGNCDVVIGIVNNTVYDPLQPELDSFKEELDKYFKNHTSPDVDLGDISGINASVVNIQKEIDRLNEVAKNLNESLIDLQELGKYEQYIKGGGGSDIIKLLNEQVNKEMQSSNLYMSMSSWCYTHSLDGAGLFLFDHAAEEYEHAKKLIIFLNENNVPVQLTSISAPEHKFEGLTQIFQKAYEHEQHISESINNIVDHAIKSKDHATFNFLQWYVAEQHEEEVLFKDILDKIELIGNENHGLYLADQYVKGIAKSRKS

SEQ ID NO: 4913 - protein, 1379 aa, Artificial Sequence
  SARS-CoV-2/USA/CruiseA-23/2020__EPI_ISL_414482 spike protein (1-1211)(K986P_V987P_ H1048Q_H1064N_ H1083N_H1101N) Ferritin construct
MFVFLVLLPLVSSQCVNLTTRTQLPPAYTNSFTRGVYYPDKVFRSSVLHSTQDLFLPFFSNVTWFHAIHVSGTNGTKRFDNPVLPFNDGVYFASTEKSNIIRGWIFGTTLDSKTQSLLIVNNATNVVIKVCEFQFCNDPFLGVYYHKNNKSWMESEFRVYSSANNCTFEYVSQPFLMDLEVKQGNFKNLREFVFKNIDGYFKIYSKHTPINLVRDLPQGFSALEPLVDLPIGINITRFQTLLALHRSYLTPGDSSSGWTAGAAAYYVGYLQPRTFLLKYNENGTITDAVDCALDPLSETKCTLKSFTVEKGIYQTSNFRVQPTESIVRFPNITNLCPFGEVFNATRFASVYAWNRKRISNCVADYSVLYNSASFSTFKCYGVSPTKLNDLCFTNVYADSFVIRGDEVRQIAPGQTGKIADYNYKLPDDFTGCVIAWNSNNLDSKVGGNYNYLYRLFRKSNLKPFERDISTEIYQAGSTPCNGVEGFNCYFPLQSYGFQPTNGVGYQPYRVVVLSFELLHAPATVCGPKKSTNLVKNKCVNFNFNGLTGTGVLTESNKKFLPFQQFGRDIADTTDAVRDPQTLEILDITPCSFGGVSVITPGTNTSNQVAVLYQDVNCTEVPVAIHADQLTPTWRVYSTGSNVFQTRAGCLIGAEHVNNSYECDIPIGAGICASYQTQTNSPRRARSVASQSIIAYTMSLGAENSVAYSNNSIAIPTNFTISVTTEILPVSMTKTSVDCTMYICGDSTECSNLLLQYGSFCTQLNRALTGIAVEQDKNTQEVFAQVKQIYKTPPIKDFGGFNFSQILPDPSKPSKRSFIEDLLFNKVTLADAGFIKQYGDCLGDIAARDLICAQKFNGLTVLPPLLTDEMIAQYTSALLAGTITSGWTFGAGAALQIPFAMQMAYRFNGIGVTQNVLYENQKLIANQFNSAIGKIQDSLSSTASALGKLQDVVNQNAQALNTLVKQLSSNFGAISSVLNDILSRLDPPEAEVQIDRLITGRLQSLQTYVTQQLIRAAEIRASANLAATKMSECVLGQSKRVDFCGKGYQLMSFPQSAPHGVVFLNVTYVPAQEKNFTTAPAICNDGKAHFPREGVFVSNGTNWFVTQRNFYEPQIITTDNTFVSGNCDVVIGIVNNTVYDPLQPELDSFKEELDKYFKNHTSPDVDLGDISGINASVVNIQKEIDRLNEVAKNLNESLIDLQELGKYEQYIKGGGGSDIIKLLNEQVNKEMQSSNLYMSMSSWCYTHSLDGAGLFLFDHAAEEYEHAKKLIIFLNENNVPVQLTSISAPEHKFEGLTQIFQKAYEHEQHISESINNIVDHAIKSKDHATFNFLQWYVAEQHEEEVLFKDILDKIELIGNENHGLYLADQYVKGIAKSRKS

SEQ ID NO: 4914 - protein, 1379 aa, Artificial Sequence
  SARS-CoV-2/Hong Kong/case85_VM20002868/2020__EPI_ISL_414519 spike protein (1-1211)(K986P_V987P_ H1048Q_H1064N_ H1083N_H1101N) Ferritin construct
MFVFLVLVPLVSSQCVNLTTRTQLPPAYTNSFTRGVYYPDKVFRSSVLHSTQDLFLPFFSNVTWFHAIHVSGTNGTKRFDNPVLPFNDGVYFASTEKSNIIRGWIFGTTLDSKTQSLLIVNNATNVVIKVCEFQFCNDPFLGVYYHKNNKSWMESEFRVYSSANNCTFEYVSQPFLMDLEGKQGNFKNLREFVFKNIDGYFKIYSKHTPINLVRDLPQGFSALEPLVDLPIGINITRFQTLLALHRSYLTPGDSSSGWTAGAAAYYVGYLQPRTFLLKYNENGTITDAVDCALDPLSETKCTLKSFTVEKGIYQTSNFRVQPTESIVRFPNITNLCPFGEVFNATRFASVYAWNRKRISNCVADYSVLYNSASFSTFKCYGVSPTKLNDLCFTNVYADSFVIRGDEVRQIAPGQTGKIADYNYKLPDDFTGCVIAWNSNNLDSKVGGNYNYLYRLFRKSNLKPFERDISTEIYQAGSTPCNGVEGFNCYFPLQSYGFQPTNGVGYQPYRVVVLSFELLHAPATVCGPKKSTNLVKNKCVNFNFNGLTGTGVLTESNKKFLPFQQFGRDIADTTDAVRDPQTLEILDITPCSFGGVSVITPGTNTSNQVAVLYQDVNCTEVPVAIHADQLTPTWRVYSTGSNVFQTRAGCLIGAEHVNNSYECDIPIGAGICASYQTQTNSPRRARSVASQSIIAYTMSLGAENSVAYSNNSIAIPTNFTISVTTEILPVSMTKTSVDCTMYICGDSTECSNLLLQYGSFCTQLNRALTGIAVEQDKNTQEVFAQVKQIYKTPPIKDFGGFNFSQILPDPSKPSKRSFIEDLLFNKVTLADAGFIKQYGDCLGDIAARDLICAQKFNGLTVLPPLLTDEMIAQYTSALLAGTITSGWTFGAGAALQIPFAMQMAYRFNGIGVTQNVLYENQKLIANQFNSAIGKIQDSLSSTASALGKLQDVVNQNAQALNTLVKQLSSNFGAISSVLNDILSRLDPPEAEVQIDRLITGRLQSLQTYVTQQLIRAAEIRASANLAATKMSECVLGQSKRVDFCGKGYQLMSFPQSAPHGVVFLNVTYVPAQEKNFTTAPAICNDGKAHFPREGVFVSNGTNWFVTQRNFYEPQIITTDNTFVSGNCDVVIGIVNNTVYDPLQPELDSFKEELDKYFKNHTSPDVDLGDISGINASVVNIQKEIDRLNEVAKNLNESLIDLQELGKYEQYIKGGGGSDIIKLLNEQVNKEMQSSNLYMSMSSWCYTHSLDGAGLFLFDHAAEEYEHAKKLIIFLNENNVPVQLTSISAPEHKFEGLTQIFQKAYEHEQHISESINNIVDHAIKSKDHATFNFLQWYVAEQHEEEVLFKDILDKIELIGNENHGLYLADQYVKGIAKSRKS

SEQ ID NO: 4915 - protein, 1379 aa, Artificial Sequence; identical to SEQ ID NO: 4905
  SARS-CoV-2/England/200990660/2020__EPI_ISL_414523 spike protein (1-1211)(K986P_V987P_ H1048Q_H1064N_ H1083N_H1101N) Ferritin construct

SEQ ID NO: 4916 - protein, 1379 aa, Artificial Sequence
  SARS-CoV-2/Australia/NSW09/2020__EPI_ISL_413595 spike protein (1-1211)(K986P_V987P_ H1048Q_H1064N_ H1083N_H1101N) Ferritin construct
MFVFLVLLPLVSSQCVNLTTRTQLPPAYTNSFTRGVYYPDKVFRSSVLHSTQDLFLPFFSNVTWFHAIHVSGTNGTKRFDNPVLPFNDGVYFASTEKSNIIRGWIFGTTLDSKTQSLLIVNNATNVVIKVCEFQFCNDPFLGVYYHKNNKSWMESEFRVYSSANNCTFEYVSQPFLMDLEGKQGNFKNLREFVFKNIDGYFKIYSKHTPINLVRDLPQGFSALEPLVDLPIGINITRFQTLLALHRSYLTPGDSSSGWTAGAAAYYVGYLQPRTFLLKYNENGTITDAVDCALDPLSETKCTLKSFTVEKGIYQTSNFRVQPTESIVRFPNITNLCPFGEVFNATRFASVYAWNRKRISNCVADYSVLYNSASFSTFKCYGVSPTKLNDLCFTNVYADSFVIRGDEVRQIAPGQTGKIADYNYKLPDDFTGCVIAWNSNNLDSKVGGNYNYLYRLFRKSNLKPFERDISTEIYQAGSTPCNGVEGFNCYFPLQSYGFQPTNGVGYQPYRVVVLSFELLHAPATVCGPKKSTNLVKNKCVNFNFNGLTGTGVLTESNKKFLPFQQFGRDIADTTDAVRDPQTLEILDITPCSFGGVSVITPGTNTSNQVAVLYQDVNCTEVPVAIHADQLTPTWRVYSTGSNVFQTRAGCLIGAEHVNNSYECDIPIGAGICASYQTQTNSPRRARSVASQSIIAYTMSLGAENSVAYSNNSIAIPTNFTISVTTEILPVSMTKTSVDCTMYICGDSTECSNLLLQYGSFCTQLNRALTGIAVEQDKNTQEVFAQVKQIYKTPPIKDFGGFNFSQILPDPSKPSKRSFIEDLLFNKVTLADAGFIKQYGDCLGDIAARDLICAQKFNGLTVLPPLLTDEMIAQYTSALLAGTITSGWTFGAGAALQIPFAMQMAYRFNGIGVTQNVLYENQKLIANQFNSAIGKIQDSLSFTASALGKLQDVVNQNAQALNTLVKQLSSNFGAISSVLNDILSRLDPPEAEVQIDRLITGRLQSLQTYVTQQLIRAAEIRASANLAATKMSECVLGQSKRVDFCGKGYQLMSFPQSAPHGVVFLNVTYVPAQEKNFTTAPAICNDGKAHFPREGVFVSNGTNWFVTQRNFYEPQIITTDNTFVSGNCDVVIGIVNNTVYDPLQPELDSFKEELDKYFKNHTSPDVDLGDISGINASVVNIQKEIDRLNEVAKNLNESLIDLQELGKYEQYIKGGGGSDIIKLLNEQVNKEMQSSNLYMSMSSWCYTHSLDGAGLFLFDHAAEEYEHAKKLIIFLNENNVPVQLTSISAPEHKFEGLTQIFQKAYEHEQHISESINNIVDHAIKSKDHATFNFLQWYVAEQHEEEVLFKDILDKIELIGNENHGLYLADQYVKGIAKSRKS

SEQ ID NO: 4917 - protein, 1379 aa, Artificial Sequence; identical to SEQ ID NO: 4897
  SARS-CoV-2/Australia/NSW10/2020__EPI_ISL_413596 spike protein (1-1211)(K986P_V987P_ H1048Q_H1064N_ H1083N_H1101N) Ferritin construct

SEQ ID NO: 4918 - protein, 1379 aa, Artificial Sequence
  SARS-CoV-2/Switzerland/1000477797/2020__EPI_ISL_413023 spike protein (1-1211)(K986P_V987P_ H1048Q_H1064N_ H1083N_H1101N) Ferritin construct
MFVFLVLLPLVSSQCVNLTTRTQLPPAYTNSFTRGVYYPDKVFRSSVLHSTQDLFLPFFSNVTWFHAIHVSGTNGTKRFDNPVLPFNDGVYFASTEKSNIIRGWIFGTTLDSKTQSLLIVNNATNVVIKVCEFQFCNDPFLGVYYHKNNKSWMESEFRVYSSANNCTFEYVSQPFLMDLEGKQGNFKNLREFVFKNIDGYFNIYSKHTPINLVRDLPQGFSALEPLVDLPIGINITRFQTLLALHRSYLTPGDSSSGWTAGAAAYYVGYLQPRTFLLKYNENGTITDAVDCALDPLSETKCTLKSFTVEKGIYQTSNFRVQPTESIVRFPNITNLCPFGEVFNATRFASVYAWNRKRISNCVADYSVLYNSASFSTFKCYGVSPTKLNDLCFTNVYADSFVIRGDEVRQIAPGQTGKIADYNYKLPDDFTGCVIAWNSNNLDSKVGGNYNYLYRLFRKSNLKPFERDISTEIYQAGSTPCNGVEGFNCYFPLQSYGFQPTNGVGYQPYRVVVLSFELLHAPATVCGPKKSTNLVKNKCVNFNFNGLTGTGVLTESNKKFLPFQQFGRDIADTTDAVRDPQTLEILDITPCSFGGVSVITPGTNTSNQVAVLYQGVNCTEVPVAIHADQLTPTWRVYSTGSNVFQTRAGCLIGAEHVNNSYECDIPIGAGICASYQTQTNSPRRARSVASQSIIAYTMSLGAENSVAYSNNSIAIPTNFTISVTTEILPVSMTKTSVDCTMYICGDSTECSNLLLQYGSFCTQLNRALTGIAVEQDKNTQEVFAQVKQIYKTPPIKDFGGFNFSQILPDPSKPSKRSFIEDLLFNKVTLADAGFIKQYGDCLGDIAARDLICAQKFNGLTVLPPLLTDEMIAQYTSALLAGTITSGWTFGAGAALQIPFAMQMAYRFNGIGVTQNVLYENQKLIANQFNSAIGKIQDSLSSTASALGKLQDVVNQNAQALNTLVKQLSSNFGAISSVLNDILSRLDPPEAEVQIDRLITGRLQSLQTYVTQQLIRAAEIRASANLAATKMSECVLGQSKRVDFCGKGYQLMSFPQSAPHGVVFLNVTYVPAQEKNFTTAPAICNDGKAHFPREGVFVSNGTNWFVTQRNFYEPQIITTDNTFVSGNCDVVIGIVNNTVYDPLQPELDSFKEELDKYFKNHTSPDVDLGDISGINASVVNIQKEIDRLNEVAKNLNESLIDLQELGKYEQYIKGGGGSDIIKLLNEQVNKEMQSSNLYMSMSSWCYTHSLDGAGLFLFDHAAEEYEHAKKLIIFLNENNVPVQLTSISAPEHKFEGLTQIFQKAYEHEQHISESINNIVDHAIKSKDHATFNFLQWYVAEQHEEEVLFKDILDKIELIGNENHGLYLADQYVKGIAKSRKS

SEQ ID NO: 4919 - protein, 1379 aa, Artificial Sequence
  SARS-CoV-2/Belgium/BA-02291/2020__EPI_ISL_415159 spike protein (1-1211)(K986P_V987P_ H1048Q_H1064N_ H1083N_H1101N) Ferritin construct
MFVFLVLLPLVSSQCVNLTTRTQLPPAYTNSFTRGVYYPDKVFRSSVLHSTQDLFLPFFSNVTWFHAIHVSGTNGTKRFDNPVLPFNDGVYFASTEKSNIIRGWIFGTTLDSKTQSLLIVNNATNVVIKVCEFQFCNDPFLGVYYHKNNKSWMESEFRVYSSANNCTFEYVSQPFLMDLEGKQGNFKNLREFVFKNIDGYFKIYSKHTPINLVRDLPQGFSALEPLVDLPIGINITRFQTLLALHRSYLTPGDSSSGWTAGAAAYYVGYLQPRTFLLKYNENGTITDAVDCALDPLSETKCTLKSFTVEKGIYQTSNFRVQPTESIVRFPNITNLCPFGEVFNATRFASVYAWNRKRISNCVADYSVLYNSASFSTFKCYGVSPTKLNDLCFTNVYADSFVIRGDEVRQIAPGQTGKIADYNYKLPDDFTGCVIAWNSNNLDSKVGGNYNYLYRLFRRSNLKPFERDISTEIYQAGSTPCNGVEGFNCYFPLQSYGFQPTNGVGYQPYRVVVLSFELLPAPATVCGPKKSTNLVKNKCVNFNFNGLTGTGVLTESNKKFLPFQQFGRDIADTTDAVRDPQTLEILDITPCSFGGVSVITPGTNTSNQVAVLYQGVNCTEVPVAIHADQLTPTWRVYSTGSNVFQTRAGCLIGAEHVNNSYECDIPIGAGICASYQTQTNSPRRARSVASQSIIAYTMSLGAENSVAYSNNSIAIPTNFTISVTTEILPVSMTKTSVDCTMYICGDSTECSNLLLQYGSFCTQLNRALTGIAVEQDKNTQEVFAQVKQIYKTPPIKDFGGFNFSQILPDPSKPSKRSFIEDLLFNKVTLADAGFIKQYGDCLGDIAARDLICAQKFNGLTVLPPLLTDEMIAQYTSALLAGTITSGWTFGAGAALQIPFAMQMAYRFNGIGVTQNVLYENQKLIANQFNSAIGKIQDSLSSAAPALGKLQDVVNQNAQALNTLVKQLSSNFGAISSVLNDILSRLDPPEAEVQIDRLITGRLQSLQTYVTQQLIRAAEIRASANLAATKMSECVLGQSKRVDFCGKGYQLMSFPQSAPHGVVFLNVTYVPAQEKNFTTAPAICNDGKAHFPREGVFVSNGTNWFVTQRNFYEPQIITTDNTFVSGNCDVVIGIVNNTVYDPLQPELDSFKEELDKYFKNHTSPDVDLGDISGINASVVNIQKEIDRLNEVAKNLNESLIDLQELGKYEQYIKGGGGSDIIKLLNEQVNKEMQSSNLYMSMSSWCYTHSLDGAGLFLFDHAAEEYEHAKKLIIFLNENNVPVQLTSISAPEHKFEGLTQIFQKAYEHEQHISESINNIVDHAIKSKDHATFNFLQWYVAEQHEEEVLFKDILDKIELIGNENHGLYLADQYVKGIAKSRKS

SEQ ID NO: 4920 - protein, 1379 aa, Artificial Sequence
  SARS-CoV-2/USA/WA8-UW5/2020__EPI_ISL_413486 spike protein (1-1211)(K986P_V987P_ H1048Q_H1064N_ H1083N_H1101N) Ferritin construct
MFVFLVLLPLVSSQCVNLTTRTQLPPAYTNSFTRGVYYPDKVFRSSVLHSTQDLFLPFFSNVTWFHAIHVSGTNGTKRFDNPVLPFNDGVYFASTEKSNIIRGWIFGTTLDSKTQSLLIVNNATNVVIKVCEFQFCNDPFLGVYYHKNNKSWMESEFRVYSSANNCTFEYVSQPFLMDLEGKQGNFKNLREFVFKNIDGYFKIYSKHTPINLVRDLPQGFSALEPLVDLPIGINITRFQTLLALHRSYLTPGDSSSGWTAGAAAYYVGYLQPRTFLLKYNENGTITDAVDCALDPLSETKCTLKSFTVEKGIYQTSNFRVQPTESIVRFPNITNLCPFGEVFNATRFASVYAWNRKRISNCVADYSVLYNSASFSTFKCYGVSPTKLNDLCFTNVYADSFVIRGDEVRQIAPGQTGKIADYNYKLPDDFTGCVIAWNSNNLDSKVGGNYNYLYRLFRKSNLKPFERDISTEIYQAGSTPCNGVEGFNCYFPLQSYGFQPTNGVGYQPYRVVVLSFELLHAPATVCGPKKSTNLVKNKCVNFNFNGLTGTGVLTESNKKFLPFQQFGRDIADTTDAVRDPQTLEILDITPCSFGGVSVITPGTNTSNQVAVLYQDVNCTEVPVAIHADQLTPTWRVYSTGSNVFQTRAGCLIGAEYVNNSYECDIPIGAGICASYQTQTNSPRRARSVASQSIIAYTMSLGAENSVAYSNNSIAIPTNFTISVTTEILPVSMTKTSVDCTMYICGDSTECSNLLLQYGSFCTQLNRALTGIAVEQDKNTQEVFAQVKQIYKTPPIKDFGGFNFSQILPDPSKPSKRSFIEDLLFNKVTLADAGFIKQYGDCLGDIAARDLICAQKFNGLTVLPPLLTDEMIAQYTSALLAGTITSGWTFGAGAALQIPFAMQMAYRFNGIGVTQNVLYENQKLIANQFNSAIGKIQDSLSSTASALGKLQDVVNQNAQALNTLVKQLSSNFGAISSVLNDILSRLDPPEAEVQIDRLITGRLQSLQTYVTQQLIRAAEIRASANLAATKMSECVLGQSKRVDFCGKGYQLMSFPQSAPHGVVFLNVTYVPAQEKNFTTAPAICNDGKAHFPREGVFVSNGTNWFVTQRNFYEPQIITTDNTFVSGNCDVVIGIVNNTVYDPLQPELDSFKEELDKYFKNHTSPDVDLGDISGINASVVNIQKEIDRLNEVAKNLNESLIDLQELGKYEQYIKGGGGSDIIKLLNEQVNKEMQSSNLYMSMSSWCYTHSLDGAGLFLFDHAAEEYEHAKKLIIFLNENNVPVQLTSISAPEHKFEGLTQIFQKAYEHEQHISESINNIVDHAIKSKDHATFNFLQWYVAEQHEEEVLFKDILDKIELIGNENHGLYLADQYVKGIAKSRKS

SEQ ID NO: 4921 - protein, 1379 aa, Artificial Sequence
  SARS-CoV-2/England/20102000506/2020__EPI_ISL_415147 spike protein (1-1211)(K986P_V987P_ H1048Q_H1064N_ H1083N_H1101N) Ferritin construct
MFVFLVLLPLVSSQCVNLTTRTQLPPAYTNSFTRGVYYPDKVFRSSVLHSTQDLFLPFFSNVTWFHAIHVSGTNGTKRFDNPVLPFNDGVYFASTEKSNIIRGWIFGTTLDSKTQSLLIVNNATNVVIKVCEFQFCNDPFLGVYYHKNNKSWMESEFRVYSSANNCTFEYVSQPFLMDLEGKQGNFKNLREFVFKNIDGYFKIYSKHTPINLVRDLPQGFSALEPLVDLPIGINITRFQTLLALHRSYLTPGDSSSGWTAGAAAYYVGYLQPRTFLLKYNENGTITDAVDCALDPLSETKCTLKSFTVEKGIYQTSNFRVQPTESIVRFPNITNLCPFGEVFNATRFASVYAWNRKRISNCVADYSVLYNSASFSTFKCYGVSPTKLNDLCFTNVYADSFVIRGDEVRQIAPGQTGKIADYNYKLPDDFTGCVIAWNSNNLDSKVGGNYNYLYRLFRKSNLKPFERDISTEIYQAGSTPCNGVEGFNCYFPLQSYGFQPTNGVGYQPYRVVVLSFELLHAPATVCGPKKSTNLVKNKCVNFNFNGLTGTGVLTESNKKFLPFQQFGRDIADTTDAVRDPQTLEILDITPCSFGGVSVITPGTNTSNQVAVLYQGVNCTEVPVAIHADQLTPTWRVYSTGSNVFQTRAGCLIGAEHVNNSYECDIPIGAGICASYQTQTNSPRRARSVASQSIIAYTMSLGAENSVAYSNNSIAIPTNFTISVTTEILPVSMTKTSVDCTMYICGDSTECSNLLLQYGSFCTQLNRALTGIAVEQDKNTQEVFAQVKQIYKTPPIKDFGGFNFSQILPDPSKPSKRSFIEDLLFNKVTLADAGFIKQYGYCLGDIAARDLICAQKFNGLTVLPPLLTDEMIAQYTSALLAGTITSGWTFGAGAALQIPFAMQMAYRFNGIGVTQNVLYENQKLIANQFNSAIGKIQDSLSSTASALGKLQDVVNQNAQALNTLVKQLSSNFGAISSVLNDILSRLDPPEAEVQIDRLITGRLQSLQTYVTQQLIRAAEIRASANLAATKMSECVLGQSKRVDFCGKGYQLMSFPQSAPHGVVFLNVTYVPAQEKNFTTAPAICNDGKAHFPREGVFVSNGTNWFVTQRNFYEPQIITTDNTFVSGNCDVVIGIVNNTVYDPLQPELDSFKEELDKYFKNHTSPDVDLGDISGINASVVNIQKEIDRLNEVAKNLNESLIDLQELGKYEQYIKGGGGSDIIKLLNEQVNKEMQSSNLYMSMSSWCYTHSLDGAGLFLFDHAAEEYEHAKKLIIFLNENNVPVQLTSISAPEHKFEGLTQIFQKAYEHEQHISESINNIVDHAIKSKDHATFNFLQWYVAEQHEEEVLFKDILDKIELIGNENHGLYLADQYVKGIAKSRKS

SEQ ID NO: 4922 - protein, 1379 aa, Artificial Sequence
  SARS-CoV-2/Belgium/VAG-03013/2020__EPI_ISL_415155 spike protein (1-1211)(K986P_V987P_ H1048Q_H1064N_ H1083N_H1101N) Ferritin construct
MFVFLVLLPLVSSQCVNLTTRTQLPPAYTNSFTRGVYYPDKVFRSSVLHSTQDLFLPFFSNVTWFHAIHVSGTNGTKRFDNPVLPFNDGVYFASTEKSNIIRGWIFGTTLDSKTQSLLIVNNATNVVIKVCEFQFCNDPFLGVYYHKNNKSWMESEFRVYSSANNCTFEYVSQPFLMDLEGKQGNFKNLREFVFKNIDGYFKIYSKHTPINLVRDLPQGFSALEPLVDLPIGINITRFQTLLALHRSYLTPGDSSSGWTAGAAAYYVGYLQPRTFLLKYNENGTITDAVDCALDPLSETKCTLKSFTVEKGIYQTSNFRVQPTESIVRFPNITNLCPFGEVFNATRFASVYAWNRKRISNCVADYSVLYNSASFSTFKCYGVSPTKLNDLCFTNVYADSFVIRGDEVRQIAPGQTGKIADYNYKLPDDFTGCVIAWNSNNLDSKVGGNYNYLYRLFRKSNLKPFERDISTEIYQAGSTPCNGVEGFNCYFPLQSYGFQPTNGVGYQPYRVVVLSFELLHAPATVCGPKKSTNLVKNKCVNFNFNGLTGTGVLTESNKKFLPFQQFGRDIADTTDAVRDPQTLEILDITPCSFGGVSVITPGTNTSNQVAVLYQGVNCTEVPVAIHADQLTPTWRVYSTGSNVFQTRAGCLIGAEHVNNSYECDIPIGAGICASYQTQTNSPRRARSVASQSIIAYTMSLGAENSVAYSNNSIAIPTNFTISVTTEILPVSMTKTSVDCTMYICGDSTECSNLLLQYGSFCTQLNRALTGIAVEQDKNTQEVFAQVKQIYKTPPIKDFGGFNFSQILPDPSKPSKRSFIEDLLFNKVTLADAGFIKQYGDCLGDIAARDLICAQKFNGLTVLPPLLTDEMIAQYTSALLAGTITSGWTFGAGAALQIPFAMQMAYRFNGIGVTQNVLYENQKLIANQFNSAIGKIQDSLSSTATALGKLQDVVNQNAQALNTLVKQLSSNFGAISSVLNDILSRLDPPEAEVQIDRLITGRLQSLQTYVTQQLIRAAEIRASANLAATKMSECVLGQSKRVDFCGKGYQLMSFPQSAPHGVVFLNVTYVPAQEKNFTTAPAICNDGKAHFPREGVFVSNGTNWFVTQRNFYEPQIITTDNTFVSGNCDVVIGIVNNTVYDPLQPELDSFKEELDKYFKNHTSPDVDLGDISGINASVVNIQKEIDRLNEVAKNLNESLIDLQELGKYEQYIKGGGGSDIIKLLNEQVNKEMQSSNLYMSMSSWCYTHSLDGAGLFLFDHAAEEYEHAKKLIIFLNENNVPVQLTSISAPEHKFEGLTQIFQKAYEHEQHISESINNIVDHAIKSKDHATFNFLQWYVAEQHEEEVLFKDILDKIELIGNENHGLYLADQYVKGIAKSRKS

SEQ ID NO: 4923 - protein, 1379 aa, Artificial Sequence
  SARS-CoV-2/Belgium/BC-03016/2020__EPI_ISL_415157 spike protein (1-1211)(K986P_V987P_ H1048Q_H1064N_ H1083N_H1101N) Ferritin construct
MFVFLVLLPLVSSQCVNLTTRTQLPPAYTNSFTRGVYYPDKVFRSSVLHSTQDLFLPFFSNVTWFHAIHVSGTNGTKRFDNPVLPFNDGVYFASTEKSNIIRGWIFGTTLDSKTQSLLIVNNATNVVIKVCEFQFCNDPFLGVYYHKNNKSWMESEFRVYSSANNCTFEYVSQPFLMDLEGKQGNFKNLREFVFKNIDGYFKIYSKHTPINLVRDLPQGFSALEPLVDLPIGINITRFQTLLALHRSYLTPGDSSSGWTAGAAAYYVGYLQPRTFLLKYNENGTITDAVDCALDPLSETKCTLKSFTVEKGIYQTSNFRVQPTESIVRFPNITNLCPFGEVFNATRFASVYAWNRKRISNCVADYSVLYNSASFSTFKCYGVSPTKLNDLCFTNVYADSFVIRGDEVRQIAPGQTGKIADYNYKLPDDFTGCVIAWNSNNLDSKVGGNYNYLYRLFRKSNLKPFERDISTEIYQAGSTPCNGVEGFNCYFPLQSYGFQPTNGVGYQPYRVVVLSFELLHAPATVCGPKKSTNLVKNKCVNFNFNGLTGTGVLTESNKKFLPFQQFGRDIADTTDAVRDPQTLEILDITPCSFGGVSVITPGTNTSNQVAVLYQGVNCTEVPVAIHADQLTPTWRVYSTGSNVFQTRAGCLIGAEHVNNSYECDIPIGAGICASYQTQTNSPRRARSVASQSIIAYTMSLGAENSVAYSNNSIAIPTNFTISVTTEILPVSMTKTSVDCTMYICGDSTECSNLLLQYGSFCTQLNRALTGIAVEQDKNTQEVFAQVKQIYKTPPIKDFGGFNFSQILPDPSKPSKRSFIEDLLFNKVTLADAGFIKQYGDCLGDIAARDLICAQKFNGLTVLPPLLTDEMIAQYTSALLAGTITSGWTFGAGAALQIPFAMQMAYRFNGIGVTQNVLYENQKLIANQFNSAIGKIQDSLSSTAPALGKLQDVVNQNAQALNTLVKQLSSNFGAISSVLNDILSRLDPPEAEVQIDRLITGRLQSLQTYVTQQLIRAAEIRASANLAATKMSECVLGQSKRVDFCGKGYQLMSFPQSAPHGVVFLNVTYVPAQEKNFTTAPAICNDGKAHFPREGVFVSNGTNWFVTQRNFYEPQIITTDNTFVSGNCDVVIGIVNNTVYDPLQPELDSFKEELDKYFKNHTSPDVDLGDISGINASVVNIQKEIDRLNEVAKNLNESLIDLQELGKYEQYIKGGGGSDIIKLLNEQVNKEMQSSNLYMSMSSWCYTHSLDGAGLFLFDHAAEEYEHAKKLIIFLNENNVPVQLTSISAPEHKFEGLTQIFQKAYEHEQHISESINNIVDHAIKSKDHATFNFLQWYVAEQHEEEVLFKDILDKIELIGNENHGLYLADQYVKGIAKSRKS

SEQ ID NO: 4924 - protein, 1379 aa, Artificial Sequence
  SARS-CoV-2/Germany/BavPat3/2020__EPI_ISL_414521 spike protein (1-1211)(K986P_V987P_ H1048Q_H1064N_ H1083N_H1101N) Ferritin construct
MFVFLVLLPLVSSQCVNLTTRTQLPPAYTNSFTRGVYYPDKVFRSSVLHSTQDLFLPFFSNVTWFHAIHVSGTNGTKRFDNPVLPFNDGVYFASTEKSNIIRGWIFGTTLDSKTQSLLIVNNATNVVIKVCEFQFCNDPFLGVYYHKNNKSWMESEFRVYSSANNCTFEYVSQPFLMDLEGKQGNFKNLREFVFKNIDGYFKIYSKHTPINLVRDLPQGFSALEPLVDLPIGINITRFQTLLALHRSYLTPGDSSSGWTAGAAAYYVGYLQPRTFLLKYNENGTITDAVDCALDPLSETKCTLKSFTVEKGIYQTSNFRVQPTESIVRFPNITNLCPFGEVFNATRFASVYAWNRKRISNCVADYSVLYNSASFSTFKCYGVSPTKLNDLCFTNVYADSFVIRGDEVRQIAPGQTGKIADYNYKLPDDFTGCVIAWNSNNLDSKVGGNYNYLYRLFRKSNLKPFERDISTEIYQAGSTPCNGVEGFNCYFPLQSYGFQPTNGVGYQPYRVVVLSFELLHAPATVCGPKKSTNLVKNKCVNFNFNGLTGTGVLTESNKKFLPFQQFGRDIADTTDAVRDPQTLEILDITPCSFGGVSVITPGTNTSNQVAVLYQDVNCTEVPVAIHADQLTPTWRVYSTGSNVFQTRAGCLIGAEHVNNSYECDIPIGAGICASYQTQTNSPRRARSVASQSIIAYTMSLGAENSVAYSNNSIAIPTNFTISVTTEILPVSMTKTSVDCTMYICGDSTECSNLLLQYGSFCTQLNRALTGIAVEQDKNTQQVFAQVKQIYKTPPIKDFGGFNFSQILPDPSKPSKRSFIEDLLFNKVTLADAGFIKQYGDCLGDIAARDLICAQKFNGLTVLPPLLTDEMIAQYTSALLAGTITSGWTFGAGAALQIPFAMQMAYRFNGIGVTQNVLYENQKLIANQFNSAIGKIQDSLSSTASALGKLQDVVNQNAQALNTLVKQLSSNFGAISSVLNDILSRLDPPEAEVQIDRLITGRLQSLQTYVTQQLIRAAEIRASANLAATKMSECVLGQSKRVDFCGKGYQLMSFPQSAPHGVVFLNVTYVPAQEKNFTTAPAICNDGKAHFPREGVFVSNGTNWFVTQRNFYEPQIITTDNTFVSGNCDVVIGIVNNTVYDPLQPELDSFKEELDKYFKNHTSPDVDLGDISGINASVVNIQKEIDRLNEVAKNLNESLIDLQELGKYEQYIKGGGGSDIIKLLNEQVNKEMQSSNLYMSMSSWCYTHSLDGAGLFLFDHAAEEYEHAKKLIIFLNENNVPVQLTSISAPEHKFEGLTQIFQKAYEHEQHISESINNIVDHAIKSKDHATFNFLQWYVAEQHEEEVLFKDILDKIELIGNENHGLYLADQYVKGIAKSRKS

SEQ ID NO: 4925 - protein, 1379 aa, Artificial Sequence
  SARS-CoV-2/France/HF1805/2020__EPI_ISL_414628 spike protein (1-1211)(K986P_V987P_ H1048Q_H1064N_ H1083N_H1101N) Ferritin construct
MFVFLVLLPLVSSQCVNLTTRTQLPPAYTNSFTRGVYYPDKVFRSSVLHSTQDLFLPFFSNVTWFHAIHVSGTNGTKRFDNPVLPFNDGVYFASTEKSNIIRGWIFGTTLDSKTQSLLIVNNATNVVIKVCEFQFCNDPFLGVYYHKNNKSWMESEFRVYSSANNCTFEYVSQPFLMDLEGKQGNFKNLREFVFKNIDGYFKIYSKHTPINLVRDLPQGFSALEPLVDLPIGINITRFQTLLALHRSYLTPGDSSSGWTAGAAAYYVGYLQPRTFLLKYNENGTITDAVDCALDPLSETKCTLKSFTVEKGIYQTSNFRVQPTESIVRFPNITNLCPFGEVFNATRFASVYAWNRKRISNCVADYSVLYNSASFSTFKCYGVSPTKLNDLCFTNVYADSFVIRGDEVRQIAPGQTGKIADYNYKLPDDFTGCVIAWNSNNLDSKVGGNYNYLYRLFRKSNLKPFERDISTEIYQAGSTPCNGVEGFNCYFPLQSYGFQPTNGVGYQPYRVVVLSFELLHAPATVCGPKKSTNLVKNKCVNFNFNGLTGTGVLTESNKKFLPFQQFGRDIADTTDAVRDPQTLEILDITPCSFGGVSVITPGTNTSNQVAVLYQGVNCTEVPVAIHADQLTPTWRVYSTGSNVFQTRAGCLIGAEHVNNSYECDIPIGAGICASYQTQTNSPRRARSVASQSIIAYTMSLGAENSVAYSNNSIAIPTNFTISVTTEILPVSMTKTSVDCTMYICGDSTECSNLLLQYGSFCTQLNRALTGIAVEQDKNTQEVFAQVKQIYKTPPIKDFGGFNFSQILPDPSKPSKRSFIEDLLFNKVTLADAGFIKQYGDCLGDIAARDLICAQKFNGLTVLPPLLTDEMIAQYTSALLAGTITSGWTFGAGAALQIPFAMQMAYRFNGIGVTQNVLYENQKLIANQFNSAIGKIQDSLSSTASALGKLQDVVNQNAQALNTLVKQLSSNFGAISSVLNDILSRLDPPEAEVQIDRLITGRLQSLQTYVTQQLIRAAEIRASANLAATKMSECVLGQSKRVDFCGKGYQLMSFPQSAPHGVVFLNVTYVPAQEKNFTTAPAICNDGKAHFPREGVFVSNGTNWFVTQRNFYEPQIITTDNTFVSGNCDVVIGVVNNTVYDPLQPELDSFKEELDKYFKNHTSPDVDLGDISGINASVVNIQKEIDRLNEVAKNLNESLIDLQELGKYEQYIKGGGGSDIIKLLNEQVNKEMQSSNLYMSMSSWCYTHSLDGAGLFLFDHAAEEYEHAKKLIIFLNENNVPVQLTSISAPEHKFEGLTQIFQKAYEHEQHISESINNIVDHAIKSKDHATFNFLQWYVAEQHEEEVLFKDILDKIELIGNENHGLYLADQYVKGIAKSRKS

SEQ ID NO: 4926 - protein, 1379 aa, Artificial Sequence
  SARS-CoV-2/Netherlands/ZuidHolland_9/2020__EPI_ISL_414445 spike protein (1-1211)(K986P_V987P_ H1048Q_H1064N_ H1083N_H1101N) Ferritin construct
MFVFLVLLPLVSSQCVNLTTRTQLPPAYTNSFTRGVYYPDKVFRSSVLHSTQDLFLPFFSNVTWFHAIHVSGTNGTKRFDNPVLPFNDGVYFASTEKSNIIRGWIFGTTLDSKTQSLLIVNNATNVVIKVCEFQFCNDPFLGVYYHKNNKSWMESEFRVYSSANNCTFEYVSQPFLMDLEGKQGNFKNLREFVFKNIDGYFKIYSKHTPINLVRDLPQGFSALEPLVDLPIGINITRFQTLLALHRSYLTPGDSSSGWTAGAAAYYVGYLQPRTFLLKYNENGTITDAVDCALDPLSETKCTLKSFTVEKGIYQTSNFRVQPTESIVRFPNITNLCPFGEVFNATRFASVYAWNRKRISNCVADYSVLYNSASFSTFKCYGVSPTKLNDLCFTNVYADSFVIRGDEVRQIAPGQTGKIADYNYKLPDDFTGCVIAWNSNNLDSKVGGNYNYLYRLFRKSNLKPFERDISTEIYQAGSTPCNGVEGFNCYFPLQSYGFQPTNGVGYQPYRVVVLSFELLHAPATVCGPKKSTNLVKNKCVNFNFNGLTGTGVLTESNKKFLPFQQFGRDIADTTDAVRDPQTLEILDITPCSFGGVSVITPGTNTSNQVAVLYQGVNCTEVPVAIHADQLTPTWRVYSTGSNVFQTRAGCLIGAEHVNNSYECDIPIGAGICASYQTQTNSPRRARSVASQSIIAYTMSLGAENSVAYSNNSIAIPTNFTISVTTEILPVSMTKTSVDCTMYICGDSTECSNLLLQYGSFCTQLNRALTGIAVEQDKNTQEVFAQVKQIYKTPPIKDFGGFNFSQILPDPSKPSKRSFIEDLLFNKVTLADAGFIKQYGDCLGDIAARDLICVQKFNGLTVLPPLLTDEMIAQYTSALLAGTITSGWTFGAGAALQIPFAMQMAYRFNGIGVTQNVLYENQKLIANQFNSAIGKIQDSLSSTASALGKLQDVVNQNAQALNTLVKQLSSNFGAISSVLNDILSRLDPPEAEVQIDRLITGRLQSLQTYVTQQLIRAAEIRASANLAATKMSECVLGQSKRVDFCGKGYQLMSFPQSAPHGVVFLNVTYVPAQEKNFTTAPAICNDGKAHFPREGVFVSNGTNWFVTQRNFYEPQIITTDNTFVSGNCDVVIGIVNNTVYDPLQPELDSFKEELDKYFKNHTSPDVDLGDISGINASVVNIQKEIDRLNEVAKNLNESLIDLQELGKYEQYIKGGGGSDIIKLLNEQVNKEMQSSNLYMSMSSWCYTHSLDGAGLFLFDHAAEEYEHAKKLIIFLNENNVPVQLTSISAPEHKFEGLTQIFQKAYEHEQHISESINNIVDHAIKSKDHATFNFLQWYVAEQHEEEVLFKDILDKIELIGNENHGLYLADQYVKGIAKSRKS

SEQ ID NO: 4927 - protein, 1379 aa, Artificial Sequence
  SARS-CoV-2/Finland/FIN03032020A/2020__EPI_ISL_413602 spike protein (1-1211)(K986P_V987P_ H1048Q_H1064N_ H1083N_H1101N) Ferritin construct
MFVFLVLLPLVSSQCVNLTTRTQLPPAYTNSFTRGVYYPDKVFRSSVLHSTQDLFLPFFSNVTWFHAIHVSGTNGTKRFDNPVLPFNDGVYFASTEKSNIIRGWIFGTTLDSKTQSLLIVNNATNVVIKVCEFQFCNDPFLGVYYHKNNKSWMESEFRVYSSANNCTFEYVSQPFLMDLEGKQGNFKNLREFVFKNIDGYFKIYSKHTPINLVRDLPQGFSALEPLVDLPIGINITRFQTLLALHRSYLTPGDSSSGWTAGAAAYYVGYLQPRTFLLKYNENGTITDAVDCALDPLSETKCTLKSFTVEKGIYQTSNFRVQPTESIVRFPNITNLCPFGEVFNATRFASVYAWNRKRISNCVADYSVLYNSASFSTFKCYGVSPTKLNDLCFTNVYADSFVIRGDEVRQIAPGQTGKIADYNYKLPDDFTGCVISWNSNNLDSKVGGNYNYLYRLFRKSNLKPFERDISTEIYQAGSTPCNGVEGFNCYFPLQSYGFQPTNGVGYQPYRVVVLSFELLHAPATVCGPKKSTNLVKNKCVNFNFNGLTGTGVLTESNKKFLPFQQFGRDIADTTDAVRDPQTLEILDITPCSFGGVSVITPGTNTSNQVAVLYQGVNCTEVPVAIHADQLTPTWRVYSTGSNVFQTRAGCLIGAEHVNNSYECDIPIGAGICASYQTQTNSPRRARSVASQSIIAYTMSLGAENSVAYSNNSIAIPTNFTISVTTEILPVSMTKTSVDCTMYICGDSTECSNLLLQYGSFCTQLNRALTGIAVEQDKNTQEVFAQVKQIYKTPPIKDFGGFNFSQILPDPSKPSKRSFIEDLLFNKVTLADAGFIKQYGDCLGDIAARDLICAQKFNGLTVLPPLLTDEMIAQYTSALLAGTITSGWTFGAGAALQIPFAMQMAYRFNGIGVTQNVLYENQKLIANQFNSAIGKIQDSLSSTASALGKLQDVVNQNAQALNTLVKQLSSNFGAISSVLNDILSRLDPPEAEVQIDRLITGRLQSLQTYVTQQLIRAAEIRASANLAATKMSECVLGQSKRVDFCGKGYQLMSFPQSAPHGVVFLNVTYVPAQEKNFTTAPAICNDGKAHFPREGVFVSNGTNWFVTQRNFYEPQIITTDNTFVSGNCDVVIGIVNNTVYDPLQPELDSFKEELDKYFKNHTSPDVDLGDISGINASVVNIQKEIDRLNEVAKNLNESLIDLQELGKYEQYIKGGGGSDIIKLLNEQVNKEMQSSNLYMSMSSWCYTHSLDGAGLFLFDHAAEEYEHAKKLIIFLNENNVPVQLTSISAPEHKFEGLTQIFQKAYEHEQHISESINNIVDHAIKSKDHATFNFLQWYVAEQHEEEVLFKDILDKIELIGNENHGLYLADQYVKGIAKSRKS

SEQ ID NO: 4928 - protein, 1379 aa, Artificial Sequence
  SARS-CoV-2/France/GE1977/2020__EPI_ISL_414632 spike protein (1-1211)(K986P_V987P_ H1048Q_H1064N_ H1083N_H1101N) Ferritin construct
MFVFLVLLPLVSSQCVNLTTRTQLPPAYTNSFTRGVYYPDKVFRSSVLHSTQDLFLPFFSNVTWFHAIHVSGTNGTKRFDNPVLPFNDGVYFASTEKSNIIRGWIFGTTLDSKTQSLLIVNNATNVVIKVCEFQFCNDPFLGVYYHKNNKSWMESEFRVYSSANNCTFEYVSQPFLMDLEGKQGNFKNLREFVFKNIDGYFKIYSKHTPINLVRDLPQGFSALEPLVDLPIGINITRFQTLLALHRSYLTPGDSSSGWTAGAAAYYVGYLQPRTFLLKYNENGTITDAVDCALDPLSETKCTLKSFTVEKGIYQTSNFRVQPTESIVRFPNITNLCPFGEVFNATRFASVYAWNRKRISNCVADYSVLYNSASFSTFKCYGVSPTKLNDLCFTNVYADSFVIRGDEVRQIAPGQTGKIADYNYKLPDDFTGCVIAWNSNNLDSKVGGNYNYLYRLFRKSNLKPFERDISTEIYQAGSTPCNGVEGFNCYFPLQSYGFQPTNGVGYQPYRVVVLSFELLHAPATVCGPKKSTNLVKNKCVNFNFNGLTGTGVLTESNKKFLPFQQFGRDIADTTDAVRDPQTLEILDITPCSFGGVSVITPGTNTSNQVAVLYQGVNCTEVPVAIHADQLTPTWRVYSTGSNVFQTRAGCLIGAEHVNNSYECDIPIGAGICASYQTQTNSPRRARSVASQSIIAYTMSLGAENSVAYSNNSIAIPTNFTISVTTEILPVSMTKTSVDCTMYICGDSTECSNLLLQYGSFCTQLNRALTGIAVEQDKNTQEVFAQVKQIYKTPPIKDFGGFNFSQILPDPSKPSKRSFIEDLLFNKVTLADAGFIKQYGDCLGDIAARDLICAQKFNGLTVLPPLLTDEMIAQYTSALLAGTITSGWTFGAGAALQIPFAMQMAYRFNGIGVTQNVLYENQKLIANQFNSAIGKIQDSLFSTASALGKLQDVVNQNAQALNTLVKQLSSNFGAISSVLNDILSRLDPPEAEVQIDRLITGRLQSLQTYVTQQLIRAAEIRASANLAATKMSECVLGQSKRVDFCGKGYQLMSFPQSAPHGVVFLNVTYVPAQEKNFTTAPAICNDGKAHFPREGVFVSNGTNWFVTQRNFYEPQIITTDNTFVSGNCDVVIGIVNNTVYDPLQPELDSFKEELDKYFKNHTSPDVDLGDISGINASVVNIQKEIDRLNEVAKNLNESLIDLQELGKYEQYIKGGGGSDIIKLLNEQVNKEMQSSNLYMSMSSWCYTHSLDGAGLFLFDHAAEEYEHAKKLIIFLNENNVPVQLTSISAPEHKFEGLTQIFQKAYEHEQHISESINNIVDHAIKSKDHATFNFLQWYVAEQHEEEVLFKDILDKIELIGNENHGLYLADQYVKGIAKSRKS

SEQ ID NO: 4929 - protein, 1379 aa, Artificial Sequence
  SARS-CoV-2/Finland/FIN-313/2020__EPI_ISL_414641 spike protein (1-1211)(K986P_V987P_ H1048Q_H1064N_ H1083N_H1101N) Ferritin construct
MFVFLVLLPLVSSQCVNLTTRTQLPPAYTNSFTRGVYYPDKVFRSSVLHSTQDLFLPFFSNVTWFHAIHVSGTNGTKRFDNPVLPFNDGVYFASTEKSNIIRGWIFGTTLDSKTQSLLIVNNATNVVIKVCEFQFCNDPFLGVYYHKNNKSWMESEFRVYSSANNCTFEYVSQPFLMDLEGKQGNFKNLREFVFKNIDGYFKIYSKHTPINLVRDLPQGFSALEPLVDLPIGINITRFKTLLALHRSYLTPGDSSSGWTAGAAAYYVGYLQPRTFLLKYNENGTITDAVDCALDPLSETKCTLKSFTVEKGIYQTSNFRVQPTESIVRFPNITNLCPFGEVFNATRFASVYAWNRKRISNCVADYSVLYNSASFSTFKCYGVSPTKLNDLCFTNVYADSFVIRGDEVRQIAPGQTGKIADYNYKLPDDFTGCVIAWNSNNLDSKVGGNYNYLYRLFRKSNLKPFERDISTEIYQAGSTPCNGVEGFNCYFPLQSYGFQPTNGVGYQPYRVVVLSFELLHAPATVCGPKKSTNLVKNKCVNFNFNGLTGTGVLTESNKKFLPFQQFGRDIADTTDAVRDPQTLEILDITPCSFGGVSVITPGTNTSNQVAVLYQGVNCTEVPVAIHADQLTPTWRVYSTGSNVFQTRAGCLIGAEHVNNSYECDIPIGAGICASYQTQTNSPRRARSVASQSIIAYTMSLGAENSVAYSNNSIAIPTNFTISVTTEILPVSMTKTSVDCTMYICGDSTECSNLLLQYGSFCTQLNRALTGIAVEQDKNTQEVFAQVKQIYKTPPIKDFGGFNFSQILPDPSKPSKRSFIEDLLFNKVTLADAGFIKQYGDCLGDIAARDLICAQKFNGLTVLPPLLTDEMIAQYTSALLAGTITSGWTFGAGAALQIPFAMQMAYRFNGIGVTQNVLYENQKLIANQFNSAIGKIQDSLSSTASALGKLQDVVNQNAQALNTLVKQLSSNFGAISSVLNDILSRLDPPEAEVQIDRLITGRLQSLQTYVTQQLIRAAEIRASANLAATKMSECVLGQSKRVDFCGKGYQLMSFPQSAPHGVVFLNVTYVPAQEKNFTTAPAICNDGKAHFPREGVFVSNGTNWFVTQRNFYEPQIITTDNTFVSGNCDVVIGIVNNTVYDPLQPELDSFKEELDKYFKNHTSPDVDLGDISGINASVVNIQKEIDRLNEVAKNLNESLIDLQELGKYEQYIKGGGGSDIIKLLNEQVNKEMQSSNLYMSMSSWCYTHSLDGAGLFLFDHAAEEYEHAKKLIIFLNENNVPVQLTSISAPEHKFEGLTQIFQKAYEHEQHISESINNIVDHAIKSKDHATFNFLQWYVAEQHEEEVLFKDILDKIELIGNENHGLYLADQYVKGIAKSRKS

SEQ ID NO: 4930 - protein, 1379 aa, Artificial Sequence
  SARS-CoV-2/Netherlands/ZuidHolland_2/2020__EPI_ISL_414556 spike protein (1-1211)(K986P_V987P_ H1048Q_H1064N_ H1083N_H1101N) Ferritin construct
MFVFLVLLPLVSSQCVNLTTRTQLPPAYTNSFTRGVYYPDKVFRSSVLHSTQDLFLPFFSNVTWFHAIHVSGTNGTKRFDNPVLPFNDGVYFASTEKSNIIRGWIFGTTLDSKTQSLLIVNNATNVVIKVCEFQFCNDPFLGVYYHKNNKSWMESEFRVYSSANNCTFEYVSQPFLMDLEGKQGNFKNLREFVFKNIDGYFKIYSKHTPINLVRDLPQGFSALEPLVDLPIGINITRFQTLLALHRSYLTPGDSSSGWTAGAAAYYVGYLQPRTFLLKYNENGTITDAVDCALDPLSETKCTLKSFTVEKGIYQTSNFRVQPTESIVRFPNITNLCPFGEVFNATRFASVYAWNRKRISNCVADYSVLYNSASFSTFKCYGVSPTKLNDLCFTNVYADSFVIRGDEVRQIAPGQTGKIADYNYKLPDDFTGCVIAWNSNNLDSKVGGNYNYLYRLFRKSNLKPFERDISTEIYQAGSTPCNGVEGFNCYFPLQSYGFQPTNGVGYQPYRVVVLSFELLHAPATVCGPKKSTNLVKNKCVNFNFNGLTGTGVLTESNKKFLPFQQFGRDIADTTDAVRDPQTLEILDITPCSFGGVSVITPGTNTSNQVAVLYQGVNCTEVPVAIHADQLTPTWRVYSTGSNVFQTRAGCLIGAEHVNNSYECDIPIGAGICASYQTQTNSPRRARSVASQSIIAYTMSLGAENSVAYSNNSIAIPTNFTISVTTEILPVSMTKTSVDCTMYICGDSTECSNLLLQYGSFCTQLNRALTGIALEQDKNTQEVFAQVKQIYKTPPIKDFGGFNFSQILPDPSKPSKRSFIEDLLFNKVTLADAGFIKQYGDCLGDIAARDLICAQKFNGLTVLPPLLTDEMIAQYTSALLAGTITSGWTFGAGAALQIPFAMQMAYRFNGIGVTQNVLYENQKLIANQFNSAIGKIQDSLSSTASALGKLQDVVNQNAQALNTLVKQLSSNFGAISSVLNDILSRLDPPEAEVQIDRLITGRLQSLQTYVTQQLIRAAEIRASANLAATKMSECVLGQSKRVDFCGKGYQLMSFPQSAPHGVVFLNVTYVPAQEKNFTTAPAICNDGKAHFPREGVFVSNGTNWFVTQRNFYEPQIITTDNTFVSGNCDVVIGIVNNTVYDPLQPELDSFKEELDKYFKNHTSPDVDLGDISGINASVVNIQKEIDRLNEVAKNLNESLIDLQELGKYEQYIKGGGGSDIIKLLNEQVNKEMQSSNLYMSMSSWCYTHSLDGAGLFLFDHAAEEYEHAKKLIIFLNENNVPVQLTSISAPEHKFEGLTQIFQKAYEHEQHISESINNIVDHAIKSKDHATFNFLQWYVAEQHEEEVLFKDILDKIELIGNENHGLYLADQYVKGIAKSRKS

SEQ ID NO: 4931 - protein, 1379 aa, Artificial Sequence
  SARS-CoV-2/USA/WA-UW31/2020__EPI_ISL_414618 spike protein (1-1211)(K986P_V987P_ H1048Q_H1064N_ H1083N_H1101N) Ferritin construct
MFVFLVLLPLVSSQCVNLTTRTQLPPAYTNSFTRGVYYPDKVFRSSVLHSTQDLFLPFFSNVTWFHAIHVSGTNGTKRFDNPVLPFNDGVYFASTEKSNIIRGWIFGTTLDSKTQSLLIVNNATNVVIKVCEFQFCNDPFLGVYYHKNNKSWMESEFRVYSSANNCTFEYVSQPFLMDLEGKQGNFKNLREFVFKNIDGYFKIYSKHTPINLVRDLPQGFSALEPLVDLPIGINITRFQTLLALHRSYLTPGDSSSGWTAGAAAYYVGYLQPRTFLLKYNENGTITDAVDCALDPLSETKCTLKSFTVEKGIYQTSNFRVQPTESIVRFPNITNLCPFGEVFNATRFASVYAWNRKRISNCVADYSVLYNSASFSTFKCYGVSPTKLNDLCFTNVYADSFVIRGDEVRQIAPGQTGKIADYNYKLPDDFTGCVIAWNSNNLDSKVGGNYNYLYRLFRKSNLKPFERDISTEIYQAGSTPCNGAEGFNCYFPLQSYGFQPTNGVGYQPYRVVVLSFELLHAPATVCGPKKSTNLVKNKCVNFNFNGLTGTGVLTESNKKFLPFQQFGRDIADTTDAVRDPQTLEILDITPCSFGGVSVITPGTNTSNQVAVLYQDVNCTEVPVAIHADQLTPTWRVYSTGSNVFQTRAGCLIGAEHVNNSYECDIPIGAGICASYQTQTNSPRRARSVASQSIIAYTMSLGAENSVAYSNNSIAIPTNFTISVTTEILPVSMTKTSVDCTMYICGDSTECSNLLLQYGSFCTQLNRALTGIAVEQDKNTQEVFAQVKQIYKTPPIKDFGGFNFSQILPDPSKPSKRSFIEDLLFNKVTLADAGFIKQYGDCLGDIAARDLICAQKFNGLTVLPPLLTDEMIAQYTSALLAGTITSGWTFGAGAALQIPFAMQMAYRFNGIGVTQNVLYENQKLIANQFNSAIGKIQDSLSSTASALGKLQDVVNQNAQALNTLVKQLSSNFGAISSVLNDILSRLDPPEAEVQIDRLITGRLQSLQTYVTQQLIRAAEIRASANLAATKMSECVLGQSKRVDFCGKGYQLMSFPQSAPHGVVFLNVTYVPAQEKNFTTAPAICNDGKAHFPREGVFVSNGTNWFVTQRNFYEPQIITTDNTFVSGNCDVVIGIVNNTVYDPLQPELDSFKEELDKYFKNHTSPDVDLGDISGINASVVNIQKEIDRLNEVAKNLNESLIDLQELGKYEQYIKGGGGSDIIKLLNEQVNKEMQSSNLYMSMSSWCYTHSLDGAGLFLFDHAAEEYEHAKKLIIFLNENNVPVQLTSISAPEHKFEGLTQIFQKAYEHEQHISESINNIVDHAIKSKDHATFNFLQWYVAEQHEEEVLFKDILDKIELIGNENHGLYLADQYVKGIAKSRKS

SEQ ID NO: 4932 - protein, 1379 aa, Artificial Sequence
  SARS-CoV-2/South Korea/SNU01/2020__EPI_ISL_411929 spike protein (1-1211)(K986P_V987P_ H1048Q_H1064N_ H1083N_H1101N) Ferritin construct
MFVFLVLLPLVSSQCVNLTTRTQLPPAYTNSFTRGVYYPDKVFRSSVLHSTQDLFLPFFSNVTWFHAIHVSGTNGTKRFDNPVLPFNDGVYFASTEKSNIIRGWIFGTTLDSKTQSLLIVNNATNVVIKVCEFQFCNDPFLGVYYHKNNKSWMESEFRVYSSANNCTFEYVSQPFLMDLEGKQGNFKNLREFVFKNIDGYFKIYSKHTPINLVRDLPQGFWALEPLVDLPIGINITRFQTLLALHRSYLTPGDSSSGWTAGAAAYYVGYLQPRTFLLKYNENGTITDAVDCALDPLSETKCTLKSFTVEKGIYQTSNFRVQPTESIVRFPNITNLCPFGEVFNATRFASVYAWNRKRISNCVADYSVLYNSASFSTFKCYGVSPTKLNDLCFTNVYADSFVIRGDEVRQIAPGQTGKIADYNYKLPDDFTGCVIAWNSNNLDSKVGGNYNYLYRLFRKSNLKPFERDISTEIYQAGSTPCNGVEGFNCYFPLQSYGFQPTNGVGYQPYRVVVLSFELLHAPATVCGPKKSTNLVKNKCVNFNFNGLTGTGVLTESNKKFLPFQQFGRDIADTTDAVRDPQTLEILDITPCSFGGVSVITPGTNTSNQVAVLYQDVNCTEVPVAIHADQLTPTWRVYSTGSNVFQTRAGCLIGAEHVNNSYECDIPIGAGICASYQTQTNSPRRARSVASQSIIAYTMSLGAENSVAYSNNSIAIPTNFTISVTTEILPVSMTKTSVDCTMYICGDSTECSNLLLQYGSFCTQLNRALTGIAVEQDKNTQEVFAQVKQIYKTPPIKDFGGFNFSQILPDPSKPSKRSFIEDLLFNKVTLADAGFIKQYGDCLGDIAARDLICAQKFNGLTVLPPLLTDEMIAQYTSALLAGTITSGWTFGAGAALQIPFAMQMAYRFNGIGVTQNVLYENQKLIANQFNSAIGKIQDSLSSTASALGKLQDVVNQNAQALNTLVKQLSSNFGAISSVLNDILSRLDPPEAEVQIDRLITGRLQSLQTYVTQQLIRAAEIRASANLAATKMSECVLGQSKRVDFCGKGYQLMSFPQSAPHGVVFLNVTYVPAQEKNFTTAPAICNDGKAHFPREGVFVSNGTNWFVTQRNFYEPQIITTDNTFVSGNCDVVIGIVNNTVYDPLQPELDSFKEELDKYFKNHTSPDVDLGDISGINASVVNIQKEIDRLNEVAKNLNESLIDLQELGKYEQYIKGGGGSDIIKLLNEQVNKEMQSSNLYMSMSSWCYTHSLDGAGLFLFDHAAEEYEHAKKLIIFLNENNVPVQLTSISAPEHKFEGLTQIFQKAYEHEQHISESINNIVDHAIKSKDHATFNFLQWYVAEQHEEEVLFKDILDKIELIGNENHGLYLADQYVKGIAKSRKS

SEQ ID NO: 4933 - protein, 1379 aa, Artificial Sequence
  SARS-CoV-2/China/WF0004/2020__EPI_ISL_413694 spike protein (1-1211)(K986P_V987P_ H1048Q_H1064N_ H1083N_H1101N) Ferritin construct
MFVFLVLLPLVSSQCVNLTTRTQLPPAYTNSFTRGVYYPDKVFRSSVLHSTQDLFLPFFSNVTWFHAIHVSGTNGTKRFDNPVLPFNDGVYFASTEKSNIIRGWIFGTTLDSKTQSLLIVNNATNVVIKVCEFQFCNDPFLGVYYHKNNKSWTESEFRVYSSANNCTFEYVSQPFLMDLEGKQGNFKNLREFVFKNIDGYFKIYSKHTPINLVRDLPQGFSALEPLVDLPIGINITRFQTLLALHRSYLTPGDSSSGWTAGAAAYYVGYLQPRTFLLKYNENGTITDAVDCALDPLSETKCTLKSFTVEKGIYQTSNFRVQPTESIVRFPNITNLCPFGEVFNATRFASVYAWNRKRISNCVADYSVLYNSASFSTFKCYGVSPTKLNDLCFTNVYADSFVIRGDEVRQIAPGQTGKIADYNYKLPDDFTGCVIAWNSNNLDSKVGGNYNYLYRLFRKSNLKPFERDISTEIYQAGSTPCNGVEGFNCYFPLQSYGFQPTNGVGYQPYRVVVLSFELLHAPATVCGPKKSTNLVKNKCVNFNFNGLTGTGVLTESNKKFLPFQQFGRDIADTTDAVRDPQTLEILDITPCSFGGVSVITPGTNTSNQVAVLYQDVNCTEVPVAIHADQLTPTWRVYSTGSNVFQTRAGCLIGAEHVNNSYECDIPIGAGICASYQTQTNSPRRARSVASQSIIAYTMSLGAENSVAYSNNSIAIPTNFTISVTTEILPVSMTKTSVDCTMYICGDSTECSNLLLQYGSFCTQLNRALTGIAVEQDKNTQEVFAQVKQIYKTPPIKDFGGFNFSQILPDPSKPSKRSFIEDLLFNKVTLADAGFIKQYGDCLGDIAARDLICAQKFNGLTVLPPLLTDEMIAQYTSALLAGTITSGWTFGAGAALQIPFAMQMAYRFNGIGVTQNVLYENQKLIANQFNSAIGKIQDSLSSTASALGKLQDVVNQNAQALNTLVKQLSSNFGAISSVLNDILSRLDPPEAEVQIDRLITGRLQSLQTYVTQQLIRAAEIRASANLAATKMSECVLGQSKRFDFCGKGYQLMSFPQSAPHGVVFLNVTYVPAQEKNFTTAPAICNDGKAHFPREGVFVSNGTNWFVTQRNFYEPQIITTDNTFVSGNCDVVIGIVNNTVYDPLQPELDSFKEELDKYFKNHTSPDVDLGDISGINASVVNIQKEIDRLNEVAKNLNESLIDLQELGKYEQYIKGGGGSDIIKLLNEQVNKEMQSSNLYMSMSSWCYTHSLDGAGLFLFDHAAEEYEHAKKLIIFLNENNVPVQLTSISAPEHKFEGLTQIFQKAYEHEQHISESINNIVDHAIKSKDHATFNFLQWYVAEQHEEEVLFKDILDKIELIGNENHGLYLADQYVKGIAKSRKS

SEQ ID NO: 4934 - protein, 1379 aa, Artificial Sequence
  SARS-CoV-2/China/WF0028/2020__EPI_ISL_413791 spike protein (1-1211)(K986P_V987P_ H1048Q_H1064N_ H1083N_H1101N) Ferritin construct
MFVFLVLLPLVSSQCVNLTTRTQLPPAYTNSFTRGVYYPDKVFRSSVLHSTQDLFLPFFSNVTWFHAIHVSGTNGTKRFDNPVLPFNDGVYFASTEKSNIIRGWIFGTTLDSKTQSLLIVNNATNVVIKVCEFQFCNDPFLGVYYHKNNKSWMESEFRVYSSANNCTFEYVSQPFLMDLEGKQGNFKNLREFVFKNIDGYFKIYSKHTPINLVRDLPQGFSALEPLVDLPIGINITRFQTLLALHRSYLTPGDSSSGWTAGAAAYYVGYLQPRTFLLKYNENGTITDAVDCALDPLSETKCTLKSFTVEKGIYQTSNFRVQPTESIVRFPNITNLCPFGEVFNATRFASVYAWNRKRISNCVADYSVLYNSASFSTFKCYGVSPTKLNDLCFTNVYADSFVIRGDEVRQIAPGQTGKIADYNYKLPDDFTGCVIAWNSNNLDSKVGGNYNYLYRLFRKSNLKPFERDISTEIYQAGSTPCNGVEGFNCYFPLQSYGFQPTNGVGYQPYRVVVLSFELLHAPATVCGPKKSTNLVKNKCVNFNFNGLTGTGVLTESNKKFLPFQQFGRDIADTTDAVRDPQTLEILDITPCSFGGVSVITPGTNTSNQVAVLYQDVNCTEVPVAIHADQLTPTWRVYSTGSNVFQTRAGCLIGAEHVNNSYECDIPIGAGICASYQTQTNSPRRARSVASQSIIAYTMSLGAENSVAYSNNSIAIPTNFTISVTTEILPVSMTKTSVDCTMYICGDSTECSNLLLQYGSFCTQLNRALTGIAVEQDKNTQEVFAQVKQIYKTPPIKDFGGFNFSQILPDPSKPSKRSFIEDLLFNKVTLADAGFIKQYGDCLGDIAARDLICAQKFNGLTVLPPLLTDEMIAQYTSALLAGTITSGWTFGAGAALQIPFAMQMAYRFNGIGVTQNVLYENQKLIANQFNSAIGKIQDSLSSTASALGKLQDVVNQNAQALNTLVKQLSSNFGAISSVLNDILSRLDPPEAEVQIDRLITGRLQSLQTYVTQQLIRAAEIRASANLAATKMSECVLGQSKRVDFCGKGYQLMSFPQSAPHGVVFLNVTYVPAQEKNFTTAPAICNDGKAHFPREGVFVSNGTNWFVTQRNFYEPQIITTDNTFVSGNCDVVIGIVNNTVYDPLQPELESFKEELDKYFKNHTSPDVDLGDISGINASVVNIQKEIDRLNEVAKNLNESLIDLQELGKYEQYIKGGGGSDIIKLLNEQVNKEMQSSNLYMSMSSWCYTHSLDGAGLFLFDHAAEEYEHAKKLIIFLNENNVPVQLTSISAPEHKFEGLTQIFQKAYEHEQHISESINNIVDHAIKSKDHATFNFLQWYVAEQHEEEVLFKDILDKIELIGNENHGLYLADQYVKGIAKSRKS

SEQ ID NO: 4935 - protein, 1379 aa, Artificial Sequence
  SARS-CoV-2/2019-nCoV/USA-CruiseA-18/2020__MT159716.1 spike protein (1-1211)(K986P_V987P_ H1048Q_H1064N_ H1083N_H1101N) Ferritin construct
MFVFLVLLPLVSSQCVNLTTRTQLPPAYTNSFTRGVYYPDKVFRSSVLHSTQDLFLPFFSNVTWFHAIHVSGTNGTKRFDNPVLPFNDGVYFASTEKSNIIRGWIFGTTLDSKTQSLLIVNNATNVVIKVCEFQFCNDPFLGVYYHKNNKSWMESELRVYSSANNCTFEYVSQPFLMDLEGKQGNFKNLREFVFKNIDGYFKIYSKHTPINLVRDLPQGFSALEPLVDLPIGINITRFQTLLALHRSYLTPGDSSSGWTAGAAAYYVGYLQPRTFLLKYNENGTITDAVDCALDPLSETKCTLKSFTVEKGIYQTSNFRVQPTESIVRFPNITNLCPFGEVFNATRFASVYAWNRKRISNCVADYSVLYNSASFSTFKCYGVSPTKLNDLCFTNVYADSFVIRGDEVRQIAPGQTGKIADYNYKLPDDFTGCVIAWNSNNLDSKVGGNYNYLYRLFRKSNLKPFERDISTEIYQAGSTPCNGVEGFNCYFPLQSYGFQPTNGVGYQPYRVVVLSFELLHAPATVCGPKKSTNLVKNKCVNFNFNGLTGTGVLTESNKKFLPFQQFGRDIADTTDAVRDPQTLEILDITPCSFGGVSVITPGTNTSNQVAVLYQDVNCTEVPVAIHADQLTPTWRVYSTGSNVFQTRAGCLIGAEHVNNSYECDIPIGAGICASYQTQTNSPRRARSVASQSIIAYTMSLGAENSVAYSNNSIAIPTNFTISVTTEILPVSMTKTSVDCTMYICGDSTECSNLLLQYGSFCTQLNRALTGIAVEQDKNTQEVFAQVKQIYKTPPIKDFGGFNFSQILPDPSKPSKRSFIEDLLFNKVTLADAGFIKQYGDCLGDIAARDLICAQKFNGLTVLPPLLTDEMIAQYTSALLAGTITSGWTFGAGAALQIPFAMQMAYRFNGIGVTQNVLYENQKLIANQFNSAIGKIQDSLSSTASALGKLQDVVNQNAQALNTLVKQLSSNFGAISSVLNDILSRLDPPEAEVQIDRLITGRLQSLQTYVTQQLIRAAEIRASANLAATKMSECVLGQSKRVDFCGKGYQLMSFPQSAPHGVVFLNVTYVPAQEKNFTTAPAICNDGKAHFPREGVFVSNGTNWFVTQRNFYEPQIITTDNTFVSGNCDVVIGIVNNTVYDPLQPELDSFKEELDKYFKNHTSPDVDLGDISGINASVVNIQKEIDRLNEVAKNLNESLIDLQELGKYEQYIKGGGGSDIIKLLNEQVNKEMQSSNLYMSMSSWCYTHSLDGAGLFLFDHAAEEYEHAKKLIIFLNENNVPVQLTSISAPEHKFEGLTQIFQKAYEHEQHISESINNIVDHAIKSKDHATFNFLQWYVAEQHEEEVLFKDILDKIELIGNENHGLYLADQYVKGIAKSRKS

SEQ ID NO: 4936 - protein, 1379 aa, Artificial Sequence
  SARS-CoV-2/SARS-CoV-2/Yunnan-01/human/2020/CHN__MT049951.1 spike protein (1-1211)(K986P_V987P_ H1048Q_H1064N_ H1083N_H1101N) Ferritin construct
MFVFLVLLPLVSSQCVNLTTRTQLPPANTNSFTRGVYYPDKVFRSSVLHSTQDLFLPFFSNVTWFHAIHVSGTNGTKRFDNPVLPFNDGVYFASTEKSNIIRGWIFGTTLDSKTQSLLIVNNATNVVIKVCEFQFCNDPFLGVYYHKNNKSWMESEFRVYSSANNCTFEYVSQPFLMDLEGKQGNFKNLREFVFKNIDGYFKIYSKHTPINLVRDLPQGFSALEPLVDLPIGINITRFQTLLALHRSYLTPGDSSSGWTAGAAAYYVGYLQPRTFLLKYNENGTITDAVDCALDPLSETKCTLKSFTVEKGIYQTSNFRVQPTESIVRFPNITNLCPFGEVFNATRFASVYAWNRKRISNCVADYSVLYNSASFSTFKCYGVSPTKLNDLCFTNVYADSFVIRGDEVRQIAPGQTGKIADYNYKLPDDFTGCVIAWNSNNLDSKVGGNYNYLYRLFRKSNLKPFERDISTEIYQAGSTPCNGVEGFNCYFPLQSYGFQPTNGVGYQPYRVVVLSFELLHAPATVCGPKKSTNLVKNKCVNFNFNGLTGTGVLTESNKKFLPFQQFGRDIADTTDAVRDPQTLEILDITPCSFGGVSVITPGTNTSNQVAVLYQDVNCTEVPVAIHADQLTPTWRVYSTGSNVFQTRAGCLIGAEHVNNSYECDIPIGAGICASYQTQTNSPRRARSVASQSIIAYTMSLGAENSVAYSNNSIAIPTNFTISVTTEILPVSMTKTSVDCTMYICGDSTECSNLLLQYGSFCTQLNRALTGIAVEQDKNTQEVFAQVKQIYKTPPIKDFGGFNFSQILPDPSKPSKRSFIEDLLFNKVTLADAGFIKQYGDCLGDIAARDLICAQKFNGLTVLPPLLTDEMIAQYTSALLAGTITSGWTFGAGAALQIPFAMQMAYRFNGIGVTQNVLYENQKLIANQFNSAIGKIQDSLSSTASALGKLQDVVNQNAQALNTLVKQLSSNFGAISSVLNDILSRLDPPEAEVQIDRLITGRLQSLQTYVTQQLIRAAEIRASANLAATKMSECVLGQSKRVDFCGKGYQLMSFPQSAPHGVVFLNVTYVPAQEKNFTTAPAICNDGKAHFPREGVFVSNGTNWFVTQRNFYEPQIITTDNTFVSGNCDVVIGIVNNTVYDPLQPELDSFKEELDKYFKNHTSPDVDLGDISGINASVVNIQKEIDRLNEVAKNLNESLIDLQELGKYEQYIKGGGGSDIIKLLNEQVNKEMQSSNLYMSMSSWCYTHSLDGAGLFLFDHAAEEYEHAKKLIIFLNENNVPVQLTSISAPEHKFEGLTQIFQKAYEHEQHISESINNIVDHAIKSKDHATFNFLQWYVAEQHEEEVLFKDILDKIELIGNENHGLYLADQYVKGIAKSRKS

SEQ ID NO: 4937 - protein, 1379 aa, Artificial Sequence
  SARS-CoV-2/USA/WA-UW292/2020__EPI_ISL_418077 spike protein (1-1211)(K986P_V987P_ H1048Q_H1064N_ H1083N_H1101N) Ferritin construct
MFVFLVLLPLVSSQCVNLTTRTQLPPAYTNSFTRGVYYPDKVFRSSVLHSTQDLFLPFFSNVTWFHAIHVSGTNGTKRFDNPVLPFNDGVYFASTEKSNIIRGWIFGTTLDSKTQSLLIVNNATNVVIKVCEFQFCNDPFLGVYYHKNNKSWMESEFRVYSSANNCTFEYVSQPFLMDLEGKQGNFKNLREFVFKNIDGYFKIYSKHTPINLVRDLPQGFSALEPLVDLPIGINITRFQTLLALHRSYLTPGDSSSGWTAGAAAYYVGYLQPRTFLLKYNENGTITDAVDCALDPLSETKCTLKSFTVEKGIYQTSNFRVQPTESIVRFPNITNLCPFGEVFNATRFASVYAWNRKRISNCVADYSVLYNSASFSTFKCYGVSPTKLNDLCFTNVYADSFVIRGDEVRQIAPGQTGKIADYNYKLPDDFTGCVIAWNSNNLDSKVGGNYNYLYRLFRKSNLKPFERDISTEIYQASSTPCNGVEGFNCYFPLQSYGFQPTNGVGYQPYRVVVLSFELLHAPATVCGPKKSTNLVKNKCVNFNFNGLTGTGVLTESNKKFLPFQQFGRDIADTTDAVRDPQTLEILDITPCSFGGVSVITPGTNTSNQVAVLYQDVNCTEVPVAIHADQLTPTWRVYSTGSNVFQTRAGCLIGAEHVNNSYECDIPIGAGICASYQTQTNSPRRARSVASQSIIAYTMSLGAENSVAYSNNSIAIPTNFTISVTTEILPVSMTKTSVDCTMYICGDSTECSNLLLQYGSFCTQLNRALTGIAVEQDKNTQEVFAQVKQIYKTPPIKDFGGFNFSQILPDPSKPSKRSFIEDLLFNKVTLADAGFIKQYGDCLGDIAARDLICAQKFNGLTVLPPLLTDEMIAQYTSALLAGTITSGWTFGAGAALQIPFAMQMAYRFNGIGVTQNVLYENQKLIANQFNSAIGKIQDSLSSTASALGKLQDVVNQNAQALNTLVKQLSSNFGAISSVLNDILSRLDPPEAEVQIDRLITGRLQSLQTYVTQQLIRAAEIRASANLAATKMSECVLGQSKRVDFCGKGYQLMSFPQSAPHGVVFLNVTYVPAQEKNFTTAPAICNDGKAHFPREGVFVSNGTNWFVTQRNFYEPQIITTDNTFVSGNCDVVIGIVNNTVYDPLQPELDSFKEELDKYFKNHTSPDVDLGDISGINASVVNIQKEIDRLNEVAKNLNESLIDLQELGKYEQYIKGGGGSDIIKLLNEQVNKEMQSSNLYMSMSSWCYTHSLDGAGLFLFDHAAEEYEHAKKLIIFLNENNVPVQLTSISAPEHKFEGLTQIFQKAYEHEQHISESINNIVDHAIKSKDHATFNFLQWYVAEQHEEEVLFKDILDKIELIGNENHGLYLADQYVKGIAKSRKS

SEQ ID NO: 4938 - protein, 1379 aa, Artificial Sequence
  SARS-CoV-2/Iceland/192/2020__EPI_ISL_417819 spike protein (1-1211)(K986P_V987P_ H1048Q_H1064N_ H1083N_H1101N) Ferritin construct
MFVFFVLLPLVSSQCVNLTTRTQLPPAYTNSFTRGVYYPDKVFRSSVLHSTQDLFLPFFSNVTWFHAIHVSGTNGTKRFDNPVLPFNDGVYFASTEKSNIIRGWIFGTTLDSKTQSLLIVNNATNVVIKVCEFQFCNDPFLGVYYHKNNKSWMESEFRVYSSANNCTFEYVSQPFLMDLEGKQGNFKNLREFVFKNIDGYFKIYSKHTPINLVRDLPQGFSALEPLVDLPIGINITRFQTLLALHRSYLTPGDSSSGWTAGAAAYYVGYLQPRTFLLKYNENGTITDAVDCALDPLSETKCTLKSFTVEKGIYQTSNFRVQPTESIVRFPNITNLCPFGEVFNATRFASVYAWNRKRISNCVADYSVLYNSASFSTFKCYGVSPTKLNDLCFTNVYADSFVIRGDEVRQIAPGQTGKIADYNYKLPDDFTGCVIAWNSNNLDSKVGGNYNYLYRLFRKSNLKPFERDISTEIYQAGSTPCNGVEGFNCYFPLQSYGFQPTNGVGYQPYRVVVLSFELLHAPATVCGPKKSTNLVKNKCVNFNFNGLTGTGVLTESNKKFLPFQQFGRDIADTTDAVRDPQTLEILDITPCSFGGVSVITPGTNTSNQVAVLYQGVNCTEVPVAIHADQLTPTWRVYSTGSNVFQTRAGCLIGAEHVNNSYECDIPIGAGICASYQTQTNSPRRARSVASQSIIAYTMSLGAENSVAYSNNSIAIPTNFTISVTTEILPVSMTKTSVDCTMYICGDSTECSNLLLQYGSFCTQLNRALTGIAVEQDKNTQEVFAQVKQIYKTPPIKDFGGFNFSQILPDPSKPSKRSFIEDLLFNKVTLADAGFIKQYGDCLGDIAARDLICAQKFNGLTVLPPLLTDEMIAQYTSALLAGTITSGWTFGAGAALQIPFAMQMAYRFNGIGVTQNVLYENQKLIANQFNSAIGKIQDSLSSTASALGKLQDVVNQNAQALNTLVKQLSSNFGAISSVLNDILSRLDPPEAEVQIDRLITGRLQSLQTYVTQQLIRAAEIRASANLAATKMSECVLGQSKRVDFCGKGYQLMSFPQSAPHGVVFLNVTYVPAQEKNFTTAPAICNDGKAHFPREGVFVSNGTNWFVTQRNFYEPQIITTDNTFVSGNCDVVIGIVNNTVYDPLQPELDSFKEELDKYFKNHTSPDVDLGDISGINASVVNIQKEIDRLNEVAKNLNESLIDLQELGKYEQYIKGGGGSDIIKLLNEQVNKEMQSSNLYMSMSSWCYTHSLDGAGLFLFDHAAEEYEHAKKLIIFLNENNVPVQLTSISAPEHKFEGLTQIFQKAYEHEQHISESINNIVDHAIKSKDHATFNFLQWYVAEQHEEEVLFKDILDKIELIGNENHGLYLADQYVKGIAKSRKS

SEQ ID NO: 4939 - protein, 1379 aa, Artificial Sequence
  SARS-CoV-2/Belgium/ULG-6939/2020__EPI_ISL_417020 spike protein (1-1211)(K986P_V987P_ H1048Q_H1064N_ H1083N_H1101N) Ferritin construct
MFVFLVLLPLVSSQCVNLTTRTQLPPAYTNSFTRGVYYPDKVFRSSVLHSTQDLFLPFFSNVTWFHAIHVSGTNGTKRFDNPVLPFNDGVYFASTEKSNIIRGWIFGTTLDSKTQSLLIVNNATNVVIKVCEFQFCNDPFLGVYYHKNNKSWMESEFRVYSSANNCTFEYVSQPFLMDLEGKQGNFKNLREFVFKNIDGYFKIYSKHTPINLVRDLPQGFSALEPLVDLPIGINITRFQTLLALHRSYLTPGDSSSGWTAGAAAYYVGYLQPRTFLLKYNENGTITDAVDCALDPLSETKCTLKSFTVEKGIYQTSNFRVQPTESIVRFPNITNLCPFGEVFNATRFASVYAWNRKRISNCVADYSVLYNSASFSTFKCYGVSPTKLNDLCFTNVYADSFVIRGDEVRQIAPGQTGKIADYNYKLPDDFTGCVIAWNSNNLDSKVGGNYNYLYRLFRKSNLKPFERDISTEIYQAGSTPCNGVEGFNCYFPLQSYGFQPTNGVGYQPYRVVVLSFELLHAPATVCGPKKSTNLVKNKCVNFNFNGLTGTGVLTESNKKFLPFQQFGRDIADTTDAVRDPQTLEILDITPCSFGGVSVITPGTNTSNQVAVLYQGVNCTEVPVAIHADQLTPTWRVYSTGSNVFQTRAGCLIGAEHVNNSYECDIPIGAGICASYQTQTNSPRRARSVASQSIIAYTMSLGAENSVVYSNNSIAIPTNFTISVTTEILPVSMTKTSVDCTMYICGDSTECSNLLLQYGSFCTQLNRALTGIAVEQDKNTQEVFAQVKQIYKTPPIKDFGGFNFSQILPDPSKPSKRSFIEDLLFNKVTLADAGFIKQYGDCLGDIAARDLICAQKFNGLTVLPPLLTDEMIAQYTSALLAGTITSGWTFGAGAALQIPFAMQMAYRFNGIGVTQNVLYENQKLIANQFNSAIGKIQDSLSSTASALGKLQDVVNQNAQALNTLVKQLSSNFGAISSVLNDILSRLDPPEAEVQIDRLITGRLQSLQTYVTQQLIRAAEIRASANLAATKMSECVLGQSKRVDFCGKGYQLMSFPQSAPHGVVFLNVTYVPAQEKNFTTAPAICNDGKAHFPREGVFVSNGTNWFVTQRNFYEPQIITTDNTFVSGNCDVVIGIVNNTVYDPLQPELDSFKEELDKYFKNHTSPDVDLGDISGINASVVNIQKEIDRLNEVAKNLNESLIDLQELGKYEQYIKGGGGSDIIKLLNEQVNKEMQSSNLYMSMSSWCYTHSLDGAGLFLFDHAAEEYEHAKKLIIFLNENNVPVQLTSISAPEHKFEGLTQIFQKAYEHEQHISESINNIVDHAIKSKDHATFNFLQWYVAEQHEEEVLFKDILDKIELIGNENHGLYLADQYVKGIAKSRKS

SEQ ID NO: 4940 - protein, 1379 aa, Artificial Sequence
  SARS-CoV-2/France/HF2496/2020__EPI_ISL_418231 spike protein (1-1211)(K986P_V987P_ H1048Q_H1064N_ H1083N_H1101N) Ferritin construct
MFVFLVLLPLVSSQCVNLTTRTQLPPAYTNSFTRGVYYPDKVFRSSVLHSTQDLFLPFFSNVTWFHAIHVSGTNGTKRFDNPVLPFNDGVYFASTEKSNIIRGWIFGTTLDSKTQSLLIVNNATNVVIKVCEFQFCNDPFLGVYYHKNNKSWMESEFRVYSSANNCTFEYVSQPFLMDLEGKQGNFKNLREFVFKNIDGYFKIYSKHTPINLVRDLPQGFSALEPLVDLPIGINITRFQTLLALHRSYLTPGDSSSGWTAGAAAYYVGYLQPRTFLLKYNENGTITDAVDCALDPLSETKCTLKSFTVEKGIYQTSNFRVQPTESIVRFPNITNLCPFGEVFNATRFASVYAWNRKRISNCVADYSVLYNSASFSTFKCYGVSPTKLNDLCFTNVYADSFVIRGDEVRQIAPGQTGKIADYNYKLPDDFTGCVIAWNSNNLDSKVGGNYNYLYRLFRKSNLKPFERDISTEIYQAGSTPCNGVEGFNCYFPLQSYGFQPTNGVGYQPYRVVVLSFELLHAPATVCGPKKSTNLVKNKCVNFNFNGLTGTGVLTESNKKFLPFQQFGRDIADTTDAVRDPQTLEILDITPCSFGGVSVITPGTNTSNQVAVLYQGVNCTEVPVAIHADQLTPTWRVYSTGSNVFQTRAGCLIGAEHVNNSYECDIPIGAGICASYQTQTNSPRRARSVASQSIIAYTMSLGAENSVAYSNNSIAIPTNFTISVTTEILPVSMTKTSVDCTMYICGDSTECSNLLLQYGSFCTQLNRALTGIAVEQDKNTQEVFAQVKQIYKTPPIKDFGGFNFSQILPDPSKPSKRSFIEDLLFNKVTLADAGFIKQYGDCLGDIVARDLICAQKFNGLTVLPPLLTDEMIAQYTSALLAGTITSGWTFGAGAALQIPFAMQMAYRFNGIGVTQNVLYENQKLIANQFNSAIGKIQDSLSSTASALGKLQDVVNQNAQALNTLVKQLSSNFGAISSVLNDILSRLDPPEAEVQIDRLITGRLQSLQTYVTQQLIRAAEIRASANLAATKMSECVLGQSKRVDFCGKGYQLMSFPQSAPHGVVFLNVTYVPAQEKNFTTAPAICNDGKAHFPREGVFVSNGTNWFVTQRNFYEPQIITTDNTFVSGNCDVVIGIVNNTVYDPLQPELDSFKEELDKYFKNHTSPDVDLGDISGINASVVNIQKEIDRLNEVAKNLNESLIDLQELGKYEQYIKGGGGSDIIKLLNEQVNKEMQSSNLYMSMSSWCYTHSLDGAGLFLFDHAAEEYEHAKKLIIFLNENNVPVQLTSISAPEHKFEGLTQIFQKAYEHEQHISESINNIVDHAIKSKDHATFNFLQWYVAEQHEEEVLFKDILDKIELIGNENHGLYLADQYVKGIAKSRKS

SEQ ID NO: 4941 - protein, 1379 aa, Artificial Sequence
  SARS-CoV-2/USA/WA-UW291/2020__EPI_ISL_418076 spike protein (1-1211)(K986P_V987P_ H1048Q_H1064N_ H1083N_H1101N) Ferritin construct
MFVFLVLLPLVSSQCVNLTTRTQLPPAYTNSFTRGVYYPDKVFRSSVLHSTQDLFLPFFSNVTWFHAIHVSGTNGTKRFDNPVLPFNDGVYFASTEKSNIIRGWIFGTTLDSKTQSLLIVNNATNVVIKVCEFQFCNDPFLGVYYHKNNKSWMESEFRVYSSANNCTFEYVSQPFLMDLEGKQGNFKNLREFVFKNIDGYFKIYSKHTPINLVRDLPQGFSALEPLVDLPIGINITRFQTLLALHRSYLTPGDSSSGWTAGAAAYYVGYLQPRTFLLKYNENGTITDAVDCALDPLSETKCTLKSFTVEKGIYQTSNFRVQPTESIVRFPNITNLCPFGEVFNATRFASVYAWNRKRISNCVADYSVLYNSASFSTFKCYGVSPTKLNDLCFTNVYADSFVIRGDEVRQIAPGQTGKIADYNYKLPDDFTGCVIAWNSNNLDSKVGGNYNYLYRLFRKSNLKPFERDISTEIYQAGSTPCNGVEGFNCYFPLQSYGFQPTNGVGYQPYRVVVLSFELLHAPATVCGPKKSTNLVKNKCVNFNFNGLTGTGVLTESNKKFLPFQQFGRDIADTTDAVRDPQTLEILDITPCSFGGVSVITPGTNTSNQVAVLYQGVNCTEVPVAIHADQLTPTWRVYSTGSNVFQTRAGCLIGAEHVNNSYECDIPIGAGICASYQTQTNSPRRARSVASQSIIAYTMSLGAENSVAYSNNSIAIPTNFTISVTTEILPVSMTKTSVDCTMYICGDSTECSNLLLQYGSFCTQLNRALTGIAVEQDKNTQEVFAQVKQIYKTPPIKDFGGFNFSQILPDPSKPSKRSFIEDLLFNKVTLADAGFIKQYGDCLGDIAARDLICAQKFNGLTVLPPLLTDEMIAQYTSALLAGTITSGWTFGAGAALQIPFAMQMAYRFNGIGVTQNVLYENQKLIANQFNSAIGKIQYSLSSTASALGKLQDVVNQNAQALNTLVKQLSSNFGAISSVLNDILSRLDPPEAEVQIDRLITGRLQSLQTYVTQQLIRAAEIRASANLAATKMSECVLGQSKRVDFCGKGYQLMSFPQSAPHGVVFLNVTYVPAQEKNFTTAPAICNDGKAHFPREGVFVSNGTNWFVTQRNFYEPQIITTDNTFVSGNCDVVIGIVNNTVYDPLQPELDSFKEELDKYFKNHTSPDVDLGDISGINASVVNIQKEIDRLNEVAKNLNESLIDLQELGKYEQYIKGGGGSDIIKLLNEQVNKEMQSSNLYMSMSSWCYTHSLDGAGLFLFDHAAEEYEHAKKLIIFLNENNVPVQLTSISAPEHKFEGLTQIFQKAYEHEQHISESINNIVDHAIKSKDHATFNFLQWYVAEQHEEEVLFKDILDKIELIGNENHGLYLADQYVKGIAKSRKS

SEQ ID NO: 4942 - protein, 1379 aa, Artificial Sequence; identical to SEQ ID NO: 4905
  SARS-CoV-2/Portugal/PT0034/2020__EPI_ISL_418019 spike protein (1-1211)(K986P_V987P_ H1048Q_H1064N_ H1083N_H1101N) Ferritin construct

SEQ ID NO: 4943 - protein, 1379 aa, Artificial Sequence
  SARS-CoV-2/Iceland/202/2020__EPI_ISL_417750 spike protein (1-1211)(K986P_V987P_ H1048Q_H1064N_ H1083N_H1101N) Ferritin construct
MFVFLVLLPLVSSQCVNLTTRTQLPPAYTNSFTRGVYYPDKVFRSSVLHSTQDLFLPFFSNVTWFHAIHVSGTNGTKRFDNPVLPFNDGVYFASTEKSNIIRGWIFGTTLDSKTQSLLIVNNATNVVIKVCEFQFCNDPFLGVYYHKNNKSWMESEFRVYSSANNCTFEYVSQPFLMDLEGKQGNFKNLREFVFKNIDGYFKIYSKHTPINLVRDLPQGFSALEPLVDLPIGINITRFQTLLALHRSYLTPGDSSSGWTAGAAAYYVGYLQPRTFLLKYNENGTITDAVDCALDPLSETKCTLKSFTVEKGIYQTSNFRVQPTESIVRFPNITNLCPFGEVFNATRFASVYAWNRKRISNCVADYSVLYNSASFSTFKCYGVSPTKLNDLCFTNVYADSFVIRGDEVRQIAPGQTGKIADYNYKLPDDFTGCVIAWNSNNLDSKVGGNYNYLYRLFRKSNLKPFERDISTEIYQAGSTPCNGVEGFNCYFPLQSYGFQPTNGVGYQPYRVVVLSFELLHAPATVCGPKKSTNLVKNKCVNFNFNGLTGTGVLTESNKKFLPFQQFGRDIADTTDAVRDPQTLEILDITPCSFGGVSVITPGTNTSNQVAVLYQDVNCTEVPVAIHADQLTPTWRVYSTGSNVFQTRAGCLIGAEHVNNSYECDIPIGAGICASYQTQTNSPRRARSVASQSIIAYTMSLGAENSVAYSNNSIAIPTNFTISVTTEILPVSMTKTSVDCTMYICGDSTECSNLLLQYGSFCTQLNRALTGIAVEQDKNTQEVFAQVKQIYKTPPIKDFGGFNFSQILPDPSKPSKRSFIEDLLFNKVTLADAGFIKQYGDCLGDIAARDLICAQKFNGLTVLPPLLTDEMIAQYTSALLAGTITSGWTFGAGAALQIPFAMQMAYRFNGIGVTQNVLYENQKLIANQFNSAIGKIQDSLSSTASALGKLQDVVNQNAQALNTLVKQLSSNFGAISSVLNDILSRLDPPEAEVQIDRLITGRLQSLQTYVTQQLIRAAEIRASANLAATKMSECVLGQSKRVDFCGKGYQLMSFPQSAPHGVVFLNVTYVPAQEKNFTTAPAICNDGKAHFPREGVFVSNGTNWFVTQRNFYEPQIITTDNTFVSGNCDVVIGIVNNTVYDPLQPELDSFKEELDKYFKNHTSPDVDLGDIPGINASVVNIQKEIDRLNEVAKNLNESLIDLQELGKYEQYIKGGGGSDIIKLLNEQVNKEMQSSNLYMSMSSWCYTHSLDGAGLFLFDHAAEEYEHAKKLIIFLNENNVPVQLTSISAPEHKFEGLTQIFQKAYEHEQHISESINNIVDHAIKSKDHATFNFLQWYVAEQHEEEVLFKDILDKIELIGNENHGLYLADQYVKGIAKSRKS

SEQ ID NO: 4944 - protein, 1379 aa, Artificial Sequence
  SARS-CoV-2/USA/WA-UW261/2020__EPI_ISL_418046 spike protein (1-1211)(K986P_V987P_ H1048Q_H1064N_ H1083N_H1101N) Ferritin construct
MFVFLVLLPLVSSQCVNLTTRTQLPPAYTNSFTRGVYYPDKVFRSSVLHSTQDLFLPFFSNVTWFHAIHVSGTNGTKRFDNPVLPFNDGVYFASTEKSNIIRGWIFGTTLDSKTQSLLIVNNATNVVIKVCEFQFCNDPFLGVYYHKNNKSWMESEFRVYSSANNCTFEYVSQPFLMDLEGKQGNFKNLREFVFKNIDGYFKIYSKHTPINLVRDLPQGFSALEPLVDLPIGINITRFQTLLALHRSYLTPGDSSSGWTAGAAAYYVGYLQPRTFLLKYNENGTITDAVDCALDPLSETKCTLKSFTVEKGIYQTSNFRVQPTESIVRFPNITNLCPFGEVFNATRFTSVYAWNRKRISNCVADYSVLYNSASFSTFKCYGVSPTKLNDLCFTNVYADSFVIRGDEVRQIAPGQTGKIADYNYKLPDDFTGCVIAWNSNNLDSKVGGNYNYLYRLFRKSNLKPFERDISTEIYQAGSTPCNGVEGFNCYFPLQSYGFQPTNGVGYQPYRVVVLSFELLHAPATVCGPKKSTNLVKNKCVNFNFNGLTGTGVLTESNKKFLPFQQFGRDIADTTDAVRDPQTLEILDITPCSFGGVSVITPGTNTSNQVAVLYQDVNCTEVPVAIHADQLTPTWRVYSTGSNVFQTRAGCLIGAEHVNNSYECDIPIGAGICASYQTQTNSPRRARSVASQSIIAYTMSLGAENSVAYSNNSIAIPTNFTISVTTEILPVSMTKTSVDCTMYICGDSTECSNLLLQYGSFCTQLNRALTGIAVEQDKNTQEVFAQVKQIYKTPPIKDFGGFNFSQILPDPSKPSKRSFIEDLLFNKVTLADAGFIKQYGDCLGDIAARDLICAQKFNGLTVLPPLLTDEMIAQYTSALLAGTITSGWTFGAGAALQIPFAMQMAYRFNGIGVTQNVLYENQKLIANQFNSAIGKIQDSLSSTASALGKLQDVVNQNAQALNTLVKQLSSNFGAISSVLNDILSRLDPPEAEVQIDRLITGRLQSLQTYVTQQLIRAAEIRASANLAATKMSECVLGQSKRVDFCGKGYQLMSFPQSAPHGVVFLNVTYVPAQEKNFTTAPAICNDGKAHFPREGVFVSNGTNWFVTQRNFYEPQIITTDNTFVSGNCDVVIGIVNNTVYDPLQPELDSFKEELDKYFKNHTSPDVDLGDISGINASVVNIQKEIDRLNEVAKNLNESLIDLQELGKYEQYIKGGGGSDIIKLLNEQVNKEMQSSNLYMSMSSWCYTHSLDGAGLFLFDHAAEEYEHAKKLIIFLNENNVPVQLTSISAPEHKFEGLTQIFQKAYEHEQHISESINNIVDHAIKSKDHATFNFLQWYVAEQHEEEVLFKDILDKIELIGNENHGLYLADQYVKGIAKSRKS

SEQ ID NO: 4945 - protein, 1379 aa, Artificial Sequence
  SARS-CoV-2/Portugal/PT0035/2020__EPI_ISL_418020 spike protein (1-1211)(K986P_V987P_ H1048Q_H1064N_ H1083N_H1101N) Ferritin construct
MFVFLVLLPLVSSQCVNLTTRTQLPPAYTNSFTRGVYYPDKVFRSSVLHSTQDLFLPFFSNVTWFHAIHVSGTNGTKRFDNPVLPFNDGVYFASTEKSNIIRGWIFGTTLDSKTQSLLIVNNATNVVIKVCEFQFCNDPFLGVYYHKNNKSWMESEFRVYSSANNCTFEYVSQPFLMDLEGKQGNFKNLREFVFKNIDGYFKIYSKHTPINLVRDLPQGFSALEPLVDLPIGINITRFQTLLALHRSYLTPGDSSSGWTAGAAAYYVGYLQPRTFLLKYNENGTITDAVDCALDPLSETKCTLKSFTVEKGIYQTSNFRVQPTESIVRFPNITNLCPFGEVFNATRFASVYAWNRKRISNCVADYSVLYNSASFSTFKCYGVSPTKLNDLCFTNVYADSFVIRGDEVRQIAPGQTGKIADYNYKLPDDFTGCVIAWNSNNLDSKVGGNYNYLYRLFRKSNLKPFERDISTEIYQAGSTPCNGVEGFNCYFPLQSYGFQPTNGVGYQPYRVVVLSFELLHAPATVCGPKKSTNLVKNKCVNFNFNGLTGTGVLTESNKKFLPFQQFGRDIADTTDAVRDPQTLEILDITPCSFGGVSVITPGTNTSNQVAVLYQDVNCTEVPVAIHADQLTPTWRVYSTGSNVFQTRAGCLIGAEHVNNSYECDIPIGAGICASYQTQTNSPRRARSVASQSIIAYTMSLGAENSVAYSNNSIAIPTNFTISVTTEILPVSMTKTSVDCTMYICGDSTECSNLLLQYGSFCTQLNRALTGIAVEQDKNTQEVFAQVKQIYKTPPIKDFGGFNFSQILPDPSKPSKRSFIEDLLFNKVTLADAGFIKQYGDCLGDISARDLICAQKFNGLTVLPPLLTDEMIAQYTSALLAGTITSGWTFGAGAALQIPFAMQMAYRFNGIGVTQNVLYENQKLIANQFNSAIGKIQDSLSSTASALGKLQDVVNQNAQALNTLVKQLSSNFGAISSVLNDILSRLDPPEAEVQIDRLITGRLQSLQTYVTQQLIRAAEIRASANLAATKMSECVLGQSKRVDFCGKGYQLMSFPQSAPHGVVFLNVTYVPAQEKNFTTAPAICNDGKAHFPREGVFVSNGTNWFVTQRNFYEPQIITTDNTFVSGNCDVVIGIVNNTVYDPLQPELDSFKEELDKYFKNHTSPDVDLGDISGINASVVNIQKEIDRLNEVAKNLNESLIDLQELGKYEQYIKGGGGSDIIKLLNEQVNKEMQSSNLYMSMSSWCYTHSLDGAGLFLFDHAAEEYEHAKKLIIFLNENNVPVQLTSISAPEHKFEGLTQIFQKAYEHEQHISESINNIVDHAIKSKDHATFNFLQWYVAEQHEEEVLFKDILDKIELIGNENHGLYLADQYVKGIAKSRKS

SEQ ID NO: 4946 - protein, 1379 aa, Artificial Sequence
  SARS-CoV-2/USA/NY-NYUMC7/2020__EPI_ISL_418192 spike protein (1-1211)(K986P_V987P_ H1048Q_H1064N_ H1083N_H1101N) Ferritin construct
MFVFLVLLPLVSSQCVNLTTRTQLPPAYTNSFTRGVYYPDKVFRSSVLHSTQDLFLPFFSNVTWFHAIHVSGTNGTKRFDNPVLPFNDGVYFASTEKSNIIRGWIFGTTLDSKTQSLLIVNNATNVVIKVCEFQFCNDPFLGVYHHKNNKSWMESEFRVYSSANNCTFEYVSQPFLMDLEGKQGNFKNLREFVFKNIDGYFKIYSKHTPINLVRDLPQGFSALEPLVDLPIGINITRFQTLLALHRSYLTPGDSSSGWTAGAAAYYVGYLQPRTFLLKYNENGTITDAVDCALDPLSETKCTLKSFTVEKGIYQTSNFRVQPTESIVRFPNITNLCPFGEVFNATRFASVYAWNRKRISNCVADYSVLYNSASFSTFKCYGVSPTKLNDLCFTNVYADSFVIRGDEVRQIAPGQTGKIADYNYKLPDDFTGCVIAWNSNNLDSKVGGNYNYLYRLFRKSNLKPFERDISTEIYQAGSTPCNGVEGFNCYFPLQSYGFQPTNGVGYQPYRVVVLSFELLHAPATVCGPKKSTNLVKNKCVNFNFNGLTGTGVLTESNKKFLPFQQFGRDIADTTDAVRDPQTLEILDITPCSFGGVSVITPGTNTSNQVAVLYQGVNCTEVPVAIHADQLTPTWRVYSTGSNVFQTRAGCLIGAEHVNNSYECDIPIGAGICASYQTQTNSPRRARSVASQSIIAYTMSLGAENSVAYSNNSIAIPTNFTISVTTEILPVSMTKTSVDCTMYICGDSTECSNLLLQYGSFCTQLNRALTGIAVEQDKNTQEVFAQVKQIYKTPPIKDFGGFNFSQILPDPSKPSKRSFIEDLLFNKVTLADAGFIKQYGDCLGDIAARDLICAQKFNGLTVLPPLLTDEMIAQYTSALLAGTITSGWTFGAGAALQIPFAMQMAYRFNGIGVTQNVLYENQKLIANQFNSAIGKIQDSLSSTASALGKLQDVVNQNAQALNTLVKQLSSNFGAISSVLNDILSRLDPPEAEVQIDRLITGRLQSLQTYVTQQLIRAAEIRASANLAATKMSECVLGQSKRVDFCGKGYQLMSFPQSAPHGVVFLNVTYVPAQEKNFTTAPAICNDGKAHFPREGVFVSNGTNWFVTQRNFYEPQIITTDNTFVSGNCDVVIGIVNNTVYDPLQPELDSFKEELDKYFKNHTSPDVDLGDISGINASVVNIQKEIDRLNEVAKNLNESLIDLQELGKYEQYIKGGGGSDIIKLLNEQVNKEMQSSNLYMSMSSWCYTHSLDGAGLFLFDHAAEEYEHAKKLIIFLNENNVPVQLTSISAPEHKFEGLTQIFQKAYEHEQHISESINNIVDHAIKSKDHATFNFLQWYVAEQHEEEVLFKDILDKIELIGNENHGLYLADQYVKGIAKSRKS

SEQ ID NO: 4947 - protein, 1379 aa, Artificial Sequence
  SARS-CoV-2/Iceland/189/2020__EPI_ISL_417709 spike protein (1-1211)(K986P_V987P_ H1048Q_H1064N_ H1083N_H1101N) Ferritin construct
MFVFLVLLPLVSSQCVNLTTRTQLPPAYTNSFTRGVYYPDKVFRSSVLHSTQDLFLPFFSNVTWFHAIHVSGTNGTKRFDNPVLPFNDGVYFASTEKSNIIRGWIFGTTLDSKTQSLLIVNNATNVVIKVCEFQFCNDPFLGVYYHKNNKSWMESEFRVYSSANNCTFEYVSQPFLMDLEGKQGNFKNLREFVFKNIDGYFKIYSKHTPINLVRDLPQGFSALEPLVDLPIGINITRFQTLLALHRSYLTPGDSSSGWTAGAAAYYVGYLQPRTFLLKYNENGTITDAVDCALDPLSETKCTLKSFTVEKGIYQTSNFRVQPTESIVRFPNITNLCPFGEVFNATRFASVYAWNRKRISNCVADYSVLYNSASFSTFKCYGVSPTKLNDLCFTNVYADSFVIRGDEVRQIAPGQTGKIADYNYKLPDDFTGCVIAWNSNNLDSKVGGNYNYLYRLFRKSNLKPFERDISTEIYQAGSTPCNGVEGFNCYFPLQSYGFQPTNGVGYQPYRVVVLSFELLHAPATVCGPKKSTNLVKNKCVNFNFNGLTGTGVLTESNKKFLPFQQFGRDIADTTDAVRDPQTLEILDITPCSFGGVSVITPGTNTSNQVAVLYQGVNCTEVPVAIHADQLTPTWRVYSTGSNVFQTRAGCLIGAEHVNNSYECDIPIGAGICASYQTQTNSPRRARSVASQSIIAYTMSLGAENSVAYSNNSIAIPTNFTISVTTEILPVSMTKTSVDCTMYICGDSTECSNLLLQYGSFCTQLNRALTGIAVEQDKNTQEVFAQVKQIYKTPPIKDFGGFNFSQILPDPSKPSKRSFIEDLLFNKVTLADAGFTKQYGDCLGDIAARDLICAQKFNGLTVLPPLLTDEMIAQYTSALLAGTITSGWTFGAGAALQIPFAMQMAYRFNGIGVTQNVLYENQKLIANQFNSAIGKIQDSLSSTASALGKLQDVVNQNAQALNTLVKQLSSNFGAISSVLNDILSRLDPPEAEVQIDRLITGRLQSLQTYVTQQLIRAAEIRASANLAATKMSECVLGQSKRVDFCGKGYQLMSFPQSAPHGVVFLNVTYVPAQEKNFTTAPAICNDGKAHFPREGVFVSNGTNWFVTQRNFYEPQIITTDNTFVSGNCDVVIGIVNNTVYDPLQPELDSFKEELDKYFKNHTSPDVDLGDISGINASVVNIQKEIDRLNEVAKNLNESLIDLQELGKYEQYIKGGGGSDIIKLLNEQVNKEMQSSNLYMSMSSWCYTHSLDGAGLFLFDHAAEEYEHAKKLIIFLNENNVPVQLTSISAPEHKFEGLTQIFQKAYEHEQHISESINNIVDHAIKSKDHATFNFLQWYVAEQHEEEVLFKDILDKIELIGNENHGLYLADQYVKGIAKSRKS

SEQ ID NO: 4948 - protein, 1379 aa, Artificial Sequence
  SARS-CoV-2/Australia/NSW56/2020__EPI_ISL_417408 spike protein (1-1211)(K986P_V987P_ H1048Q_H1064N_ H1083N_H1101N) Ferritin construct
MFVFLVLLPLVSSQCVNLTTRTQLPPAYTNSFTRGVYYPDKVFRSSVLHSTQDLFLPFFSNVTWFHAIHVSGTNGTKRFDNPVLPFNDGVYFASTEKSNIIRGWIFGTTLDSKTQSLLIVNNATNVVIKVCEFQFCNDPFLGVYYHKNNKSWMESEFRVYSSANNCTFEYVSQPFLMDLEGKQGNFKNLREFVFKNIDGYFKIYSKHTPINLVRDLPQGFSALEPLVDLPIGINITRFQTLLALHRSYLTPGDSSSGWTAGAAAYYVGYLQPRTFLLKYNENGTITDAVDCALDPLSETKCTLKSFTVEKGIYQTSNFRVQPTESIVRFPNITNLCPFGEVFNATRFASVYAWNRKRISNCVADYSVLYNSASFSTFKCYGVSPTKLNDLCFTNVYADSFVIRGDEVRQIAPGQTGKIADYNYKLPDDFTGCVIAWNSNNLDSKVGGNYNYLYRLFRKSNLKPFERDISTEIYQAGSTPCNGVEGFNCYFPLQSYGFQPTNGVGYQPYRVVVLSFELLHAPATVCGPKKSTNLVKNKCVNFNFNGLTGTGVLTESNKKFLPFQQFGRDIADTTDAVRDPQTLEILDITPCSFGGVSVITPGTNTSNQVAVLYQDVNCTEVPVAIHADQLTPTWRVYSTGSNVFQTRAGCLIGAEHVNNSYECDIPIGAGICASYQTQTNSPRRARSVASQSIIAYTMSLGAENSVAYSNNSIAIPTNFTISVTTEILPVSMTKTSVDCTMYICGDSTECSNLLLQYGSFCTQLNRALTGIAVEQDKNTQEVFAQVKQIYKTPPIKDFGGFNFSQILPDSSKPSKRSFIEDLLFNKVTLADAGFIKQYGDCLGDIAARDLICAQKFNGLTVLPPLLTDEMIAQYTSALLAGTITSGWTFGAGAALQIPFAMQMAYRFNGIGVTQNVLYENQKLIANQFNSAIGKIQDSLSSTASALGKLQDVVNQNAQALNTLVKQLSSNFGAISSVLNDILSRLDPPEAEVQIDRLITGRLQSLQTYVTQQLIRAAEIRASANLAATKMSECVLGQSKRVDFCGKGYQLMSFPQSAPHGVVFLNVTYVPAQEKNFTTAPAICNDGKAHFPREGVFVSNGTNWFVTQRNFYEPQIITTDNTFVSGNCDVVIGIVNNTVYDPLQPELDSFKEELDKYFKNHTSPDVDLGDISGINASVVNIQKEIDRLNEVAKNLNESLIDLQELGKYEQYIKGGGGSDIIKLLNEQVNKEMQSSNLYMSMSSWCYTHSLDGAGLFLFDHAAEEYEHAKKLIIFLNENNVPVQLTSISAPEHKFEGLTQIFQKAYEHEQHISESINNIVDHAIKSKDHATFNFLQWYVAEQHEEEVLFKDILDKIELIGNENHGLYLADQYVKGIAKSRKS

SEQ ID NO: 4949 - protein, 1379 aa, Artificial Sequence
  SARS-CoV-2/Iceland/280/2020__EPI_ISL_417608 spike protein (1-1211)(K986P_V987P_ H1048Q_H1064N_ H1083N_H1101N) Ferritin construct
MFVFLVLLPLVSSQCVNLTTRTQLPPAYTNSFTRGVYYPDKVFRSSVLHSTQDLFLPFFSNVTWFHAIHVSGTNGTKRFDNPVLPFNDGVYFASTEKSNIIRGWIFGTTLDSKTQSLLIVNNATNVVIKVCEFQFCNDPFLGVYYHKNNKSWMESEFRVYSSANNCTFEYVSQPFLMDLEGKQGNFKNLREFVFKNIDGYFKIYSKHTPINLVRDLPQGFSALEPLVDLPIGINITRFQTLLALHRSYLTPGDSSSGWTAGAAAYYVGYLQPRTFLLKYNENGTITDAVDCALDPLSETKCTLKSFTVEKGIYQTSNFRVQPTESIVRFPNITNLCPFGEVFNATRFASVYAWNRKRISNCVADYSVLYNSASFSTFKCYGVSPTKLNDLCFTNVYADSFVIRGDEVRQIAPGQTGKIADYNYKLPDDFTGCVIAWNSNNLDSKVGGNYNYLYRLFRKSNLKPFERDISTEIYQAGSTPCNGVEGFNCYFPLQSYGFQPTNGVGYQPYRVVVLSFELLHAPATVCGPKKSTNLVKNKCVNFNFNGLTGTGVLTESNKKFLPFQQFGRDIADTTDAVRDPQTLEILDITPCSFGGVSVITPGTNTSNQVAVLYQGVNCTEVPVAIHADQLTPTWRVYSTGSNVFQTRAGCLIGAEHVNNSYECDIPIGAGICASYHTQTNSPRRARSVASQSIIAYTMSLGAENSVAYSNNSIAIPTNFTISVTTEILPVSMTKTSVDCTMYICGDSTECSNLLLQYGSFCTQLNRALTGIAVEQDKNTQEVFAQVKQIYKTPPIKDFGGFNFSQILPDPSKPSKRSFIEDLLFNKVTLADAGFIKQYGDCLGDIAARDLICAQKFNGLTVLPPLLTDEMIAQYTSALLAGTITSGWTFGAGAALQIPFAMQMAYRFNGIGVTQNVLYENQKLIANQFNSAIGKIQDSLSSTASALGKLQDVVNQNAQALNTLVKQLSSNFGAISSVLNDILSRLDPPEAEVQIDRLITGRLQSLQTYVTQQLIRAAEIRASANLAATKMSECVLGQSKRVDFCGKGYQLMSFPQSAPHGVVFLNVTYVPAQEKNFTTAPAICNDGKAHFPREGVFVSNGTNWFVTQRNFYEPQIITTDNTFVSGNCDVVIGIVNNTVYDPLQPELDSFKEELDKYFKNHTSPDVDLGDISGINASVVNIQKEIDRLNEVAKNLNESLIDLQELGKYEQYIKGGGGSDIIKLLNEQVNKEMQSSNLYMSMSSWCYTHSLDGAGLFLFDHAAEEYEHAKKLIIFLNENNVPVQLTSISAPEHKFEGLTQIFQKAYEHEQHISESINNIVDHAIKSKDHATFNFLQWYVAEQHEEEVLFKDILDKIELIGNENHGLYLADQYVKGIAKSRKS

SEQ ID NO: 4950 - protein, 1379 aa, Artificial Sequence; identical to SEQ ID NO: 4905
  SARS-CoV-2/Iceland/247/2020__EPI_ISL_417575 spike protein (1-1211)(K986P_V987P_ H1048Q_H1064N_ H1083N_H1101N) Ferritin construct

SEQ ID NO: 4951 - protein, 1379 aa, Artificial Sequence
  SARS-CoV-2/Iceland/238/2020__EPI_ISL_417566 spike protein (1-1211)(K986P_V987P_ H1048Q_H1064N_ H1083N_H1101N) Ferritin construct
MFVFLVLLPLVSSQCVNLTTRTQLPPAYTNSFTRGVYYPDKVFRSSVLHSTQDLFLPFFSNVTWFHAIHVSGTNGTKRFDNPVLPFNDGVYFASTEKSNIIRGWIFGTTLDSKTQSLLIVNNATNVVIKVCEFQFCNDPFLGVYYHKNNKSWMESEFRVYSSANNCTFEYVSQPFLMDLEGKQGNFKNLREFVFKNIDGYFKIYSKHTPINLVRDLPQGFSALEPLVDLPIGINITRFQTLLALHRSYLTPGDSSSGWTAGAAAYYVGYLQPRTFLLKYNENGTITDAVDCALDPLSETKCTLKSFTVEKGIYQTSNFRVQPTESIVRFPNITNLCPFGEVFNATRFASVYAWNRKRISNCVADYSVLYNSASFSTFKCYGVSPTKLNDLCFTNVYADSFVIRGDEVRQIAPGQTGKIADYNYKLPDDFTGCVIAWNSNNLDSKVGGNYNYLYRLFRKSNLKPFERDISTEIYQAGSTPCNGVEGFNCYFPLQSYGFQPTNGVGYQPYRVVVLSFELLHAPATVCGPKKSTNLVKNKCVNFNFNGLTGTGVLTESNKKFLPFQQFGRDIADTTDAVRDPQTLEILDITPCSFGGVSVITPGTNTSNQVAVLYQGVNCTEVPVAIHADQLTPTWRVYSTGSNVFQTRAGCLIGAEHVNNSYECDIPIGAGICASYQTQTNSPRRARSVASQSIIAYTMSLGAENSVAYSNNSIAIPTNFTISVTTEILPVSMTKTSVDCTMYICGDSTECSNLLLQYGSFCTQLNRALTGIAVEQDKNTQEVFAQVKQIYKTPPIKDFGGFNFSQILPDPSKPSKRSFIEDLLFNKVTLADVGFIKQYGDCLGDIAARDLICAQKFNGLTVLPPLLTDEMIAQYTSALLAGTITSGWTFGAGAALQIPFAMQMAYRFNGIGVTQNVLYENQKLIANQFNSAIGKIQDSLSSTASALGKLQDVVNQNAQALNTLVKQLSSNFGAISSVLNDILSRLDPPEAEVQIDRLITGRLQSLQTYVTQQLIRAAEIRASANLAATKMSECVLGQSKRVDFCGKGYQLMSFPQSAPHGVVFLNVTYVPAQEKNFTTAPAICNDGKAHFPREGVFVSNGTNWFVTQRNFYEPQIITTDNTFVSGNCDVVIGIVNNTVYDPLQPELDSFKEELDKYFKNHTSPDVDLGDISGINASVVNIQKEIDRLNEVAKNLNESLIDLQELGKYEQYIKGGGGSDIIKLLNEQVNKEMQSSNLYMSMSSWCYTHSLDGAGLFLFDHAAEEYEHAKKLIIFLNENNVPVQLTSISAPEHKFEGLTQIFQKAYEHEQHISESINNIVDHAIKSKDHATFNFLQWYVAEQHEEEVLFKDILDKIELIGNENHGLYLADQYVKGIAKSRKS

SEQ ID NO: 4952 - protein, 1379 aa, Artificial Sequence
  SARS-CoV-2/Greece/16/2020__EPI_ISL_418265 spike protein (1-1211)(K986P_V987P_ H1048Q_H1064N_ H1083N_H1101N) Ferritin construct
MFVFLVLLPLVSSQCVNLTTRTQLPPAYTNSFTRGVYYPDKVFRSSVLHSTQDLFLPFFSNVTWFHAIHVSGTNGTKRFDNPVLPFNDGVYFASTEKSNIIRGWIFGTTLDSKTQSLLIVNNATNVVIKVCEFQFCNDPFLGVYYHKNNKSWMESEFRVYSSANNCTFEYVSQPFLMDLEGKQGNFKNLREFVFKNVDGYFKIYSKHTPINLVRDLPQGFSALEPLVDLPIGINITRFQTLLALHRSYLTPGDSSSGWTAGAAAYYVGYLQPRTFLLKYNENGTITDAVDCALDPLSETKCTLKSFTVEKGIYQTSNFRVQPTESIVRFPNITNLCPFGEVFNATRFASVYAWNRKRISNCVADYSVLYNSASFSTFKCYGVSPTKLNDLCFTNVYADSFVIRGDEVRQIAPGQTGKIADYNYKLPDDFTGCVIAWNSNNLDSKVGGNYNYLYRLFRKSNLKPFERDISTEIYQAGSTPCNGVEGFNCYFPLQSYGFQPTNGVGYQPYRVVVLSFELLHAPATVCGPKKSTNLVKNKCVNFNFNGLTGTGVLTESNKKFLPFQQFGRDIADTTDAVRDPQTLEILDITPCSFGGVSVITPGTNTSNQVAVLYQDVNCTEVPVAIHADQLTPTWRVYSTGSNVFQTRAGCLIGAEHVNNSYECDIPIGAGICASYQTQTNSPRRARSVASQSIIAYTMSLGAENSVAYSNNSIAIPTNFTISVTTEILPVSMTKTSVDCTMYICGDSTECSNLLLQYGSFCTQLNRALTGIAVEQDKNTQEVFAQVKQIYKTPPIKDFGGFNFSQILPDPSKPSKRSFIEDLLFNKVTLADAGFIKQYGDCLGDIAARDLICAQKFNGLTVLPPLLTDEMIAQYTSALLAGTITSGWTFGAGAALQIPFAMQMAYRFNGIGVTQNVLYENQKLIANQFNSAIGKIQDSLSSTASALGKLQDVVNQNAQALNTLVKQLSSNFGAISSVLNDILSRLDPPEAEVQIDRLITGRLQSLQTYVTQQLIRAAEIRASANLAATKMSECVLGQSKRVDFCGKGYQLMSFPQSAPHGVVFLNVTYVPAQEKNFTTAPAICNDGKAHFPREGVFVSNGTNWFVTQRNFYEPQIITTDNTFVSGNCDVVIGIVNNTVYDPLQPELDSFKEELDKYFKNHTSPDVDLGDISGINASVVNIQKEIDRLNEVAKNLNESLIDLQELGKYEQYIKGGGGSDIIKLLNEQVNKEMQSSNLYMSMSSWCYTHSLDGAGLFLFDHAAEEYEHAKKLIIFLNENNVPVQLTSISAPEHKFEGLTQIFQKAYEHEQHISESINNIVDHAIKSKDHATFNFLQWYVAEQHEEEVLFKDILDKIELIGNENHGLYLADQYVKGIAKSRKS

SEQ ID NO: 4953 - protein, 1379 aa, Artificial Sequence
  SARS-CoV-2/Iceland/319/2020__EPI_ISL_417648 spike protein (1-1211)(K986P_V987P_ H1048Q_H1064N_ H1083N_H1101N) Ferritin construct
MFVFLVLLPLVSSQCVNLTTRTQLPPAYTNSFTRGVYYPDKVFRSSVLHSTQDLFLPFFSNVTWFHAIHVSGTNGTKRFDNPVLPFNDGVYFASTEKSNIIRGWIFGTTLDSKTQSLLIVNNATNVVIKVCEFQFCNDPFLGVYYHKNNKSWMESEFRVYSSANNCTFEYVSQPFLIDLEGKQGNFKNLREFVFKNIDGYFKIYSKHTPINLVRDLPQGFSALEPLVDLPIGINITRFQTLLALHRSYLTPGDSSSGWTAGAAAYYVGYLQPRTFLLKYNENGTITDAVDCALDPLSETKCTLKSFTVEKGIYQTSNFRVQPTESIVRFPNITNLCPFGEVFNATRFASVYAWNRKRISNCVADYSVLYNSASFSTFKCYGVSPTKLNDLCFTNVYADSFVIRGDEVRQIAPGQTGKIADYNYKLPDDFTGCVIAWNSNNLDSKVGGNYNYLYRLFRKSNLKPFERDISTEIYQAGSTPCNGVEGFNCYFPLQSYGFQPTNGVGYQPYRVVVLSFELLHAPATVCGPKKSTNLVKNKCVNFNFNGLTGTGVLTESNKKFLPFQQFGRDIADTTDAVRDPQTLEILDITPCSFGGVSVITPGTNTSNQVAVLYQGVNCTEVPVAIHADQLTPTWRVYSTGSNVFQTRAGCLIGAEHVNNSYECDIPIGAGICASYQTQTNSPRRARSVASQSIIAYTMSLGAENSVAYSNNSIAIPTNFTISVTTEILPVSMTKTSVDCTMYICGDSTECSNLLLQYGSFCTQLNRALTGIAVEQDKNTQEVFAQVKQIYKTPPIKDFGGFNFSQILPDPSKPSKRSFIEDLLFNKVTLADAGFIKQYGDCLGDIAARDLICAQKFNGLTVLPPLLTDEMIAQYTSALLAGTITSGWTFGAGAALQIPFAMQMAYRFNGIGVTQNVLYENQKLIANQFNSAIGKIQDSLSSTASALGKLQDVVNQNAQALNTLVKQLSSNFGAISSVLNDILSRLDPPEAEVQIDRLITGRLQSLQTYVTQQLIRAAEIRASANLAATKMSECVLGQSKRVDFCGKGYQLMSFPQSAPHGVVFLNVTYVPAQEKNFTTAPAICNDGKAHFPREGVFVSNGTNWFVTQRNFYEPQIITTDNTFVSGNCDVVIGIVNNTVYDPLQPELDSFKEELDKYFKNHTSPDVDLGDISGINASVVNIQKEIDRLNEVAKNLNESLIDLQELGKYEQYIKGGGGSDIIKLLNEQVNKEMQSSNLYMSMSSWCYTHSLDGAGLFLFDHAAEEYEHAKKLIIFLNENNVPVQLTSISAPEHKFEGLTQIFQKAYEHEQHISESINNIVDHAIKSKDHATFNFLQWYVAEQHEEEVLFKDILDKIELIGNENHGLYLADQYVKGIAKSRKS

SEQ ID NO: 4954 - protein, 1379 aa, Artificial Sequence
  SARS-CoV-2/Congo/94/2020__EPI_ISL_417947 spike protein (1-1211)(K986P_V987P_ H1048Q_H1064N_ H1083N_H1101N) Ferritin construct
MFVFLVLLPLVSSQCVNLTTRTQLPPAYTNSFTRGVYYPDKVFRSSVLHSTQDLFLPFFSNVTWFHAIHVSGTNGTKRFDNPVLPFNDGVYFASTEKSNIIRGWIFGTTLDSKTQSLLIVNNATNVVIKVCEFQFCNDPFLGVYYHKNNKSWMESEFRVYSSANNCTFEYVSQPFLMDLEGKQGNFKNLREFVFKNIDGYFKIYSKHTPINLVRDLPQGFSALEPLVDLPIGINITRFQTLLALHRSYLTPGDSSSGWTAGAAAYYVGYLQPRTFLLKYNENGTITDAVDCALDPLSETKCTLKSFTVEKGIYQTSNFRVQPTESIVRFPNITNLCPFGEVFNATRFASVYAWNRKRISNCVADYSVLYNSASFSTFKCYGVSPTKLNDLCFTNVYADSFVIRGDEVRQIAPGQTGKIADYNYKLPDDFTGCVIAWNSNNLDSKVGGNYNYLYRLFRKSNLKPFERDISTEIYQAGSTPCNGVEGFNCYFPLQSYGFQPTNGVGYQPYRVVVLSFELLHAPATVCGPKKSTNLVKNKCVNFNFNGLTGTGVLTESNKKFLPFQQFGRDIADTTDAVRDPQTLEILDITPCSFGGVSVITPGTNTSNQVAVLYQGVNCTEVPVAIHADQLTPTWRVYSTGSNVFQTRAGCLIGAEHVNNSYECDIPIGAGICASYQTQTNSPRRARSVASQSIIAYTMSLGAENSVAYSNNSIAIPTNFTISVTTEILPVSMTKTSVDCTMYICGDSTECSNLLLQYGSFCTQLNRALTGIAVEQDKNTQEVFAQVKQIYKTPPIKDFGGFNFSQILPDPSKPSKRSFIEDILFNKVTLADAGFIKQYGDCLGDIAARDLICAQKFNGLTVLPPLLTDEMIAQYTSALLAGTITSGWTFGAGAALQIPFAMQMAYRFNGIGVTQNVLYENQKLIANQFNSAIGKIQDSLSSTASALGKLQDVVNQNAQALNTLVKQLSSNFGAISSVLNDILSRLDPPEAEVQIDRLITGRLQSLQTYVTQQLIRAAEIRASANLAATKMSECVLGQSKRVDFCGKGYQLMSFPQSAPHGVVFLNVTYVPAQEKNFTTAPAICNDGKAHFPREGVFVSNGTNWFVTQRNFYEPQIITTDNTFVSGNCDVVIGIVNNTVYDPLQPELDSFKEELDKYFKNHTSPDVDLGDISGINASVVNIQKEIDRLNEVAKNLNESLIDLQELGKYEQYIKGGGGSDIIKLLNEQVNKEMQSSNLYMSMSSWCYTHSLDGAGLFLFDHAAEEYEHAKKLIIFLNENNVPVQLTSISAPEHKFEGLTQIFQKAYEHEQHISESINNIVDHAIKSKDHATFNFLQWYVAEQHEEEVLFKDILDKIELIGNENHGLYLADQYVKGIAKSRKS

SEQ ID NO: 4955 - protein, 1379 aa, Artificial Sequence
  SARS-CoV-2/Congo/158/2020__EPI_ISL_417950 spike protein (1-1211)(K986P_V987P_ H1048Q_H1064N_ H1083N_H1101N) Ferritin construct
MFVFLVLLPLVSSQCVNLTTRTQLPPAYTNSFTRGVYYPDKVFRSSVLHSTQDLFLPFFSNVTWFHAIHVSGTNGTKRFDNPVLPFNDGVYFASTEKSNIIRGWIFGTTLDSKTQSLLIVNNATNVVIKVCEFQFCNDPFLGVYYHKNNKSWMESEFRVYSSANNCTFEYVSQPFLMDLEGKQGNFKNLREFVFKNIDGYFKIYSKHTPINLVRDLPQGFSALEPLVDLPIGINITRFQTLLALHRSYLTPGDSSSGWTAGAAAYYVGYLQPRTFLLKYNENGTITDAVDCALDPLSETKCTLKSFTVEKGIYQTSNFRVQPTESIVRFPNITNLCPFGEVFNATRFASVYAWNRKRISNCVADYSVLYNSASFSTFKCYGVSPTKLNDLCFTNVYADSFVIRGDEVRQIAPGQTGKIADYNYKLPDDFTGCVIAWNSNNLDSKVGGNYNYLYRLFRKSNLKPFERDISTEIYQAGSTPCNGVEGFNCYFPLQSYGFQPTNGVGYQPYRVVVLSFELLHAPATVCGPKKSTNLVKNKCVNFNFNGLTGTGVLTESNKKFLPFQQFGRDIADTTDAVRDPQTLEILDITPCSFGGVSVITPGTNTSNQVAVLYQDVNCTEVPVAIHADQLTPTWRVYSTGSNVFQTRAGCLIGAEHVNNSYECDIPIGAGICASYQTQTNSPRRARSVASQSIIAYTMSLGAENSVAYSNNSIAIPTNFTISVTTEILPVSMTKTSVDCTMYICGDSTECSNLLLQYGSFCTQLNRALTGIAVEQDKNTQEVFAQVKQIYKTPPIKDFGGFNFSQILPDPSKPSKRSFIEDLLFNKVTLADAGFIKQYGDCLGDIAARDLICAQKFNGLTVLPPLLTDEMIAQYTSALLAGTITSGWTFGAGAALQIPFAMQMAYRFNGIGVTQNVLYENQKLIANQFNSAIGKIQDSLSSTASALGKLQDVVNQNAQALNTLVKQLSSNFGAISSVLNDILSRLDPPEAEVQIDRLITGRLQSLQTYVTQQLIRAAEIRASANLAATKMSECVLGQSKRVDFCGKGYQLMSFPQSAPHGVVFLNVTYVPAQEKNFTTAPAICNDGKAHFPREGVFVSNGTNWFVTQRNFYEPQIITTDNTFLSGNCDVVIGIVNNTVYDPLQPELDSFKEELDKYFKNHTSPDVDLGDISGINASVVNIQKEIDRLNEVAKNLNESLIDLQELGKYEQYIKGGGGSDIIKLLNEQVNKEMQSSNLYMSMSSWCYTHSLDGAGLFLFDHAAEEYEHAKKLIIFLNENNVPVQLTSISAPEHKFEGLTQIFQKAYEHEQHISESINNIVDHAIKSKDHATFNFLQWYVAEQHEEEVLFKDILDKIELIGNENHGLYLADQYVKGIAKSRKS

SEQ ID NO: 4956 - protein, 1379 aa, Artificial Sequence
  SARS-CoV-2/USA/UT-00034/2020__EPI_ISL_417977 spike protein (1-1211)(K986P_V987P_ H1048Q_H1064N_ H1083N_H1101N) Ferritin construct
MFVFLVLLPLVSSQCVNLTTRTQLPPAYTNSFTRGVYYPDKVFRSSVLHSTQDLFLPFFSNVTWFHAIHVSGTNGTKRFDNPVLPFNDGVYFASTEKSNIIRGWIFGTTLDSKTQSLLIVNNATNVVIKVCEFQFCNDPFLGVYYYKNNKSWMESEFRVYSSANNCTFEYVSQPFLMDLEGKQGNFKNLREFVFKNIDGYFKIYSKHTPINLVRDLPQGFSALEPLVDLPIGINITRFQTLLALHRSYLTPGDSSSGWTAGAAAYYVGYLQPRTFLLKYNENGTITDAVDCALDPLSETKCTLKSFTVEKGIYQTSNFRVQPTESIVRFPNITNLCPFGEVFNATRFASVYAWNRKRISNCVADYSVLYNSASFSTFKCYGVSPTKLNDLCFTNVYADSFVIRGDEVRQIAPGQTGKIADYNYKLPDDFTGCVIAWNSNNLDSKVGGNYNYLYRLFRKSNLKPFERDISTEIYQAGSTPCNGVEGFNCYFPLQSYGFQPTNGVGYQPYRVVVLSFELLHAPATVCGPKKSTNLVKNKCVNFNFNGLTGTGVLTESNKKFLPFQQFGRDIADTTDAVRDPQTLEILDITPCSFGGVSVITPGTNTSNQVAVLYQGVNCTEVPVAIHADQLTPTWRVYSTGSNVFQTRAGCLIGAEHVNNSYECDIPIGAGICASYQTQTNSPRRARSVASQSIIAYTMSLGAENSVAYSNNSIAIPTNFTISVTTEILPVSMTKTSVDCTMYICGDSTECSNLLLQYGSFCTQLNRALTGIAVEQDKNTQEVFAQVKQIYKTPPIKDFGGFNFSQILPDPSKPSKRSFIEDLLFNKVTLADAGFIKQYGDCLGDIAARDLICAQKFNGLTVLPPLLTDEMIAQYTSALLAGTITSGWTFGAGAALQIPFAMQMAYRFNGIGVTQNVLYENQKLIANQFNSAIGKIQDSLSSTASALGKLQDVVNQNAQALNTLVKQLSSNFGAISSVLNDILSRLDPPEAEVQIDRLITGRLQSLQTYVTQQLIRAAEIRASANLAATKMSECVLGQSKRVDFCGKGYQLMSFPQSAPHGVVFLNVTYVPAQEKNFTTAPAICNDGKAHFPREGVFVSNGTNWFVTQRNFYEPQIITTDNTFVSGNCDVVIGIVNNTVYDPLQPELDSFKEELDKYFKNHTSPDVDLGDISGINASVVNIQKEIDRLNEVAKNLNESLIDLQELGKYEQYIKGGGGSDIIKLLNEQVNKEMQSSNLYMSMSSWCYTHSLDGAGLFLFDHAAEEYEHAKKLIIFLNENNVPVQLTSISAPEHKFEGLTQIFQKAYEHEQHISESINNIVDHAIKSKDHATFNFLQWYVAEQHEEEVLFKDILDKIELIGNENHGLYLADQYVKGIAKSRKS

SEQ ID NO: 4957 - protein, 1379 aa, Artificial Sequence
  SARS-CoV-2/USA/UT-00033/2020__EPI_ISL_417976 spike protein (1-1211)(K986P_V987P_ H1048Q_H1064N_ H1083N_H1101N) Ferritin construct
MFVFLVLLPLVSSQCVNLTTRTQLPPAYTNSFTRGVYYPDKVFRSSVLHSTQDLFLPFFSNVTWFHAIHVSGTNGTKRFDNPVLPFNDGVYFASTEKSNIIRGWIFGTTLDSKTQSLLIVNNATNVVIKVCEFQFCNDPFLGVYYHKNNKSWMESEFRVYSSANNCTFEYVSQPFLMDLEGKQGNFKNLREFVFKNIDGYFKIYSKHTPINLVRDLPQGFSALEPLVDLPIGINITRFQTLLALHRSYLTPGDSSSGLTAGAAAYYVGYLQPRTFLLKYNENGTITDAVDCALDPLSETKCTLKSFTVEKGIYQTSNFRVQPTESIVRFPNITNLCPFGEVFNATRFASVYAWNRKRISNCVADYSVLYNSASFSTFKCYGVSPTKLNDLCFTNVYADSFVIRGDEVRQIAPGQTGKIADYNYKLPDDFTGCVIAWNSNNLDSKVGGNYNYLYRLFRKSNLKPFERDISTEIYQAGSTPCNGVEGFNCYFPLQSYGFQPTNGVGYQPYRVVVLSFELLHAPATVCGPKKSTNLVKNKCVNFNFNGLTGTGVLTESNKKFLPFQQFGRDIADTTDAVRDPQTLEILDITPCSFGGVSVITPGTNTSNQVAVLYQGVNCTEVPVAIHADQLTPTWRVYSTGSNVFQTRAGCLIGAEHVNNSYECDIPIGAGICASYQTQTNSPRRARSVASQSIIAYTMSLGAENSVAYSNNSIAIPTNFTISVTTEILPVSMTKTSVDCTMYICGDSTECSNLLLQYGSFCTQLNRALTGIAVEQDKNTQEVFAQVKQIYKTPPIKDFGGFNFSQILPDPSKPSKRSFIEDLLFNKVTLADAGFIKQYGDCLGDIAARDLICAQKFNGLTVLPPLLTDEMIAQYTSALLAGTITSGWTFGAGAALQIPFAMQMAYRFNGIGVTQNVLYENQKLIANQFNSAIGKIQDSLSSTASALGKLQDVVNQNAQALNTLVKQLSSNFGAISSVLNDILSRLDPPEAEVQIDRLITGRLQSLQTYVTQQLIRAAEIRASANLAATKMSECVLGQSKRVDFCGKGYQLMSFPQSAPHGVVFLNVTYVPAQEKNFTTAPAICNDGKAHFPREGVFVSNGTNWFVTQRNFYEPQIITTDNTFVSGNCDVVIGIVNNTVYDPLQPELDSFKEELDKYFKNHTSPDVDLGDISGINASVVNIQKEIDRLNEVAKNLNESLIDLQELGKYEQYIKGGGGSDIIKLLNEQVNKEMQSSNLYMSMSSWCYTHSLDGAGLFLFDHAAEEYEHAKKLIIFLNENNVPVQLTSISAPEHKFEGLTQIFQKAYEHEQHISESINNIVDHAIKSKDHATFNFLQWYVAEQHEEEVLFKDILDKIELIGNENHGLYLADQYVKGIAKSRKS

SEQ ID NO: 4958 - protein, 1379 aa, Artificial Sequence
  SARS-CoV-2/USA/WI-13/2020__EPI_ISL_417516 spike protein (1-1211)(K986P_V987P_ H1048Q_H1064N_ H1083N_H1101N) Ferritin construct
MFVFLVLLPLVSSQCVNLTTRTQLPPAYTNSFTRGVYYPDKVFRSSVLHSTQDLFLPFFSNVTWFHAIHVSGTNGTKRFDNPVLPFNDGVYFASTEKSNIIRGWIFGTTLDSKTQSLLIVNNATNVVIKVCEFQFCNDPFLGVYYHKNNKSWMESEFRVYSSANNCTFEYVSQPFLMDLEGKQGNFKNLREFVFKNIDGYFKIYSKHTPINLVRDLPQGFSALEPLVDLPIGINITRFQTLLALHRSYLTPGDSSSGWTAGAAAYYVGYLQPRTFLLKYNENGTITDAVDCALDPLSETKCTLKSFTVEKGIYQTSNFRVLPTESIVRFPNITNLCPFGEVFNATRFASVYAWNRKRISNCVADYSVLYNSASFSTFKCYGVSPTKLNDLCFTNVYADSFVIRGDEVRQIAPGQTGKIADYNYKLPDDFTGCVIAWNSNNLDSKVGGNYNYLYRLFRKSNLKPFERDISTEIYQAGSTPCNGVEGFNCYFPLQSYGFQPTNGVGYQPYRVVVLSFELLHAPATVCGPKKSTNLVKNKCVNFNFNGLTGTGVLTESNKKFLPFQQFGRDIADTTDAVRDPQTLEILDITPCSFGGVSVITPGTNTSNQVAVLYQGVNCTEVPVAIHADQLTPTWRVYSTGSNVFQTRAGCLIGAEHVNNSYECDIPIGAGICASYQTQTNSPRRARSVASQSIIAYTMSLGAENSVAYSNNSIAIPTNFTISVTTEILPVSMTKTSVDCTMYICGDSTECSNLLLQYGSFCTQLNRALTGIAVEQDKNTQEVFAQVKQIYKTPPIKDFGGFNFSQILPDPSKPSKRSFIEDLLFNKVTLADAGFIKQYGDCLGDIAARDLICAQKFNGLTVLPPLLTDEMIAQYTSALLAGTITSGWTFGAGAALQIPFAMQMAYRFNGIGVTQNVLYENQKLIANQFNSAIGKIQDSLSSTASALGKLQDVVNQNAQALNTLVKQLSSNFGAISSVLNDILSRLDPPEAEVQIDRLITGRLQSLQTYVTQQLIRAAEIRASANLAATKMSECVLGQSKRVDFCGKGYQLMSFPQSAPHGVVFLNVTYVPAQEKNFTTAPAICNDGKAHFPREGVFVSNGTNWFVTQRNFYEPQIITTDNTFVSGNCDVVIGIVNNTVYDPLQPELDSFKEELDKYFKNHTSPDVDLGDISGINASVVNIQKEIDRLNEVAKNLNESLIDLQELGKYEQYIKGGGGSDIIKLLNEQVNKEMQSSNLYMSMSSWCYTHSLDGAGLFLFDHAAEEYEHAKKLIIFLNENNVPVQLTSISAPEHKFEGLTQIFQKAYEHEQHISESINNIVDHAIKSKDHATFNFLQWYVAEQHEEEVLFKDILDKIELIGNENHGLYLADQYVKGIAKSRKS

SEQ ID NO: 4959 - protein, 1378 aa, Artificial Sequence
  SARS-CoV-2/India/1-27/2020__EPI_ISL_413522 spike protein (1-1210)(K985P_V986P_ H1047Q_H1063N_ H1082N_H1100N) Ferritin construct
MFVFLVLLPLVSSQCVNLTTRTQLPPAYTNSFTRGVYYPDKVFRSSVLHSTQDLFLPFFSNVTWFHAIHVSGTNGTKRFDNPVLPFNDGVYFASTEKSNIIRGWIFGTTLDSKTQSLLIVNNATNVVIKVCEFQFCNDPFLGVYHKNNKSWMESEFRVYSSANNCTFEYVSQPFLMDLEGKQGNFKNLREFVFKNIDGYFKIYSKHTPINLVRDLPQGFSALEPLVDLPIGINITRFQTLLALHRSYLTPGDSSSGWTAGAAAYYVGYLQPRTFLLKYNENGTITDAVDCALDPLSETKCTLKSFTVEKGIYQTSNFRVQPTESIVRFPNITNLCPFGEVFNATRFASVYAWNRKRISNCVADYSVLYNSASFSTFKCYGVSPTKLNDLCFTNVYADSFVIRGDEVIQIAPGQTGKIADYNYKLPDDFTGCVIAWNSNNLDSKVGGNYNYLYRLFRKSNLKPFERDISTEIYQAGSTPCNGVEGFNCYFPLQSYGFQPTNGVGYQPYRVVVLSFELLHAPATVCGPKKSTNLVKNKCVNFNFNGLTGTGVLTESNKKFLPFQQFGRDIADTTDAVRDPQTLEILDITPCSFGGVSVITPGTNTSNQVAVLYQDVNCTEVPVAIHADQLTPTWRVYSTGSNVFQTRAGCLIGAEHVNNSYECDIPIGAGICASYQTQTNSPRRARSVASQSIIAYTMSLGAENSVAYSNNSIAIPTNFTISVTTEILPVSMTKTSVDCTMYICGDSTECSNLLLQYGSFCTQLNRALTGIAVEQDKNTQEVFAQVKQIYKTPPIKDFGGFNFSQILPDPSKPSKRSFIEDLLFNKVTLADAGFIKQYGDCLGDIAARDLICAQKFNGLTVLPPLLTDEMIAQYTSALLAGTITSGWTFGAGAALQIPFAMQMAYRFNGIGVTQNVLYENQKLIANQFNSAIGKIQDSLSSTASALGKLQDVVNQNAQALNTLVKQLSSNFGAISSVLNDILSRLDPPEAEVQIDRLITGRLQSLQTYVTQQLIRAAEIRASANLAATKMSECVLGQSKRVDFCGKGYQLMSFPQSAPHGVVFLNVTYVPAQEKNFTTAPAICNDGKAHFPREGVFVSNGTNWFVTQRNFYEPQIITTDNTFVSGNCDVVIGIVNNTVYDPLQPELDSFKEELDKYFKNHTSPDVDLGDISGINASVVNIQKEIDRLNEVAKNLNESLIDLQELGKYEQYIKGGGGSDIIKLLNEQVNKEMQSSNLYMSMSSWCYTHSLDGAGLFLFDHAAEEYEHAKKLIIFLNENNVPVQLTSISAPEHKFEGLTQIFQKAYEHEQHISESINNIVDHAIKSKDHATFNFLQWYVAEQHEEEVLFKDILDKIELIGNENHGLYLADQYVKGIAKSRKS

SEQ ID NO: 4960 - protein, 1373 aa, Artificial Sequence
  SARS-CoV-2/pangolin/Guangxi/P4L/2017__EPI_ISL_410538 spike protein (1-1205)(K980P_V981P_ H1042Q_H1058N_ H1077N_H1095N) Ferritin construct
MFVFLFVLPLVSSQCVNLTTRTGIPPGYTNSSTRGVYYPDKVFRSSILHLTQDLFLPFFSNVTWFNTINYQGGFKKFDNPVLPFNDGVYFASTEKSNIIRGWIFGTTLDARTQSLLIVNNATNVVIKVCEFQFCTDPFLGVYYHNNNKTWVENEFRVYSSANNCTFEYISQPFLMDLEGKQGNFKNLREFVFKNVDGYFKIYSKHTPIDLVRDLPRGFAALEPLVDLPIGINITRFQTLLALHRSYLTPGNLESGWTTGAAAYYVGYLQQRTFLLSYNQNGTITDAVDCSLDPLSETKCTLKSLTVEKGIYQTSNFRVQPTISIVRFPNITNLCPFGEVFNASKFASVYAWNRKRISNCVADYSVLYNSTSFSTFKCYGVSPTKLNDLCFTNVYADSFVVKGDEVRQIAPGQTGVIADYNYKLPDDFTGCVIAWNSVKQDALTGGNYGYLYRLFRKSKLKPFERDISTEIYQAGSTPCNGQVGLNCYYPLERYGFHPTTGVNYQPFRVVVLSFELLNGPATVCGPKLSTTLVKDKCVNFNFNGLTGTGVLTTSKKQFLPFQQFGRDISDTTDAVRDPQTLEILDITPCSFGGVSVITPGTNTSNQVAVLYQDVNCTEVPMAIHAEQLTPAWRVYSAGANVFQTRAGCLVGAEHVNNSYECDIPVGAGICASYHSMSSLRSVNQRSIIAYTMSLGAENSVAYSNNSIAIPTNFTISVTTEILPVSMTKTSVDCTMYICGDSIECSNLLLQYGSFCTQLNRALTGIAVEQDKNTQEVFAQVKQIYKTPPIKDFGGFNFSQILPDPSKPSKRSFIEDLLFNKVTLADAGFIKQYGDCLGDIAARDLICAQKFNGLTVLPPLLTDEMIAQYTSALLAGTITSGWTFGAGAALQIPFAMQMAYRFNGIGVTQNVLYENQKLIANQFNSAIGKIQDSLSSTASALGKLQDVVNQNAQALNTLVKQLSSNFGAISSVLNDILSRLDPPEAEVQIDRLITGRLQSLQTYVTQQLIRAAEIRASANLAATKMSECVLGQSKRVDFCGKGYQLMSFPQSAPHGVVFLNVTYVPAQEKNFTTAPAICNEGKAHFPREGVFVSNGTNWFITQRNFYEPQIITTDNTFVSGSCDVVIGIVNNTVYDPLQPELDSFKEELDKYFKNHTSPDVDLGDISGINASVVNIQKEIDRLNEVAKNLNESPIDLQELGKYEQYIKGGGGSDIIKLLNEQVNKEMQSSNLYMSMSSWCYTHSLDGAGLFLFDHAAEEYEHAKKLIIFLNENNVPVQLTSISAPEHKFEGLTQIFQKAYEHEQHISESINNIVDHAIKSKDHATFNFLQWYVAEQHEEEVLFKDILDKIELIGNENHGLYLADQYVKGIAKSRKS

SEQ ID NO: 4961 - protein, 1373 aa, Artificial Sequence
  SARS-CoV-2/pangolin/Guangxi/P5L/2017__EPI_ISL_410540 spike protein (1-1205)(K980P_V981P_ H1042Q_H1058N_ H1077N_H1095N) Ferritin construct
MFVFLFVLPLVSSQCVNLTTRTGIPPGYTNSSTRGVYYPDKVFRSSILHLTQDLFLPFFSNVTWFNTINYQGGFKKFDNPVLPFNDGVYFASTEKSNIIRGWIFGTTLDARTQSLLIVNNATNVVIKVCEFQFCTDPFLGVYYHNNNKTWVENEFRVYSSANNCTFEYISQPFLMDLEGKQGNFKNLREFVFKNVDGYFKIYSKHTPIDLVRDLPRGFAALEPLVDLPIGINITRFQTLLALHRSYLTPGKLESGWTTGAAAYYVGYLQQRTFLLSYNQNGTITDAVDCSLDPLSETKCTLKSLTVEKGIYQTSNFRVQPTISIVRFPNITNLCPFGEVFNASKFASVYAWNRKRISNCVADYSVLYNSTSFSTFKCYGVSPTKLNDLCFTNVYADSFVVKGDEVRQIAPGQTGVIADYNYKLPDDFTGCVIAWNSVKQDALTGGNYGYLYRLFRKSKLKPFERDISTEIYQAGSTPCNGQVGLNCYYPLERYGFHPTTGVNYQPFRVVVLSFELLNGPATVCGPKLSTTLVKDKCVNFNFNGLTGTGVLTTSKKQFLPFQQFGRDISDTTDAVRDPQTLEILDITPCSFGGVSVITPGTNTSNQVAVLYQDVNCTEVPMAIHAEQLTPAWRVYSAGANVFQTRAGCLVGAEHVNNSYECDIPVGAGICASYHSMSSFRSVNQRSIIAYTMSLGAENSVAYSNNSIAIPTNFTISVTTEILPVSMTKTSVDCTMYICGDSIECSNLLLQYGSFCTQLNRALTGIAVEQDKNTQEVFAQVKQIYKTPPIKDFGGFNFSQILPDPSKPSKRSFIEDLLFNKVTLADAGFIKQYGDCLGDIAARDLICAQKFNGLTVLPPLLTDEMIAQYTSALLAGTITSGWTFGAGAALQIPFAMQMAYRFNGIGVTQNVLYENQKLIANQFNSAIGKIQDSLSSTASALGKLQDVVNQNAQALNTLVKQLSSNFGAISSVLNDILSRLDPPEAEVQIDRLITGRLQSLQTYVTQQLIRAAEIRASANLAATKMSECVLGQSKRVDFCGKGYQLMSFPQSAPHGVVFLNVTYVPAQEKNFTTAPAICNEGKAHFPREGVFVSNGTNWFITQRNFYEPQIITTDNTFVSGSCDVVIGIVNNTVYDPLQPELDSFKEELDKYFKNHTSPDVDLGDISGINASVVNIQKEIDRLNEVAKNLNESLIDLQELGKYEQYIKGGGGSDIIKLLNEQVNKEMQSSNLYMSMSSWCYTHSLDGAGLFLFDHAAEEYEHAKKLIIFLNENNVPVQLTSISAPEHKFEGLTQIFQKAYEHEQHISESINNIVDHAIKSKDHATFNFLQWYVAEQHEEEVLFKDILDKIELIGNENHGLYLADQYVKGIAKSRKS

SEQ ID NO: 4962 - protein, 1373 aa, Artificial Sequence
  SARS-CoV-2/pangolin/Guangxi/P5E/2017__EPI_ISL_410541 spike protein (1-1205)(K980P_V981P_ H1042Q_H1058N_ H1077N_H1095N) Ferritin construct
MFVFLFVLPLVSSQCVNLTTRTGIPPGYTNSSTRGVYYPDKVFRSSILHLTQDLFLPFFSNVTWFNTITYQGGSKKFDNPVLPFNDGVYFASTEKSNIIRGWIFGTTLDARTQSLLIVNNATNVVIKVCEFQFCTDPFLGVYYHNNNKTWVENEFRVYSSANNCTFEYISQPFLMDLEGKQGNFKNLREFVFKNVDGYFKIYSKHTPIDLVRDLPRGFAALEPLVDLPIGINITRFQTLLALHRSYLTPGKLESGWTTGAAAYYVGYLQQRTFLLSYNQNGTITDAVDCSLDPLSETKCTLKSLTVEKGIYQTSNFRVQPTISIVRFPNITNLCPFGEVFNASKFASVYAWNRKRISNCVADYSVLYNSTSFSTFKCYGVSPTKLNDLCFTNVYADSFVVKGDEVRQIAPGQTGVIADYNYKLPDDFTGCVIAWNSVKQDALTGDNYGYLYRLFRKSKLKPFERDISTEIYQAGSTPCNGQVGLNCYYPLERYGFHPTTGVNYQPFRVVVLSFELLNGPATVCGPKLSTTLVKDKCVNFNFNGLTGTGVLTTSKKQFLPFQQFGRDISDTTDAVRDPQTLEILDITPCSFGGVSVITPGTNTSNQVAVLYQDVNCTEVPMAIHAEQLTPAWRVYSAGANVFQTRAGCLVGAEHVNNSYECDIPVGAGICASYHSMSSFRSVNQRSIIAYTMSLGAENSVAYSNNSIAIPTNFTISVTTEILPVSMTKTSVDCTMYICGDSIECSNLLLQYGSFCTQLNRALTGIAVEQDKNTQEVFAQVKQIYKTPPIKDFGGFNFSQILPDPSKPSKRSFIEDLLFNKVTLADAGFIKQYGDCLGDIAARDLICAQKFNGLTVLPPLLTDEMIAQYTSALLAGTITSGWTFGAGAALQIPFAMQMAYRFNGIGVTQNVLYENQKLIANQFNSAIGKIQDSLSSTASALGKLQDVVNQNAQALNTLVKQLSSNFGAISSVLNDILSRLDPPEAEVQIDRLITGRLQSLQTYVTQQLIRAAEIRASANLAATKMSECVLGQSKRVDFCGKGYQLMSFPQSAPHGVVFLNVTYVPAQEKNFTTAPAICNEGKAHFPREGVFVSNGTNWFITQRNFYEPQIITTDNTFVSGSCDVVIGIVNNTVYDPLQPELDSFKEELDKYFKNHTSPDVDLGDISGINASVVNIQKEIDRLNEVAKNLNESLIDLQELGKYEQYIKGGGGSDIIKLLNEQVNKEMQSSNLYMSMSSWCYTHSLDGAGLFLFDHAAEEYEHAKKLIIFLNENNVPVQLTSISAPEHKFEGLTQIFQKAYEHEQHISESINNIVDHAIKSKDHATFNFLQWYVAEQHEEEVLFKDILDKIELIGNENHGLYLADQYVKGIAKSRKS

SEQ ID NO: 4963 - protein, 1371 aa, Artificial Sequence
  SARS-CoV-2/pangolin/Guangxi/P1E/2017__EPI_ISL_410539 spike protein (1-1203)(K978P_V979P_ H1040Q_H1056N_ H1075N_H1093N) Ferritin construct
MFVFLFVLPLVSSQCVNLTTRTGIQPGYTNSSTRGVYYPDKVFRSSILHLTQDLFLPFFSNVTWFNTINYQGGFKKFDNPVLPFNDGVYFASTEKSNIIRGWIFGTTLDARTQSLLIVNNATNVVIKVCEFQFCTDPFLGVYYHNNNKTWVENEFRVYSSANNCTFEYISQPFLMDLEGKQGNFKNLREFVFKNVDGYFKIYSKHTPIDLVRDLPRGFAALEPLVDLPIGINITRFQTLLALHRSYLTPGKLESGWTTGAAAYYVGYLQQRTFLLSYNQNGTITDAVDCSLDPLSETKCTLKSLTVEKGIYQTSNFRVQPTISIVRFPNITNLCPFGEVFNASKFASVYAWNRKRISNCVADYSVLYNSTSFSTFKCYGVSPTKLNDLCFTNVYADSFVVKGDEVRQIAPGQTGVIADYNYKLPDDFTGCVIAWNSVKQDALTGGNYLYRLFRKSKLKPFERDISTEIYQAGSTPCNGQVGLNCYYPLERYGFHPTTGVNYQPFRVVVLSFELLNGPATVCGPKLSTTLVKDKCVNFNFNGLTGTGVLTTSKKQFLPFQQFGRDISDTTDAVRDPQTLEILDITPCSFGGVSVITPGTNTSNQVAVLYQDVNCTEVPMAIHAEQLTPAWRVYSAGANVFQTRAGCLVGAEHVNNSYECDIPVGAGICASYHSMSSLRSVNQRSIIAYTMSLGAENSVAYSNNSIAIPTNFTISVTTEILPVSMTKTSVDCTMYICGDSIECSNLLLQYGSFCTQLNRALTGIAVEQDKNTQEVFAQVKQIYKTPPIKDFGGFNFSQILPDPSKPSKRSFIEDLLFNKVTLADAGFIKQYGDCLGDIAARDLICAQKFNGLTVLPPLLTDEMIAQYTSALLAGTITSGWTFGAGAALQIPFAMQMAYRFNGIGVTQNVLYENQKLIANQFNSAIGKIQDSLSSTASALGKLQDVVNQNAQALNTLVKQLSSNFGAISSVLNDILSRLDPPEAEVQIDRLITGRLQSLQTYVTQQLIRAAEIRASANLAATKMSECVLGQSKRVDFCGKGYQLMSFPQSAPHGVVFLNVTYVPAQEKNFTTAPAICNEGKAHFPREGVFVSNGTNWFITQRNFYEPQIITTDNTFVSGSCDVVIGIVNNTVYDPLQPELDSFKEELDKYFKNHTSPDVDLGDISGINASVVNIQKEIDRLNEVAKNLNESLIDLQELGKYEQYIKGGGGSDIIKLLNEQVNKEMQSSNLYMSMSSWCYTHSLDGAGLFLFDHAAEEYEHAKKLIIFLNENNVPVQLTSISAPEHKFEGLTQIFQKAYEHEQHISESINNIVDHAIKSKDHATFNFLQWYVAEQHEEEVLFKDILDKIELIGNENHGLYLADQYVKGIAKSRKS

SEQ ID NO: 4964 - protein, 1379 aa, Artificial Sequence
  SARS-CoV-2/Wuhan/WIV05/2019__EPI_ISL_402128 spike protein (1-1211)(I712C_T1077C) Ferritin construct
MFVFLVLLPLVSSQCVNLTTRTQLPPAYTNSFTRGVYYPDKVFRSSVLHSTQDLFLPFFSNVTWFHAIHVSGTNGTKRFDNPVLPFNDGVYFASTEKSNIIRGWIFGTTLDSKTQSLLIVNNATNVVIKVCEFQFCNDPFLGVYYHKNNKSWMESEFRVYSSANNCTFEYVSQPFLMDLEGKQGNFKNLREFVFKNIDGYFKIYSKHTPINLVRDLPQGFSALEPLVDLPIGINITRFQTLLALHRSYLTPGDSSSGWTAGAAAYYVGYLQPRTFLLKYNENGTITDAVDCALDPLSETKCTLKSFTVEKGIYQTSNFRVQPTESIVRFPNITNLCPFGEVFNATRFASVYAWNRKRISNCVADYSVLYNSASFSTFKCYGVSPTKLNDLCFTNVYADSFVIRGDEVRQIAPGQTGKIADYNYKLPDDFTGCVIAWNSNNLDSKVGGNYNYLYRLFRKSNLKPFERDISTEIYQAGSTPCNGVEGFNCYFPLQSYGFQPTNGVGYQPYRVVVLSFELLHAPATVCGPKKSTNLVKNKCVNFNFNGLTGTGVLTESNKKFLPFQQFGRDIADTTDAVRDPQTLEILDITPCSFGGVSVITPGTNTSNQVAVLYQDVNCTEVPVAIHADQLTPTWRVYSTGSNVFQTRAGCLIGAEHVNNSYECDIPIGAGICASYQTQTNSPRRARSVASQSIIAYTMSLGAENSVAYSNNSCAIPTNFTISVTTEILPVSMTKTSVDCTMYICGDSTECSNLLLQYGSFCTQLNRALTGIAVEQDKNTQEVFAQVKQIYKTPPIKDFGGFNFSQILPDPSKPSKRSFIEDLLFNKVTLADAGFIKQYGDCLGDIAARDLICAQKFNGLTVLPPLLTDEMIAQYTSALLAGTITSGWTFGAGAALQIPFAMQMAYRFNGIGVTQNVLYENQKLIANQFNSAIGKIQDSLSSTASALGKLQDVVNQNAQALNTLVKQLSSNFGAISSVLNDILSRLDKVEAEVQIDRLITGRLQSLQTYVTQQLIRAAEIRASANLAATKMSECVLGQSKRVDFCGKGYHLMSFPQSAPHGVVFLHVTYVPAQEKNFTCAPAICHDGKAHFPREGVFVSNGTHWFVTQRNFYEPQIITTDNTFVSGNCDVVIGIVNNTVYDPLQPELDSFKEELDKYFKNHTSPDVDLGDISGINASVVNIQKEIDRLNEVAKNLNESLIDLQELGKYEQYIKGGGGSDIIKLLNEQVNKEMQSSNLYMSMSSWCYTHSLDGAGLFLFDHAAEEYEHAKKLIIFLNENNVPVQLTSISAPEHKFEGLTQIFQKAYEHEQHISESINNIVDHAIKSKDHATFNFLQWYVAEQHEEEVLFKDILDKIELIGNENHGLYLADQYVKGIAKSRKS

SEQ ID NO: 4965 - protein, 1375 aa, Artificial Sequence
  SARS-CoV-2/bat/Yunnan/RaTG13/2013__EPI_ISL_402131 spike protein (1-1207)(I708C_T1073C) Ferritin construct
MFVFLVLLPLVSSQCVNLTTRTQLPPAYTNSSTRGVYYPDKVFRSSVLHLTQDLFLPFFSNVTWFHAIHVSGTNGIKRFDNPVLPFNDGVYFASTEKSNIIRGWIFGTTLDSKTQSLLIVNNATNVVIKVCEFQFCNDPFLGVYYHKNNKSWMESEFRVYSSANNCTFEYVSQPFLMDLEGKQGNFKNLREFVFKNIDGYFKIYSKHTPINLVRDLPPGFSALEPLVDLPIGINITRFQTLLALHRSYLTPGDSSSGWTAGAAAYYVGYLQPRTFLLKYNENGTITDAVDCALDPLSETKCTLKSFTVEKGIYQTSNFRVQPTDSIVRFPNITNLCPFGEVFNATTFASVYAWNRKRISNCVADYSVLYNSTSFSTFKCYGVSPTKLNDLCFTNVYADSFVITGDEVRQIAPGQTGKIADYNYKLPDDFTGCVIAWNSKHIDAKEGGNFNYLYRLFRKANLKPFERDISTEIYQAGSKPCNGQTGLNCYYPLYRYGFYPTDGVGHQPYRVVVLSFELLNAPATVCGPKKSTNLVKNKCVNFNFNGLTGTGVLTESNKKFLPFQQFGRDIADTTDAVRDPQTLEILDITPCSFGGVSVITPGTNASNQVAVLYQDVNCTEVPVAIHADQLTPTWRVYSTGSNVFQTRAGCLIGAEHVNNSYECDIPIGAGICASYQTQTNSRSVASQSIIAYTMSLGAENSVAYSNNSCAIPTNFTISVTTEILPVSMTKTSVDCTMYICGDSTECSNLLLQYGSFCTQLNRALTGIAVEQDKNTQEVFAQVKQIYKTPPIKDFGGFNFSQILPDPSKPSKRSFIEDLLFNKVTLADAGFIKQYGDCLGDIAARDLICAQKFNGLTVLPPLLTDEMIAQYTSALLAGTITSGWTFGAGAALQIPFAMQMAYRFNGIGVTQNVLYENQKLIANQFNSAIGKIQDSLSSTASALGKLQDVVNQNAQALNTLVKQLSSNFGAISSVLNDILSRLDKVEAEVQIDRLITGRLQSLQTYVTQQLIRAAEIRASANLAATKMSECVLGQSKRVDFCGKGYHLMSFPQSAPHGVVFLHVTYVPAQEKNFTCAPAICHDGKAHFPREGVFVSNGTHWFVTQRNFYEPQIITTDNTFVSGSCDVVIGIVNNTVYDPLQPELDSFKEELDKYFKNHTSPDVDLGDISGINASVVNIQKEIDRLNEVAKNLNESLIDLQELGKYEQYIKGGGGSDIIKLLNEQVNKEMQSSNLYMSMSSWCYTHSLDGAGLFLFDHAAEEYEHAKKLIIFLNENNVPVQLTSISAPEHKFEGLTQIFQKAYEHEQHISESINNIVDHAIKSKDHATFNFLQWYVAEQHEEEVLFKDILDKIELIGNENHGLYLADQYVKGIAKSRKS

SEQ ID NO: 4966 - protein, 1379 aa, Artificial Sequence
  SARS-CoV-2/Wuhan/HBCDC-HB-01/2019__EPI_ISL_402132 spike protein (1-1211)(I712C_T1077C) Ferritin construct
MFVFLVLLPLVSSQCVNLTTRTQLPPAYTNSITRGVYYPDKVFRSSVLHSTQDLFLPFFSNVTWFHAIHVSGTNGTKRFDNPVLPFNDGVYFASTEKSNIIRGWIFGTTLDSKTQSLLIVNNATNVVIKVCEFQFCNDPFLGVYYHKNNKSWMESEFRVYSSANNCTFEYVSQPFLMDLEGKQGNFKNLREFVFKNIDGYFKIYSKHTPINLVRDLPQGFSALEPLVDLPIGINITRFQTLLALHRSYLTPGDSSSGWTAGAAAYYVGYLQPRTFLLKYNENGTITDAVDCALDPLSETKCTLKSFTVEKGIYQTSNFRVQPTESIVRFPNITNLCPFGEVFNATRFASVYAWNRKRISNCVADYSVLYNSASFSTFKCYGVSPTKLNDLCFTNVYADSFVIRGDEVRQIAPGQTGKIADYNYKLPDDFTGCVIAWNSNNLDSKVGGNYNYLYRLFRKSNLKPFERDISTEIYQAGSTPCNGVEGFNCYFPLQSYGFQPTNGVGYQPYRVVVLSFELLHAPATVCGPKKSTNLVKNKCVNFNFNGLTGTGVLTESNKKFLPFQQFGRDIADTTDAVRDPQTLEILDITPCSFGGVSVITPGTNTSNQVAVLYQDVNCTEVPVAIHADQLTPTWRVYSTGSNVFQTRAGCLIGAEHVNNSYECDIPIGAGICASYQTQTNSPRRARSVASQSIIAYTMSLGAENSVAYSNNSCAIPTNFTISVTTEILPVSMTKTSVDCTMYICGDSTECSNLLLQYGSFCTQLNRALTGIAVEQDKNTQEVFAQVKQIYKTPPIKDFGGFNFSQILPDPSKPSKRSFIEDLLFNKVTLADAGFIKQYGDCLGDIAARDLICAQKFNGLTVLPPLLTDEMIAQYTSALLAGTITSGWTFGAGAALQIPFAMQMAYRFNGIGVTQNVLYENQKLIANQFNSAIGKIQDSLSSTASALGKLQDVVNQNAQALNTLVKQLSSNFGAISSVLNDILSRLDKVEAEVQIDRLITGRLQSLQTYVTQQLIRAAEIRASANLAATKMSECVLGQSKRVDFCGKGYHLMSFPQSAPHGVVFLHVTYVPAQEKNFTCAPAICHDGKAHFPREGVFVSNGTHWFVTQRNFYEPQIITTDNTFVSGNCDVVIGIVNNTVYDPLQPELDSFKEELDKYFKNHTSPDVDLGDISGINASVVNIQKEIDRLNEVAKNLNESLIDLQELGKYEQYIKGGGGSDIIKLLNEQVNKEMQSSNLYMSMSSWCYTHSLDGAGLFLFDHAAEEYEHAKKLIIFLNENNVPVQLTSISAPEHKFEGLTQIFQKAYEHEQHISESINNIVDHAIKSKDHATFNFLQWYVAEQHEEEVLFKDILDKIELIGNENHGLYLADQYVKGIAKSRKS

SEQ ID NO: 4967 - protein, 1379 aa, Artificial Sequence
  SARS-CoV-2/Guangdong/20SF028/2020__EPI_ISL_403936 spike protein (1-1211)(I712C_T1077C) Ferritin construct
MFVFLVLLPLVSSQCVNLTTRTQLPPAYTNSFTRGVYYPDKVFRSSVLYSTQDLFLPFFSNVTWFHAIHVSGTNGTKRFDNPVLPFNDGVYFASTEKSNIIRGWIFGTTLDSKTQSLLIVNNATNVVIKVCEFQFCNDPFLGVYYHKNNKSWMESEFRVYSSANNCTFEYVSQPFLMDLEGKQGNFKNLREFVFKNIDGYFKIYSKHTPINLVRDLPQGFSALEPLVDLPIGINITRFQTLLALHRSYLTPGDSSSGWTAGAAAYYVGYLQPRTFLLKYNENGTITDAVDCALDPLSETKCTLKSFTVEKGIYQTSNFRVQPTESIVRFPNITNLCPFGEVFNATRFASVYAWNRKRISNCVADYSVLYNSASFSTFKCYGVSPTKLNDLCFTNVYADSFVIRGDEVRQIAPGQTGKIADYNYKLPDDFTGCVIAWNSNNLDSKVGGNYNYLYRLFRKSNLKPFERDISTEIYQAGSTPCNGVEGFNCYFPLQSYGFQPTNGVGYQPYRVVVLSFELLHAPATVCGPKKSTNLVKNKCVNFNFNGLTGTGVLTESNKKFLPFQQFGRDIADTTDAVRDPQTLEILDITPCSFGGVSVITPGTNTSNQVAVLYQDVNCTEVPVAIHADQLTPTWRVYSTGSNVFQTRAGCLIGAEHVNNSYECDIPIGAGICASYQTQTNSPRRARSVASQSIIAYTMSLGAENSVAYSNNSCAIPTNFTISVTTEILPVSMTKTSVDCTMYICGDSTECSNLLLQYGSFCTQLNRALTGIAVEQDKNTQEVFAQVKQIYKTPPIKDFGGFNFSQILPDPSKPSKRSFIEDLLFNKVTLADAGFIKQYGDCLGDIAARDLICAQKFNGLTVLPPLLTDEMIAQYTSALLAGTITSGWTFGAGAALQIPFAMQMAYRFNGIGVTQNVLYENQKLIANQFNSAIGKIQDSLSSTASALGKLQDVVNQNAQALNTLVKQLSSNFGAISSVLNDILSRLDKVEAEVQIDRLITGRLQSLQTYVTQQLIRAAEIRASANLAATKMSECVLGQSKRVDFCGKGYHLMSFPQSAPHGVVFLHVTYVPAQEKNFTCAPAICHDGKAHFPREGVFVSNGTHWFVTQRNFYEPQIITTDNTFVSGNCDVVIGIVNNTVYDPLQPELDSFKEELDKYFKNHTSPDVDLGDISGINASVVNIQKEIDRLNEVAKNLNESLIDLQELGKYEQYIKGGGGSDIIKLLNEQVNKEMQSSNLYMSMSSWCYTHSLDGAGLFLFDHAAEEYEHAKKLIIFLNENNVPVQLTSISAPEHKFEGLTQIFQKAYEHEQHISESINNIVDHAIKSKDHATFNFLQWYVAEQHEEEVLFKDILDKIELIGNENHGLYLADQYVKGIAKSRKS

SEQ ID NO: 4968 - protein, 1379 aa, Artificial Sequence
  SARS-CoV-2/Shenzhen/SZTH-001/2020__EPI_ISL_406592 spike protein (1-1211)(I712C_T1077C) Ferritin construct
MFVFLVLLPLVSSQCVNLTTRTQLPPAYTNSFTRGVYYPDKVFRSSVLHSTQDLFLPFFSNVTWFHAIHVSGTNGTKRFDNPVLPFNDGVYFASTEKSNIIRGWIFGTTLDSKTQSLLIVNNATNVVIKVCEFQFCNDPFLGVYYHKNNKSWMESEFRVYSSANNCTFEYVSQPFLMDLEGKQGNFKNLREFVFKNIDGYFKIYSKHTPINLVRDLPQGFSALEPLVDLPIGINITRFQTLLALHRSYLTPGDSSSGWTAGAAAYYVGYLQPRTFLLKYNENGTITDAVDCALDPLSETKCTLKSFTVEKGIYQTSNFRVQPTESIVRFPNITNLCPFGEVFNATRFASVYAWNRKRISNCVADYSVLYNSASFSTFKCYGVSPTKLNDLCFTNVYADSFVIRGDEVRQIAPGQTGKIADYNYKLPDDFTGCVIAWNSNNLDSKVGGNYNYLYRLFRKSNLKPFERDISTEIYQAGSTPCNGVEGFNCYFPLQSYGFQPTNGVGYQPYRVVVLSFELLHAPATVCGPKKSTNLVKNKCVNFNFNGLTGTGVLTESNKKFLPFQQFGRDIADTTDAVRDPQTLEILDITPCSFGGVSVITPGTNTSNQVAVLYQDVNCTEVPVAIHADQLTPTWRVYSTGSNVFQTRAGCLIGAEHVNNSYECDIPIGAGICASYQTQTNSPRRARSVASQSIIAYTMSLGAENSVAYSNNSCAIPTNFTISVTTEILPVSMTKTSVDCTMYICGDSTECSNLLLQYGSFCTQLNRALTGIAVEQDKNTQEVFAQVKQIYKTPPIKDFGGFNFSQILPDPSKPSKRSFIEDLLFNKVTLADAGFIKQYGDCLGDIAARDLICAQKFNGLTVLPPLLTDEMIAQYTSALLAGTITSGWTFGAGAALQIPFAMQMAYRFNGIGVTQNVLYENQKLIANQFNSAIGKIQDSLSSTASALGKLQDVVNQNAQALNTLVKQLSSNFGAISSVLNDILSRLDKVEAEVQIDRLITGRLQSLQTYVTQQLIRAAEIRASANLAATKMSECVLGQSKRVDFCGKGYHLMSFPQSAPHGVVFLHVTYVPAQEKNFTCAPAICHDGKAHFPREGVFVSNGTHWFVTQRNFYEPQIITTDNTFVSGNCDVLIGIVNNTVYDPLQPELDSFKEELDKYFKNHTSPDVDLGDISGINASVVNIQKEIDRLNEVAKNLNESLIDLQELGKYEQYIKGGGGSDIIKLLNEQVNKEMQSSNLYMSMSSWCYTHSLDGAGLFLFDHAAEEYEHAKKLIIFLNENNVPVQLTSISAPEHKFEGLTQIFQKAYEHEQHISESINNIVDHAIKSKDHATFNFLQWYVAEQHEEEVLFKDILDKIELIGNENHGLYLADQYVKGIAKSRKS

SEQ ID NO: 4969 - protein, 1379 aa, Artificial Sequence
  SARS-CoV-2/Shenzhen/SZTH-004/2020__EPI_ISL_406595 spike protein (1-1211)(I712C_T1077C) Ferritin construct
MFVFLVLLPLVSSQCVNLTTRTQLPPAYTNSFTRGVYYPDKVFRSSVLHSTQDLFLPFFSNVTWFHAIHVSGTNGTKRFDNPVLPFNDGVYFASTEKSNIIRGWIFGTTLDSKTQSLLIVNNATNVVIKVCEFQFCNDPFLGVYYHKNNKSWMESEFRVYSSANNCTFEYVSQPFLMDLEGKQGNFKNLREFVFKNIDGYFKIYSKHTPINLVRDLPQGFSALEPLVDLPIGINITRFQTLLALHRSYLTPGDSSSGWTAGAAAYYVGYLQPRTFLLKYNENGTITDAVDCALDPLSETKCTLKSFTVEKGIYQTSNFRVQPTESIVRFPNITNLCPFGEVFNATRFASVYAWDRKRISNCVAYYSVLYNSASFSTFKCYGVSPTKLNDLCFTNVYADSFVIRGDEVRQIAPGQTGKIADYNYKLPDDFTGCVIAWNSNNLDSKVGGNYNYLYRLFRKSNLKPFERDISTEIYQAGSTPCNGVEGFNCYFPLQSYGFQPTNGVGYQPYRVVVLSFELLHAPATVCGPKKSTNLVKNKCVNFNFNGLTGTGVLTESNKKFLPFQQFGRDIADTTDAVRDPQTLEILDITPCSFGGVSVITPGTNTSNQVAVLYQDVNCTEVPVAIHADQLTPTWRVYSTGSNVFQTRAGCLIGAEHVNNSYECDIPIGAGICASYQTQTNSPRRARSVASQSIIAYTMSLGAENSVAYSNNSCAIPTNFTISVTTEILPVSMTKTSVDCTMYICGDSTECSNLLLQYGSFCTQLNRALTGIAVEQDKNTQEVFAQVKQIYKTPPIKDFGGFNFSQILPDPSKPSKRSFIEDLLFNKVTLADAGFIKQYGDCLGDIAARDLICAQKFNGLTVLPPLLTDEMIAQYTSALLAGTITSGWTFGAGAALQIPFAMQMAYRFNGIGVTQNVLYENQKLIANQFNSAIGKIQDSLSSTASALGKLQDVVNQNAQALNTLVKQLSSNFGAISSVLNDILSRLDKVEAEVQIDRLITGRLQSLQTYVTQQLIRAAEIRASANLAATKMSECVLGQSKRVDFCGKGYHLMSFPQSAPHGVVFLHVTYVPAQEKNFTCAPAICHDGKAHFPREGVFVSNGTHWFVTQRNFYEPQIITTDNTFVSGNCDVVIGIVNNTVYDPLQPELDSFKEELDKYFKNHTSPDVDLGDISGINASVVNIQKEIDRLNEVAKNLNESLIDLQELGKYEQYIKGGGGSDIIKLLNEQVNKEMQSSNLYMSMSSWCYTHSLDGAGLFLFDHAAEEYEHAKKLIIFLNENNVPVQLTSISAPEHKFEGLTQIFQKAYEHEQHISESINNIVDHAIKSKDHATFNFLQWYVAEQHEEEVLFKDILDKIELIGNENHGLYLADQYVKGIAKSRKS

SEQ ID NO: 4970 - protein, 1379 aa, Artificial Sequence
  SARS-CoV-2/France/IDF0372/2020__EPI_ISL_406596 spike protein (1-1211)(I712C_T1077C) Ferritin construct
MFVFLVLLPLVSSQCVNLTTRTQLPPAYTNSFTRGVYYPDKVFRSSVLHSTQDLFLPFFSNVTWFHAIHVSGTNGTKRFDNPVLPFNDGVYFASTEKSNIIRGWIFGTTLDSKTQSLLIVNNATNVVIKVCEFQFCNDPFLGVYYHKNNKSWMESEFRVYSSANNCTFEYVSQPFLMDLEGKQGNFKNLREFVFKNIDGYFKIYSKHTPINLVRDLPQGFSALEPLVDLPIGINITRFQTLLALHRSYLTPGDSSSGWTAGAAAYYVGYLQPRTFLLKYNENGTITDAVDCALDPLSETKCTLKSFTVEKGIYQTSNFRVQPTESIVRFPNITNLCPFGEVFNATRFASVYAWNRKRISNCVADYSFLYNSASFSTFKCYGVSPTKLNDLCFTNVYADSFVIRGDEVRQIAPGQTGKIADYNYKLPDDFTGCVIAWNSNNLDSKVGGNYNYLYRLFRKSNLKPFERDISTEIYQAGSTPCNGVEGFNCYFPLQSYGFQPTNGVGYQPYRVVVLSFELLHAPATVCGPKKSTNLVKNKCVNFNFNGLTGTGVLTESNKKFLPFQQFGRDIADTTDAVRDPQTLEILDITPCSFGGVSVITPGTNTSNQVAVLYQDVNCTEVPVAIHADQLTPTWRVYSTGSNVFQTRAGCLIGAEHVNNSYECDIPIGAGICASYQTQTNSPRRARSVASQSIIAYTMSLGAENSVAYSNNSCAIPTNFTISVTTEILPVSMTKTSVDCTMYICGDSTECSNLLLQYGSFCTQLNRALTGIAVEQDKNTQEVFAQVKQIYKTPPIKDFGGFNFSQILPDPSKPSKRSFIEDLLFNKVTLADAGFIKQYGDCLGDIAARDLICAQKFNGLTVLPPLLTDEMIAQYTSALLAGTITSGWTFGAGAALQIPFAMQMAYRFNGIGVTQNVLYENQKLIANQFNSAIGKIQDSLSSTASALGKLQDVVNQNAQALNTLVKQLSSNFGAISSVLNDILSRLDKVEAEVQIDRLITGRLQSLQTYVTQQLIRAAEIRASANLAATKMSECVLGQSKRVDFCGKGYHLMSFPQSAPHGVVFLHVTYVPAQEKNFTCAPAICHDGKAHFPREGVFVSNGTHWFVTQRNFYEPQIITTDNTFVSGNCDVVIGIVNNTVYDPLQPELDSFKEELDKYFKNHTSPDVDLGDISGINASVVNIQKEIDRLNEVAKNLNESLIDLQELGKYEQYIKGGGGSDIIKLLNEQVNKEMQSSNLYMSMSSWCYTHSLDGAGLFLFDHAAEEYEHAKKLIIFLNENNVPVQLTSISAPEHKFEGLTQIFQKAYEHEQHISESINNIVDHAIKSKDHATFNFLQWYVAEQHEEEVLFKDILDKIELIGNENHGLYLADQYVKGIAKSRKS

SEQ ID NO: 4971 - protein, 1379 aa, Artificial Sequence
  SARS-CoV-2/Australia/VIC01/2020__EPI_ISL_406844 spike protein (1-1211)(I712C_T1077C) Ferritin construct
MFVFLVLLPLVSSQCVNLTTRTQLPPAYTNSFTRGVYYPDKVFRSSVLHSTQDLFLPFFSNVTWFHAIHVSGTNGTKRFDNPVLPFNDGVYFASTEKSNIIRGWIFGTTLDSKTQSLLIVNNATNVVIKVCEFQFCNDPFLGVYYHKNNKSWMESEFRVYSSANNCTFEYVSQPFLMDLEGKQGNFKNLREFVFKNIDGYFKIYSKHTPINLVRDLPQGFSALEPLVDLPIGINITRFQTLLALHRRYLTPGDSSSGWTAGAAAYYVGYLQPRTFLLKYNENGTITDAVDCALDPLSETKCTLKSFTVEKGIYQTSNFRVQPTESIVRFPNITNLCPFGEVFNATRFASVYAWNRKRISNCVADYSVLYNSASFSTFKCYGVSPTKLNDLCFTNVYADSFVIRGDEVRQIAPGQTGKIADYNYKLPDDFTGCVIAWNSNNLDSKVGGNYNYLYRLFRKSNLKPFERDISTEIYQAGSTPCNGVEGFNCYFPLQSYGFQPTNGVGYQPYRVVVLSFELLHAPATVCGPKKSTNLVKNKCVNFNFNGLTGTGVLTESNKKFLPFQQFGRDIADTTDAVRDPQTLEILDITPCSFGGVSVITPGTNTSNQVAVLYQDVNCTEVPVAIHADQLTPTWRVYSTGSNVFQTRAGCLIGAEHVNNSYECDIPIGAGICASYQTQTNSPRRARSVASQSIIAYTMSLGAENSVAYSNNSCAIPTNFTISVTTEILPVSMTKTSVDCTMYICGDSTECSNLLLQYGSFCTQLNRALTGIAVEQDKNTQEVFAQVKQIYKTPPIKDFGGFNFSQILPDPSKPSKRSFIEDLLFNKVTLADAGFIKQYGDCLGDIAARDLICAQKFNGLTVLPPLLTDEMIAQYTSALLAGTITSGWTFGAGAALQIPFAMQMAYRFNGIGVTQNVLYENQKLIANQFNSAIGKIQDSLSSTASALGKLQDVVNQNAQALNTLVKQLSSNFGAISSVLNDILSRLDKVEAEVQIDRLITGRLQSLQTYVTQQLIRAAEIRASANLAATKMSECVLGQSKRVDFCGKGYHLMSFPQSAPHGVVFLHVTYVPAQEKNFTCAPAICHDGKAHFPREGVFVSNGTHWFVTQRNFYEPQIITTDNTFVSGNCDVVIGIVNNTVYDPLQPELDSFKEELDKYFKNHTSPDVDLGDISGINASVVNIQKEIDRLNEVAKNLNESLIDLQELGKYEQYIKGGGGSDIIKLLNEQVNKEMQSSNLYMSMSSWCYTHSLDGAGLFLFDHAAEEYEHAKKLIIFLNENNVPVQLTSISAPEHKFEGLTQIFQKAYEHEQHISESINNIVDHAIKSKDHATFNFLQWYVAEQHEEEVLFKDILDKIELIGNENHGLYLADQYVKGIAKSRKS

SEQ ID NO: 4972 - protein, 1379 aa, Artificial Sequence
  SARS-CoV-2/Germany/BavPat1/2020__EPI_ISL_406862 spike protein (1-1211)(I712C_T1077C) Ferritin construct
MFVFLVLLPLVSSQCVNLTTRTQLPPAYTNSFTRGVYYPDKVFRSSVLHSTQDLFLPFFSNVTWFHAIHVSGTNGTKRFDNPVLPFNDGVYFASTEKSNIIRGWIFGTTLDSKTQSLLIVNNATNVVIKVCEFQFCNDPFLGVYYHKNNKSWMESEFRVYSSANNCTFEYVSQPFLMDLEGKQGNFKNLREFVFKNIDGYFKIYSKHTPINLVRDLPQGFSALEPLVDLPIGINITRFQTLLALHRSYLTPGDSSSGWTAGAAAYYVGYLQPRTFLLKYNENGTITDAVDCALDPLSETKCTLKSFTVEKGIYQTSNFRVQPTESIVRFPNITNLCPFGEVFNATRFASVYAWNRKRISNCVADYSVLYNSASFSTFKCYGVSPTKLNDLCFTNVYADSFVIRGDEVRQIAPGQTGKIADYNYKLPDDFTGCVIAWNSNNLDSKVGGNYNYLYRLFRKSNLKPFERDISTEIYQAGSTPCNGVEGFNCYFPLQSYGFQPTNGVGYQPYRVVVLSFELLHAPATVCGPKKSTNLVKNKCVNFNFNGLTGTGVLTESNKKFLPFQQFGRDIADTTDAVRDPQTLEILDITPCSFGGVSVITPGTNTSNQVAVLYQGVNCTEVPVAIHADQLTPTWRVYSTGSNVFQTRAGCLIGAEHVNNSYECDIPIGAGICASYQTQTNSPRRARSVASQSIIAYTMSLGAENSVAYSNNSCAIPTNFTISVTTEILPVSMTKTSVDCTMYICGDSTECSNLLLQYGSFCTQLNRALTGIAVEQDKNTQEVFAQVKQIYKTPPIKDFGGFNFSQILPDPSKPSKRSFIEDLLFNKVTLADAGFIKQYGDCLGDIAARDLICAQKFNGLTVLPPLLTDEMIAQYTSALLAGTITSGWTFGAGAALQIPFAMQMAYRFNGIGVTQNVLYENQKLIANQFNSAIGKIQDSLSSTASALGKLQDVVNQNAQALNTLVKQLSSNFGAISSVLNDILSRLDKVEAEVQIDRLITGRLQSLQTYVTQQLIRAAEIRASANLAATKMSECVLGQSKRVDFCGKGYHLMSFPQSAPHGVVFLHVTYVPAQEKNFTCAPAICHDGKAHFPREGVFVSNGTHWFVTQRNFYEPQIITTDNTFVSGNCDVVIGIVNNTVYDPLQPELDSFKEELDKYFKNHTSPDVDLGDISGINASVVNIQKEIDRLNEVAKNLNESLIDLQELGKYEQYIKGGGGSDIIKLLNEQVNKEMQSSNLYMSMSSWCYTHSLDGAGLFLFDHAAEEYEHAKKLIIFLNENNVPVQLTSISAPEHKFEGLTQIFQKAYEHEQHISESINNIVDHAIKSKDHATFNFLQWYVAEQHEEEVLFKDILDKIELIGNENHGLYLADQYVKGIAKSRKS

SEQ ID NO: 4973 - protein, 1379 aa, Artificial Sequence
  SARS-CoV-2/Wuhan/HBCDC-HB-02/2020__EPI_ISL_412978 spike protein (1-1211)(I712C_T1077C) Ferritin construct
MFVFLVLLPLVSSQCVNLTTRTQLPPAYTNSFTRGVYYPDKVFRSSVLHSTQDLFLPFFSNVTWFHAIHVSGTNGTKRFDNPVLPFNDGVYFASTEKSNIIRGWIFGTTLDSKTQSLLIVNNATNVVIKVCEFQFCNDPFLGVYYHKNNKSWMESEFRVYSSANNCTFEYVSQPFLMDLEGKQGNFKNLREFVFKNIDGYFKIYSKHTPINLVRDLPQGFSALEPLVDLPIGINITRFQTLLALHRSYLTPGDSSSGWTAGAAAYYVGYLQPRTFLLKYNENGTITDAVDCALDPLSETKCTLKSFTVEKGIYQTSNFRVQPTESIVRFPNITNLCPFGEVFNATRFASVYAWNRKRISNCVADYSVLYNSASFSTFKCYGVSPTKLNDLCFTNVYADSFVIRGDEVRQIAPGQTGKIADYNYKLPDDFTGCVIAWNSNNLDSKVGGNYNYLYRLFRKSNLKPFERDISTEIYQAGSTPCNGVEGFNCYFPLQSYGFQPTNGVGYQPYRVVVLSFELLHAPATVCGPKKSTNLVKNKCVNFNFNGLTGTGVLTESNKKFLPFQQFGRDIADTTDAVRDPQTLEILDITPCSFGGVSVITPGTNTSNQVAVLYQDVNCTEVPVAIHADQLTPTWRVYSTGSNVFQTRAGCLIGAEHVNNSYECDIPIGAGICASYQTQTNSPRRARSVASQSIIAYTMSLGAENSVAYSNNSCAIPTNFTISVTTEILPVSMTKTSVDCTMYICGDSTECSNFLLQYGSFCTQLNRALTGIAVEQDKNTQEVFAQVKQIYKTPPIKDFGGFNFSQILPDPSKPSKRSFIEDLLFNKVTLADAGFIKQYGDCLGDIAARDLICAQKFNGLTVLPPLLTDEMIAQYTSALLAGTITSGWTFGAGAALQIPFAMQMAYRFNGIGVTQNVLYENQKLIANQFNSAIGKIQDSLSSTASALGKLQDVVNQNAQALNTLVKQLSSNFGAISSVLNDILSRLDKVEAEVQIDRLITGRLQSLQTYVTQQLIRAAEIRASANLAATKMSECVLGQSKRVDFCGKGYHLMSFPQSAPHGVVFLHVTYVPAQEKNFTCAPAICHDGKAHFPREGVFVSNGTHWFVTQRNFYEPQIITTDNTFVSGNCDVVIGIVNNTVYDPLQPELDSFKEELDKYFKNHTSPDVDLGDISGINASVVNIQKEIDRLNEVAKNLNESLIDLQELGKYEQYIKGGGGSDIIKLLNEQVNKEMQSSNLYMSMSSWCYTHSLDGAGLFLFDHAAEEYEHAKKLIIFLNENNVPVQLTSISAPEHKFEGLTQIFQKAYEHEQHISESINNIVDHAIKSKDHATFNFLQWYVAEQHEEEVLFKDILDKIELIGNENHGLYLADQYVKGIAKSRKS

SEQ ID NO: 4974 - protein, 1379 aa, Artificial Sequence
  SARS-CoV-2/Australia/QLD02/2020__EPI_ISL_407896 spike protein (1-1211)(I712C_T1077C) Ferritin construct
MFVFLVLLPLVSSQCVNLTTRTQLPPAYTNSFTRGVYYPDKVFRSSVLHSTQDLFLPFFSNVTWFHAIHVSGTNGTKRFDNPVLPFNDGVYFASTEKSNIIRGWIFGTTLDSKTQSLLIVNNATNVVIKVCEFQFCNDPFLGVYYHKNNKSWMESEFRVYSSANNCTFEYVSQPFLMDLEGKQGNFKNLREFVFKNIDGYFKIYSKHTPINLVRDLPQGFSALEPLVDLPIGINITRFQTLLALHRSYLTPGDSSSGWTAGAAAYYVGYLQPRTFLLKYNENGTITDAVDCALDPLSETKCTLKSFTVEKGIYQTSNFRVQPTESIVRFPNITNLCPFGEVFNATRFASVYAWNRKRISNCVADYSVLYNSASFSTFKCYGVSPTKLNDLCFTNVYADSFVIRGDEVRQIAPGQTGKIADYNYKLPDDFTGCVIAWNSNNLDSKVGGNYNYLYRLFRKSNLKPFERDISTEIYQAGSTPCNGVEGFNCYFPLQSYGFQPTNGVGYQPYRVVVLSFELLHAPATVCGPKKSTNLVKNKCVNFNFNGLTGTGVLTESNKKFLPFQQFGRDIADTTDAVRDPQTLEILDITPCSFGGVSVITPGTNTSNQVAVLYQDVNCTEVPVAIHADQLTPTWRVYSTGSNVFQTRAGCLIGAEHVNNSYECDIPIGAGICASYQTQTNSPRRARSVASQSIIAYTMSLGAENSVAYSNNSCAIPTNFTISVTTEILPVSMTKTSVDCTMYICGDSTECSNLLLQYGSFCTQLNRALTGIAVEQDKNTQEVFAQVKQIYKTPPIKDFGGFNFSQILPDPSKPSKRSFIEDLLFNKVTLADAGFIKQYGDCLGDIAARDLICAQKFNGLTVLPPLLTDEMIAQYTSALLAGTITSGWTFGAGAALQIPFAMQMAYRFNGIGVTQNVLYENQKLIANQFNSAIGKIQDSLSSTASALGKLQDVVNQNAQALNTLVKQLSSNFGAISSVLNDILSRLDKVEAEVQIDRLITGRLQSLQTYVTQQLIRAAEIRASANLAATKMSECVLGQSKRVDFCGKGYHLMSFPQSAPHGVVFLHVTYVPAQEKNFTCAPAICHDGKAHFPREGVFVSNGTHWFVTQRNFYEPQIITTDNTFVSGNCDVVIGIVNNTVYDPLQLELDSFKEELDKYFKNHTSPDVDLGDISGINASVVNIQKEIDRLNEVAKNLNESLIDLQELGKYEQYIKGGGGSDIIKLLNEQVNKEMQSSNLYMSMSSWCYTHSLDGAGLFLFDHAAEEYEHAKKLIIFLNENNVPVQLTSISAPEHKFEGLTQIFQKAYEHEQHISESINNIVDHAIKSKDHATFNFLQWYVAEQHEEEVLFKDILDKIELIGNENHGLYLADQYVKGIAKSRKS

SEQ ID NO: 4975 - protein, 1379 aa, Artificial Sequence
  SARS-CoV-2/India/1-31/2020__EPI_ISL_413523 spike protein (1-1211)(I712C_T1077C) Ferritin construct
MFVFLVLLPLVSSQCVNLTTRTQLPPAYTNSFTRGVYYPDKVFRSSVLHSTQDLFLPFFSNVTWFHAIHVSGTNGTKRFDNPVLPFNDGVYFASTEKSNIIRGWIFGTTLDSKTQSLLIVNNATNVVIKVCEFQFCNDPFLGVYYHKNNKSWMESEFRVYSSANNCTFEYVSQPFLMDLEGKQGNFKNLREFVFKNIDGYFKIYSKHTPINLVRDLPQGFSALEPLVDLPIGINITRFQTLLALHRSYLTPGDSSSGWTAGAAAYYVGYLQPRTFLLKYNENGTITDAVDCALDPLSETKCTLKSFTVEKGIYQTSNFRVQPTESIVRFPNITNLCPFGEVFNATRFASVYAWNRKRISNCVADYSVLYNSASFSTFKCYGVSPTKLNDLCFTNVYADSFVIRGDEVRQIAPGQTGKIADYNYKLPDDFTGCVIAWNSNNLDSKVGGNYNYLYRLFRKSNLKPFERDISTEIYQAGSTPCNGVEGFNCYFPLQSYGFQPTNGVGYQPYRVVVLSFELLHAPATVCGPKKSTNLVKNKCVNFNFNGLTGTGVLTESNKKFLPFQQFGRDIADTTDAVRDPQTLEILDITPCSFGGVSVITPGTNTSNQVAVLYQDVNCTEVPVAIHADQLTPTWRVYSTGSNVFQTRAGCLIGAEHVNNSYECDIPIGAGICASYQTQTNSPRRARSVASQSIIAYTMSLGAENSVAYSNNSCAIPTNFTISVTTEILPVSMTKTSVDCTMYICGDSTECSNLLLQYGSFCTQLNRALTGIAVEQDKNTQEVFAQVKQIYKTPPIKDFGGFNFSQILPDPSKPSKRSFIEDLLFNKVTLADAGFIKQYGDCLGDIAARDLICAQKFNGLTVLPPLLTDEMIAQYTSALLAGTITSGWTFGAGAALQIPFAMQMAYRFNGIGVTQNVLYENQKLIANQFNSVIGKIQDSLSSTASALGKLQDVVNQNAQALNTLVKQLSSNFGAISSVLNDILSRLDKVEAEVQIDRLITGRLQSLQTYVTQQLIRAAEIRASANLAATKMSECVLGQSKRVDFCGKGYHLMSFPQSAPHGVVFLHVTYVPAQEKNFTCAPAICHDGKAHFPREGVFVSNGTHWFVTQRNFYEPQIITTDNTFVSGNCDVVIGIVNNTVYDPLQPELDSFKEELDKYFKNHTSPDVDLGDISGINASVVNIQKEIDRLNEVAKNLNESLIDLQELGKYEQYIKGGGGSDIIKLLNEQVNKEMQSSNLYMSMSSWCYTHSLDGAGLFLFDHAAEEYEHAKKLIIFLNENNVPVQLTSISAPEHKFEGLTQIFQKAYEHEQHISESINNIVDHAIKSKDHATFNFLQWYVAEQHEEEVLFKDILDKIELIGNENHGLYLADQYVKGIAKSRKS

SEQ ID NO: 4976 - protein, 1379 aa, Artificial Sequence
  SARS-CoV-2/Guangdong/GD2020087-P0008/2020__EPI_ISL_413863 spike protein (1-1211)(I712C_T1077C) Ferritin construct
MFVFLVLLPLVSSQCVNLTTRTQLPPAYTNSFTRGVYYPDKVFRSSVLHSTQDLFLPFFSNVTWFHAIHVSGTNGTKRFDNPVLPFNDGVYFASTEKSNIIRGWIFGTTLDSKTQSLLIVNNATNVVIKVCEFQFCNDPFLGVYYHKNNKSWMESEFRVYSSANNCTFEYVSQPFLMDLEGKQGNFKNLREFVFKNIDGYFKIYSKHTPINLVRDLPQGFSALEPLVDLPIGINITRFQTLLALHRSYLTPGDSSSGWTAGAAAYYVGYLQPRTFLLKYNENGTITDAVDCALDPLSETKCTLKSFTVEKGIYQTSNFRVQPTESIVRFPNITNLCPFGEVFNATRFASVYAWNRKRISNCVADYSVLYNSASFSTFKCYGVSPTKLNDLCFTNVYADSFVIRGDEVREIAPGQTGKIADYNYKLPDDFTGCVIAWNSNNLDSKVGGNYNYLYRLFRKSNLKPFERDISTEIYQAGSTPCNGVEGFNCYFPLQSYGFQPTNGVGYQPYRVVVLSFELLHAPATVCGPKKSTNLVKNKCVNFNFNGLTGTGVLTESNKKFLPFQQFGRDIADTTDAVRDPQTLEILDITPCSFGGVSVITPGTNTSNQVAVLYQDVNCTEVPVAIHADQLTPTWRVYSTGSNVFQTRAGCLIGAEHVNNSYECDIPIGAGICASYQTQTNSPRRARSVASQSIIAYTMSLGAENSVAYSNNSCAIPTNFTISVTTEILPVSMTKTSVDCTMYICGDSTECSNLLLQYGSFCTQLNRALTGIAVEQDKNTQEVFAQVKQIYKTPPIKDFGGFNFSQILPDPSKPSKRSFIEDLLFNKVTLADAGFIKQYGDCLGDIAARDLICAQKFNGLTVLPPLLTDEMIAQYTSALLAGTITSGWTFGAGAALQIPFAMQMAYRFNGIGVTQNVLYENQKLIANQFNSAIGKIQDSLSSTASALGKLQDVVNQNAQALNTLVKQLSSNFGAISSVLNDILSRLDKVEAEVQIDRLITGRLQSLQTYVTQQLIRAAEIRASANLAATKMSECVLGQSKRVDFCGKGYHLMSFPQSAPHGVVFLHVTYVPAQEKNFTCAPAICHDGKAHFPREGVFVSNGTHWFVTQRNFYEPQIITTDNTFVSGNCDVVIGIVNNTVYDPLQPELDSFKEELDKYFKNHTSPDVDLGDISGINASVVNIQKEIDRLNEVAKNLNESLIDLQELGKYEQYIKGGGGSDIIKLLNEQVNKEMQSSNLYMSMSSWCYTHSLDGAGLFLFDHAAEEYEHAKKLIIFLNENNVPVQLTSISAPEHKFEGLTQIFQKAYEHEQHISESINNIVDHAIKSKDHATFNFLQWYVAEQHEEEVLFKDILDKIELIGNENHGLYLADQYVKGIAKSRKS

SEQ ID NO: 4977 - protein, 1379 aa, Artificial Sequence
  SARS-CoV-2/Sweden/01/2020__EPI_ISL_411951 spike protein (1-1211)(I712C_T1077C) Ferritin construct
MFVFLVLLPLVSSQCVNLTTRTQLPPAYTNSFTRGVYYPDKVFRSSVLHSTQDLFLPFFSNVTWFHAIHVSGTNGTKRFDNPVLPFNDGVYFASTEKSNIIRGWIFGTTLDSKTQSLLIVNNATNVVIKVCEFQFCNDPFLGVYYHKNNKSWMESEFRVYSSANNCTFEYVSQPFLMDLEGKQGNFKNLREFVFKNIDGYFKIYSKHTPINLVRDLPQGFSALEPLVDLPIGINITRFQTLLALHRSYLTPGDSSSGWTAGAAAYYVGYLQPRTFLLKYNENGTITDAVDCALDPLSETKCTLKSFTVEKGIYQTSNFRVQPTESIVRFPNITNLCPFGEVFNATRFASVYAWNRKRISNCVADYSVLYNSASFSTFKCYGVSPTKLNDLCFTNVYADSFVIRGDEVRQIAPGQTGKIADYNYKLPDDFTGCVIAWNSNNLDSKVGGNYNYLYRLFRKSNLKPFERDISTEIYQAGSTPCNGVEGFNCYFPLQSYGFQPTNGVGYQPYRVVVLSFELLHAPATVCGPKKSTNLVKNKCVNFNFNGLTGTGVLTESNKKFLPFQQFGRDIADTTDAVRDPQTLEILDITPCSFGGVSVITPGTNTSNQVAVLYQDVNCTEVPVAIHADQLTPTWRVYSTGSNVFQTRAGCLIGAEHVNNSYECDIPIGAGICASYQTQTNSPRRARSVASQSIIAYTMSLGAENSVAYSNNSCAIPTNFTISVTTEILPVSMTKTSVDCTMYICGDSTECSNLLLQYGSFCTQLNRALTGIAVEQDKNTQEVFAQVKQIYKTPPIKDCGGFNFSQILPDPSKPSKRSFIEDLLFNKVTLADAGFIKQYGDCLGDIAARDLICAQKFNGLTVLPPLLTDEMIAQYTSALLAGTITSGWTFGAGAALQIPFAMQMAYRFNGIGVTQNVLYENQKLIANQFNSAIGKIQDSLSSTASALGKLQDVVNQNAQALNTLVKQLSSNFGAISSVLNDILSRLDKVEAEVQIDRLITGRLQSLQTYVTQQLIRAAEIRASANLAATKMSECVLGQSKRVDFCGKGYHLMSFPQSAPHGVVFLHVTYVPAQEKNFTCAPAICHDGKAHFPREGVFVSNGTHWFVTQRNFYEPQIITTDNTFVSGNCDVVIGIVNNTVYDPLQPELDSFKEELDKYFKNHTSPDVDLGDISGINASVVNIQKEIDRLNEVAKNLNESLIDLQELGKYEQYIKGGGGSDIIKLLNEQVNKEMQSSNLYMSMSSWCYTHSLDGAGLFLFDHAAEEYEHAKKLIIFLNENNVPVQLTSISAPEHKFEGLTQIFQKAYEHEQHISESINNIVDHAIKSKDHATFNFLQWYVAEQHEEEVLFKDILDKIELIGNENHGLYLADQYVKGIAKSRKS

SEQ ID NO: 4978 - protein, 1379 aa, Artificial Sequence
  SARS-CoV-2/Tianmen/HBCDC-HB-07/2020__EPI_ISL_412983 spike protein (1-1211)(I712C_T1077C) Ferritin construct
MFVFLVLLPLVSSQCVNLTTRTQLPPAYTNSFTRGVYYPDKVFRSSVLHSTQDLFLPFFSNVTWFHAIHVSGTNGTKRFDNPVLPFNDGVYFASTEKSNIIRGWIFGTTLDSKTQSLLIVNNATNVVIKVCEFQFCNDPFLGVYYHKNNKSWMESEFRVYSSANNCTFEYVSQPFLMDLEGKQGNFKNLREFVFKNIDGYFKIYSKHTPINLVRDLPQGFSALEPLVDLPIGINITRFQTLLALHRSYLTPGDSSSGWTAGAAAYYVGYLQPRTFLLKYNENGTITDAVDCALDPLSETKCTLKSFTVEKGIYQTSNFRVQPTESIVRFPNITNLCPFGEVFNATRFASVYAWNRKRISNCVADYSVLYNSASFSTFKCYGVSPTKLNDLCFTNVYADSFVIRGDEVRQIAPGQTGKIADYNYKLPDDFTGCVIAWNSNNLDSKVGGNYNYLYRLFRKSNLKPFERDISTEIYQAGSTPCNGVEGFNCYFPLQSYGFQPTNGVGYQPYRVVVLSFELLHAPATVCGPKKSTNLVKNKCVNFNFNGLTGTGVLTESNKKFLPFQQFGRDIADTTDAVRDPQTLEILDITPCSFGGVSVITPGTNTSNQVAVLYQDLNCTEVPVAIHADQLTPTWRVYSTGSNVFQTRAGCLIGAEHVNNSYECDIPIGAGICASYQTQTNSPRRARSVASQSIIAYTMSLGAENSVAYSNNSCAIPTNFTISVTTEILPVSMTKTSVDCTMYICGDSTECSNLLLQYGSFCTQLNRALTGIAVEQDKNTQEVFAQVKQIYKTPPIKDFGGFNFSQILPDPSKPSKRSFIEDLLFNKVTLADAGFIKQYGDCLGDIAARDLICAQKFNGLTVLPPLLTDEMIAQYTSALLAGTITSGWTFGAGAALQIPFAMQMAYRFNGIGVTQNVLYENQKLIANQFNSAIGKIQDSLSSTASALGKLQDVVNQNAQALNTLVKQLSSNFGAISSVLNDILSRLDKVEAEVQIDRLITGRLQSLQTYVTQQLIRAAEIRASANLAATKMSECVLGQSKRVDFCGKGYHLMSFPQSAPHGVVFLHVTYVPAQEKNFTCAPAICHDGKAHFPREGVFVSNGTHWFVTQRNFYEPQIITTDNTFVSGNCDVVIGIVNNTVYDPLQPELDSFKEELDKYFKNHTSPDVDLGDISGINASVVNIQKEIDRLNEVAKNLNESLIDLQELGKYEQYIKGGGGSDIIKLLNEQVNKEMQSSNLYMSMSSWCYTHSLDGAGLFLFDHAAEEYEHAKKLIIFLNENNVPVQLTSISAPEHKFEGLTQIFQKAYEHEQHISESINNIVDHAIKSKDHATFNFLQWYVAEQHEEEVLFKDILDKIELIGNENHGLYLADQYVKGIAKSRKS

SEQ ID NO: 4979 - protein, 1379 aa, Artificial Sequence
  SARS-CoV-2/Hong Kong/case42_VM20002493/2020__EPI_ISL_414527 spike protein (1-1211)(I712C_T1077C) Ferritin construct
MFVFLVLLPLVSSQCVNLTTRTQLPPAYTNSFTRGVYYPDKVFRSSVLHSTQDLFLPFFSNVTWFHAIHVSGTNGTKRFDNPVLPFNDGVYFASTEKSNIIRGWIFGTTLDSKTQSLLIVNNATNVVIKVCEFQFCNDPFLGVYYHKNNKSWMESEFRVYSSANNCTFEYVSQPFLMDLEGKQGNFKNLREFVFKNIDGYFKIYSKHTPINLVRDLPQGFSALEPLVDLPIGINITRFQTLLALHRSYLTPGDSSSGWTAGAAAYYVGYLQPRTFLLKYNENGTITDAVDCALDPLSETKCTLKSFTVEKGIYQTSNFRVQPTESIVRFPNITNLCPFGEVFNATRFASVYAWNRKRISNCVADYSVLYNSASFSTFKCYGVSPTKLNDLCFTNVYADSFVIRGDEVRQIAPGQTGKIADYNYKLPDDFTGCVIAWNSNNLDSKVGGNYNYLYRLFRKSNLKPFERDISTEIYQAGSTPCNGVEGFNCYFPLQSYGFQPTNGVGYQPYRVVVLSFELLHAPATVCGPKKSTNLVKNKCVNFNFNGLTGTGVLTESNKKFLPFQQFGRDIADTTDAVRDPQTLEILDITPCSFGGVSVITPGTNTSNQVAVLYQDVNCTEVPVAIHADQLTPTWRVYSTGSNVFQTRAGCLIGAEHVNNSYECDIPIGAGICASYQTQTNSPRRARSVASQSIIAYTMSLGAENSVAYSNNSCAIPTNFAISVTTEILPVSMTKTSVDCTMYICGDSTECSNLLLQYGSFCTQLNRALTGIAVEQDKNTQEVFAQVKQIYKTPPIKDFGGFNFSQILPDPSKPSKRSFIEDLLFNKVTLADAGFIKQYGDCLGDIAARDLICAQKFNGLTVLPPLLTDEMIAQYTSALLAGTITSGWTFGAGAALQIPFAMQMAYRFNGIGVTQNVLYENQKLIANQFNSAIGKIQDSLSSTASALGKLQDVVNQNAQALNTLVKQLSSNFGAISSVLNDILSRLDKVEAEVQIDRLITGRLQSLQTYVTQQLIRAAEIRASANLAATKMSECVLGQSKRVDFCGKGYHLMSFPQSAPHGVVFLHVTYVPAQEKNFTCAPAICHDGKAHFPREGVFVSNGTHWFVTQRNFYEPQIITTDNTFVSGNCDVVIGIVNNTVYDPLQPELDSFKEELDKYFKNHTSPDVDLGDISGINASVVNIQKEIDRLNEVAKNLNESLIDLQELGKYEQYIKGGGGSDIIKLLNEQVNKEMQSSNLYMSMSSWCYTHSLDGAGLFLFDHAAEEYEHAKKLIIFLNENNVPVQLTSISAPEHKFEGLTQIFQKAYEHEQHISESINNIVDHAIKSKDHATFNFLQWYVAEQHEEEVLFKDILDKIELIGNENHGLYLADQYVKGIAKSRKS

SEQ ID NO: 4980 - protein, 1379 aa, Artificial Sequence
  SARS-CoV-2/USA/CruiseA-23/2020__EPI_ISL_414482 spike protein (1-1211)(I712C_T1077C) Ferritin construct
MFVFLVLLPLVSSQCVNLTTRTQLPPAYTNSFTRGVYYPDKVFRSSVLHSTQDLFLPFFSNVTWFHAIHVSGTNGTKRFDNPVLPFNDGVYFASTEKSNIIRGWIFGTTLDSKTQSLLIVNNATNVVIKVCEFQFCNDPFLGVYYHKNNKSWMESEFRVYSSANNCTFEYVSQPFLMDLEVKQGNFKNLREFVFKNIDGYFKIYSKHTPINLVRDLPQGFSALEPLVDLPIGINITRFQTLLALHRSYLTPGDSSSGWTAGAAAYYVGYLQPRTFLLKYNENGTITDAVDCALDPLSETKCTLKSFTVEKGIYQTSNFRVQPTESIVRFPNITNLCPFGEVFNATRFASVYAWNRKRISNCVADYSVLYNSASFSTFKCYGVSPTKLNDLCFTNVYADSFVIRGDEVRQIAPGQTGKIADYNYKLPDDFTGCVIAWNSNNLDSKVGGNYNYLYRLFRKSNLKPFERDISTEIYQAGSTPCNGVEGFNCYFPLQSYGFQPTNGVGYQPYRVVVLSFELLHAPATVCGPKKSTNLVKNKCVNFNFNGLTGTGVLTESNKKFLPFQQFGRDIADTTDAVRDPQTLEILDITPCSFGGVSVITPGTNTSNQVAVLYQDVNCTEVPVAIHADQLTPTWRVYSTGSNVFQTRAGCLIGAEHVNNSYECDIPIGAGICASYQTQTNSPRRARSVASQSIIAYTMSLGAENSVAYSNNSCAIPTNFTISVTTEILPVSMTKTSVDCTMYICGDSTECSNLLLQYGSFCTQLNRALTGIAVEQDKNTQEVFAQVKQIYKTPPIKDFGGFNFSQILPDPSKPSKRSFIEDLLFNKVTLADAGFIKQYGDCLGDIAARDLICAQKFNGLTVLPPLLTDEMIAQYTSALLAGTITSGWTFGAGAALQIPFAMQMAYRFNGIGVTQNVLYENQKLIANQFNSAIGKIQDSLSSTASALGKLQDVVNQNAQALNTLVKQLSSNFGAISSVLNDILSRLDKVEAEVQIDRLITGRLQSLQTYVTQQLIRAAEIRASANLAATKMSECVLGQSKRVDFCGKGYHLMSFPQSAPHGVVFLHVTYVPAQEKNFTCAPAICHDGKAHFPREGVFVSNGTHWFVTQRNFYEPQIITTDNTFVSGNCDVVIGIVNNTVYDPLQPELDSFKEELDKYFKNHTSPDVDLGDISGINASVVNIQKEIDRLNEVAKNLNESLIDLQELGKYEQYIKGGGGSDIIKLLNEQVNKEMQSSNLYMSMSSWCYTHSLDGAGLFLFDHAAEEYEHAKKLIIFLNENNVPVQLTSISAPEHKFEGLTQIFQKAYEHEQHISESINNIVDHAIKSKDHATFNFLQWYVAEQHEEEVLFKDILDKIELIGNENHGLYLADQYVKGIAKSRKS

SEQ ID NO: 4981 - protein, 1379 aa, Artificial Sequence
  SARS-CoV-2/Hong Kong/case85_VM20002868/2020__EPI_ISL_414519 spike protein (1-1211)(I712C_T1077C) Ferritin construct
MFVFLVLVPLVSSQCVNLTTRTQLPPAYTNSFTRGVYYPDKVFRSSVLHSTQDLFLPFFSNVTWFHAIHVSGTNGTKRFDNPVLPFNDGVYFASTEKSNIIRGWIFGTTLDSKTQSLLIVNNATNVVIKVCEFQFCNDPFLGVYYHKNNKSWMESEFRVYSSANNCTFEYVSQPFLMDLEGKQGNFKNLREFVFKNIDGYFKIYSKHTPINLVRDLPQGFSALEPLVDLPIGINITRFQTLLALHRSYLTPGDSSSGWTAGAAAYYVGYLQPRTFLLKYNENGTITDAVDCALDPLSETKCTLKSFTVEKGIYQTSNFRVQPTESIVRFPNITNLCPFGEVFNATRFASVYAWNRKRISNCVADYSVLYNSASFSTFKCYGVSPTKLNDLCFTNVYADSFVIRGDEVRQIAPGQTGKIADYNYKLPDDFTGCVIAWNSNNLDSKVGGNYNYLYRLFRKSNLKPFERDISTEIYQAGSTPCNGVEGFNCYFPLQSYGFQPTNGVGYQPYRVVVLSFELLHAPATVCGPKKSTNLVKNKCVNFNFNGLTGTGVLTESNKKFLPFQQFGRDIADTTDAVRDPQTLEILDITPCSFGGVSVITPGTNTSNQVAVLYQDVNCTEVPVAIHADQLTPTWRVYSTGSNVFQTRAGCLIGAEHVNNSYECDIPIGAGICASYQTQTNSPRRARSVASQSIIAYTMSLGAENSVAYSNNSCAIPTNFTISVTTEILPVSMTKTSVDCTMYICGDSTECSNLLLQYGSFCTQLNRALTGIAVEQDKNTQEVFAQVKQIYKTPPIKDFGGFNFSQILPDPSKPSKRSFIEDLLFNKVTLADAGFIKQYGDCLGDIAARDLICAQKFNGLTVLPPLLTDEMIAQYTSALLAGTITSGWTFGAGAALQIPFAMQMAYRFNGIGVTQNVLYENQKLIANQFNSAIGKIQDSLSSTASALGKLQDVVNQNAQALNTLVKQLSSNFGAISSVLNDILSRLDKVEAEVQIDRLITGRLQSLQTYVTQQLIRAAEIRASANLAATKMSECVLGQSKRVDFCGKGYHLMSFPQSAPHGVVFLHVTYVPAQEKNFTCAPAICHDGKAHFPREGVFVSNGTHWFVTQRNFYEPQIITTDNTFVSGNCDVVIGIVNNTVYDPLQPELDSFKEELDKYFKNHTSPDVDLGDISGINASVVNIQKEIDRLNEVAKNLNESLIDLQELGKYEQYIKGGGGSDIIKLLNEQVNKEMQSSNLYMSMSSWCYTHSLDGAGLFLFDHAAEEYEHAKKLIIFLNENNVPVQLTSISAPEHKFEGLTQIFQKAYEHEQHISESINNIVDHAIKSKDHATFNFLQWYVAEQHEEEVLFKDILDKIELIGNENHGLYLADQYVKGIAKSRKS

SEQ ID NO: 4982 - protein, 1379 aa, Artificial Sequence; identical to SEQ ID NO: 4972
  SARS-CoV-2/England/200990660/2020__EPI_ISL_414523 spike protein (1-1211)(I712C_T1077C) Ferritin construct

SEQ ID NO: 4983 - protein, 1379 aa, Artificial Sequence
  SARS-CoV-2/Australia/NSW09/2020__EPI_ISL_413595 spike protein (1-1211)(I712C_T1077C) Ferritin construct
MFVFLVLLPLVSSQCVNLTTRTQLPPAYTNSFTRGVYYPDKVFRSSVLHSTQDLFLPFFSNVTWFHAIHVSGTNGTKRFDNPVLPFNDGVYFASTEKSNIIRGWIFGTTLDSKTQSLLIVNNATNVVIKVCEFQFCNDPFLGVYYHKNNKSWMESEFRVYSSANNCTFEYVSQPFLMDLEGKQGNFKNLREFVFKNIDGYFKIYSKHTPINLVRDLPQGFSALEPLVDLPIGINITRFQTLLALHRSYLTPGDSSSGWTAGAAAYYVGYLQPRTFLLKYNENGTITDAVDCALDPLSETKCTLKSFTVEKGIYQTSNFRVQPTESIVRFPNITNLCPFGEVFNATRFASVYAWNRKRISNCVADYSVLYNSASFSTFKCYGVSPTKLNDLCFTNVYADSFVIRGDEVRQIAPGQTGKIADYNYKLPDDFTGCVIAWNSNNLDSKVGGNYNYLYRLFRKSNLKPFERDISTEIYQAGSTPCNGVEGFNCYFPLQSYGFQPTNGVGYQPYRVVVLSFELLHAPATVCGPKKSTNLVKNKCVNFNFNGLTGTGVLTESNKKFLPFQQFGRDIADTTDAVRDPQTLEILDITPCSFGGVSVITPGTNTSNQVAVLYQDVNCTEVPVAIHADQLTPTWRVYSTGSNVFQTRAGCLIGAEHVNNSYECDIPIGAGICASYQTQTNSPRRARSVASQSIIAYTMSLGAENSVAYSNNSCAIPTNFTISVTTEILPVSMTKTSVDCTMYICGDSTECSNLLLQYGSFCTQLNRALTGIAVEQDKNTQEVFAQVKQIYKTPPIKDFGGFNFSQILPDPSKPSKRSFIEDLLFNKVTLADAGFIKQYGDCLGDIAARDLICAQKFNGLTVLPPLLTDEMIAQYTSALLAGTITSGWTFGAGAALQIPFAMQMAYRFNGIGVTQNVLYENQKLIANQFNSAIGKIQDSLSFTASALGKLQDVVNQNAQALNTLVKQLSSNFGAISSVLNDILSRLDKVEAEVQIDRLITGRLQSLQTYVTQQLIRAAEIRASANLAATKMSECVLGQSKRVDFCGKGYHLMSFPQSAPHGVVFLHVTYVPAQEKNFTCAPAICHDGKAHFPREGVFVSNGTHWFVTQRNFYEPQIITTDNTFVSGNCDVVIGIVNNTVYDPLQPELDSFKEELDKYFKNHTSPDVDLGDISGINASVVNIQKEIDRLNEVAKNLNESLIDLQELGKYEQYIKGGGGSDIIKLLNEQVNKEMQSSNLYMSMSSWCYTHSLDGAGLFLFDHAAEEYEHAKKLIIFLNENNVPVQLTSISAPEHKFEGLTQIFQKAYEHEQHISESINNIVDHAIKSKDHATFNFLQWYVAEQHEEEVLFKDILDKIELIGNENHGLYLADQYVKGIAKSRKS

SEQ ID NO: 4984 - protein, 1379 aa, Artificial Sequence; identical to SEQ ID NO: 4964
  SARS-CoV-2/Australia/NSW10/2020__EPI_ISL_413596 spike protein (1-1211)(I712C_T1077C) Ferritin construct

SEQ ID NO: 4985 - protein, 1379 aa, Artificial Sequence
  SARS-CoV-2/Switzerland/1000477797/2020__EPI_ISL_413023 spike protein (1-1211)(I712C_T1077C) Ferritin construct
MFVFLVLLPLVSSQCVNLTTRTQLPPAYTNSFTRGVYYPDKVFRSSVLHSTQDLFLPFFSNVTWFHAIHVSGTNGTKRFDNPVLPFNDGVYFASTEKSNIIRGWIFGTTLDSKTQSLLIVNNATNVVIKVCEFQFCNDPFLGVYYHKNNKSWMESEFRVYSSANNCTFEYVSQPFLMDLEGKQGNFKNLREFVFKNIDGYFNIYSKHTPINLVRDLPQGFSALEPLVDLPIGINITRFQTLLALHRSYLTPGDSSSGWTAGAAAYYVGYLQPRTFLLKYNENGTITDAVDCALDPLSETKCTLKSFTVEKGIYQTSNFRVQPTESIVRFPNITNLCPFGEVFNATRFASVYAWNRKRISNCVADYSVLYNSASFSTFKCYGVSPTKLNDLCFTNVYADSFVIRGDEVRQIAPGQTGKIADYNYKLPDDFTGCVIAWNSNNLDSKVGGNYNYLYRLFRKSNLKPFERDISTEIYQAGSTPCNGVEGFNCYFPLQSYGFQPTNGVGYQPYRVVVLSFELLHAPATVCGPKKSTNLVKNKCVNFNFNGLTGTGVLTESNKKFLPFQQFGRDIADTTDAVRDPQTLEILDITPCSFGGVSVITPGTNTSNQVAVLYQGVNCTEVPVAIHADQLTPTWRVYSTGSNVFQTRAGCLIGAEHVNNSYECDIPIGAGICASYQTQTNSPRRARSVASQSIIAYTMSLGAENSVAYSNNSCAIPTNFTISVTTEILPVSMTKTSVDCTMYICGDSTECSNLLLQYGSFCTQLNRALTGIAVEQDKNTQEVFAQVKQIYKTPPIKDFGGFNFSQILPDPSKPSKRSFIEDLLFNKVTLADAGFIKQYGDCLGDIAARDLICAQKFNGLTVLPPLLTDEMIAQYTSALLAGTITSGWTFGAGAALQIPFAMQMAYRFNGIGVTQNVLYENQKLIANQFNSAIGKIQDSLSSTASALGKLQDVVNQNAQALNTLVKQLSSNFGAISSVLNDILSRLDKVEAEVQIDRLITGRLQSLQTYVTQQLIRAAEIRASANLAATKMSECVLGQSKRVDFCGKGYHLMSFPQSAPHGVVFLHVTYVPAQEKNFTCAPAICHDGKAHFPREGVFVSNGTHWFVTQRNFYEPQIITTDNTFVSGNCDVVIGIVNNTVYDPLQPELDSFKEELDKYFKNHTSPDVDLGDISGINASVVNIQKEIDRLNEVAKNLNESLIDLQELGKYEQYIKGGGGSDIIKLLNEQVNKEMQSSNLYMSMSSWCYTHSLDGAGLFLFDHAAEEYEHAKKLIIFLNENNVPVQLTSISAPEHKFEGLTQIFQKAYEHEQHISESINNIVDHAIKSKDHATFNFLQWYVAEQHEEEVLFKDILDKIELIGNENHGLYLADQYVKGIAKSRKS

SEQ ID NO: 4986 - protein, 1379 aa, Artificial Sequence
  SARS-CoV-2/Belgium/BA-02291/2020__EPI_ISL_415159 spike protein (1-1211)(I712C_T1077C) Ferritin construct
MFVFLVLLPLVSSQCVNLTTRTQLPPAYTNSFTRGVYYPDKVFRSSVLHSTQDLFLPFFSNVTWFHAIHVSGTNGTKRFDNPVLPFNDGVYFASTEKSNIIRGWIFGTTLDSKTQSLLIVNNATNVVIKVCEFQFCNDPFLGVYYHKNNKSWMESEFRVYSSANNCTFEYVSQPFLMDLEGKQGNFKNLREFVFKNIDGYFKIYSKHTPINLVRDLPQGFSALEPLVDLPIGINITRFQTLLALHRSYLTPGDSSSGWTAGAAAYYVGYLQPRTFLLKYNENGTITDAVDCALDPLSETKCTLKSFTVEKGIYQTSNFRVQPTESIVRFPNITNLCPFGEVFNATRFASVYAWNRKRISNCVADYSVLYNSASFSTFKCYGVSPTKLNDLCFTNVYADSFVIRGDEVRQIAPGQTGKIADYNYKLPDDFTGCVIAWNSNNLDSKVGGNYNYLYRLFRRSNLKPFERDISTEIYQAGSTPCNGVEGFNCYFPLQSYGFQPTNGVGYQPYRVVVLSFELLPAPATVCGPKKSTNLVKNKCVNFNFNGLTGTGVLTESNKKFLPFQQFGRDIADTTDAVRDPQTLEILDITPCSFGGVSVITPGTNTSNQVAVLYQGVNCTEVPVAIHADQLTPTWRVYSTGSNVFQTRAGCLIGAEHVNNSYECDIPIGAGICASYQTQTNSPRRARSVASQSIIAYTMSLGAENSVAYSNNSCAIPTNFTISVTTEILPVSMTKTSVDCTMYICGDSTECSNLLLQYGSFCTQLNRALTGIAVEQDKNTQEVFAQVKQIYKTPPIKDFGGFNFSQILPDPSKPSKRSFIEDLLFNKVTLADAGFIKQYGDCLGDIAARDLICAQKFNGLTVLPPLLTDEMIAQYTSALLAGTITSGWTFGAGAALQIPFAMQMAYRFNGIGVTQNVLYENQKLIANQFNSAIGKIQDSLSSAAPALGKLQDVVNQNAQALNTLVKQLSSNFGAISSVLNDILSRLDKVEAEVQIDRLITGRLQSLQTYVTQQLIRAAEIRASANLAATKMSECVLGQSKRVDFCGKGYHLMSFPQSAPHGVVFLHVTYVPAQEKNFTCAPAICHDGKAHFPREGVFVSNGTHWFVTQRNFYEPQIITTDNTFVSGNCDVVIGIVNNTVYDPLQPELDSFKEELDKYFKNHTSPDVDLGDISGINASVVNIQKEIDRLNEVAKNLNESLIDLQELGKYEQYIKGGGGSDIIKLLNEQVNKEMQSSNLYMSMSSWCYTHSLDGAGLFLFDHAAEEYEHAKKLIIFLNENNVPVQLTSISAPEHKFEGLTQIFQKAYEHEQHISESINNIVDHAIKSKDHATFNFLQWYVAEQHEEEVLFKDILDKIELIGNENHGLYLADQYVKGIAKSRKS

SEQ ID NO: 4987 - protein, 1379 aa, Artificial Sequence
  SARS-CoV-2/USA/WA8-UW5/2020__EPI_ISL_413486 spike protein (1-1211)(I712C_T1077C) Ferritin construct
MFVFLVLLPLVSSQCVNLTTRTQLPPAYTNSFTRGVYYPDKVFRSSVLHSTQDLFLPFFSNVTWFHAIHVSGTNGTKRFDNPVLPFNDGVYFASTEKSNIIRGWIFGTTLDSKTQSLLIVNNATNVVIKVCEFQFCNDPFLGVYYHKNNKSWMESEFRVYSSANNCTFEYVSQPFLMDLEGKQGNFKNLREFVFKNIDGYFKIYSKHTPINLVRDLPQGFSALEPLVDLPIGINITRFQTLLALHRSYLTPGDSSSGWTAGAAAYYVGYLQPRTFLLKYNENGTITDAVDCALDPLSETKCTLKSFTVEKGIYQTSNFRVQPTESIVRFPNITNLCPFGEVFNATRFASVYAWNRKRISNCVADYSVLYNSASFSTFKCYGVSPTKLNDLCFTNVYADSFVIRGDEVRQIAPGQTGKIADYNYKLPDDFTGCVIAWNSNNLDSKVGGNYNYLYRLFRKSNLKPFERDISTEIYQAGSTPCNGVEGFNCYFPLQSYGFQPTNGVGYQPYRVVVLSFELLHAPATVCGPKKSTNLVKNKCVNFNFNGLTGTGVLTESNKKFLPFQQFGRDIADTTDAVRDPQTLEILDITPCSFGGVSVITPGTNTSNQVAVLYQDVNCTEVPVAIHADQLTPTWRVYSTGSNVFQTRAGCLIGAEYVNNSYECDIPIGAGICASYQTQTNSPRRARSVASQSIIAYTMSLGAENSVAYSNNSCAIPTNFTISVTTEILPVSMTKTSVDCTMYICGDSTECSNLLLQYGSFCTQLNRALTGIAVEQDKNTQEVFAQVKQIYKTPPIKDFGGFNFSQILPDPSKPSKRSFIEDLLFNKVTLADAGFIKQYGDCLGDIAARDLICAQKFNGLTVLPPLLTDEMIAQYTSALLAGTITSGWTFGAGAALQIPFAMQMAYRFNGIGVTQNVLYENQKLIANQFNSAIGKIQDSLSSTASALGKLQDVVNQNAQALNTLVKQLSSNFGAISSVLNDILSRLDKVEAEVQIDRLITGRLQSLQTYVTQQLIRAAEIRASANLAATKMSECVLGQSKRVDFCGKGYHLMSFPQSAPHGVVFLHVTYVPAQEKNFTCAPAICHDGKAHFPREGVFVSNGTHWFVTQRNFYEPQIITTDNTFVSGNCDVVIGIVNNTVYDPLQPELDSFKEELDKYFKNHTSPDVDLGDISGINASVVNIQKEIDRLNEVAKNLNESLIDLQELGKYEQYIKGGGGSDIIKLLNEQVNKEMQSSNLYMSMSSWCYTHSLDGAGLFLFDHAAEEYEHAKKLIIFLNENNVPVQLTSISAPEHKFEGLTQIFQKAYEHEQHISESINNIVDHAIKSKDHATFNFLQWYVAEQHEEEVLFKDILDKIELIGNENHGLYLADQYVKGIAKSRKS

SEQ ID NO: 4988 - protein, 1379 aa, Artificial Sequence
  SARS-CoV-2/England/20102000506/2020__EPI_ISL_415147 spike protein (1-1211)(I712C_T1077C) Ferritin construct
MFVFLVLLPLVSSQCVNLTTRTQLPPAYTNSFTRGVYYPDKVFRSSVLHSTQDLFLPFFSNVTWFHAIHVSGTNGTKRFDNPVLPFNDGVYFASTEKSNIIRGWIFGTTLDSKTQSLLIVNNATNVVIKVCEFQFCNDPFLGVYYHKNNKSWMESEFRVYSSANNCTFEYVSQPFLMDLEGKQGNFKNLREFVFKNIDGYFKIYSKHTPINLVRDLPQGFSALEPLVDLPIGINITRFQTLLALHRSYLTPGDSSSGWTAGAAAYYVGYLQPRTFLLKYNENGTITDAVDCALDPLSETKCTLKSFTVEKGIYQTSNFRVQPTESIVRFPNITNLCPFGEVFNATRFASVYAWNRKRISNCVADYSVLYNSASFSTFKCYGVSPTKLNDLCFTNVYADSFVIRGDEVRQIAPGQTGKIADYNYKLPDDFTGCVIAWNSNNLDSKVGGNYNYLYRLFRKSNLKPFERDISTEIYQAGSTPCNGVEGFNCYFPLQSYGFQPTNGVGYQPYRVVVLSFELLHAPATVCGPKKSTNLVKNKCVNFNFNGLTGTGVLTESNKKFLPFQQFGRDIADTTDAVRDPQTLEILDITPCSFGGVSVITPGTNTSNQVAVLYQGVNCTEVPVAIHADQLTPTWRVYSTGSNVFQTRAGCLIGAEHVNNSYECDIPIGAGICASYQTQTNSPRRARSVASQSIIAYTMSLGAENSVAYSNNSCAIPTNFTISVTTEILPVSMTKTSVDCTMYICGDSTECSNLLLQYGSFCTQLNRALTGIAVEQDKNTQEVFAQVKQIYKTPPIKDFGGFNFSQILPDPSKPSKRSFIEDLLFNKVTLADAGFIKQYGYCLGDIAARDLICAQKFNGLTVLPPLLTDEMIAQYTSALLAGTITSGWTFGAGAALQIPFAMQMAYRFNGIGVTQNVLYENQKLIANQFNSAIGKIQDSLSSTASALGKLQDVVNQNAQALNTLVKQLSSNFGAISSVLNDILSRLDKVEAEVQIDRLITGRLQSLQTYVTQQLIRAAEIRASANLAATKMSECVLGQSKRVDFCGKGYHLMSFPQSAPHGVVFLHVTYVPAQEKNFTCAPAICHDGKAHFPREGVFVSNGTHWFVTQRNFYEPQIITTDNTFVSGNCDVVIGIVNNTVYDPLQPELDSFKEELDKYFKNHTSPDVDLGDISGINASVVNIQKEIDRLNEVAKNLNESLIDLQELGKYEQYIKGGGGSDIIKLLNEQVNKEMQSSNLYMSMSSWCYTHSLDGAGLFLFDHAAEEYEHAKKLIIFLNENNVPVQLTSISAPEHKFEGLTQIFQKAYEHEQHISESINNIVDHAIKSKDHATFNFLQWYVAEQHEEEVLFKDILDKIELIGNENHGLYLADQYVKGIAKSRKS

SEQ ID NO: 4989 - protein, 1379 aa, Artificial Sequence
  SARS-CoV-2/Belgium/VAG-03013/2020__EPI_ISL_415155 spike protein (1-1211)(I712C_T1077C) Ferritin construct
MFVFLVLLPLVSSQCVNLTTRTQLPPAYTNSFTRGVYYPDKVFRSSVLHSTQDLFLPFFSNVTWFHAIHVSGTNGTKRFDNPVLPFNDGVYFASTEKSNIIRGWIFGTTLDSKTQSLLIVNNATNVVIKVCEFQFCNDPFLGVYYHKNNKSWMESEFRVYSSANNCTFEYVSQPFLMDLEGKQGNFKNLREFVFKNIDGYFKIYSKHTPINLVRDLPQGFSALEPLVDLPIGINITRFQTLLALHRSYLTPGDSSSGWTAGAAAYYVGYLQPRTFLLKYNENGTITDAVDCALDPLSETKCTLKSFTVEKGIYQTSNFRVQPTESIVRFPNITNLCPFGEVFNATRFASVYAWNRKRISNCVADYSVLYNSASFSTFKCYGVSPTKLNDLCFTNVYADSFVIRGDEVRQIAPGQTGKIADYNYKLPDDFTGCVIAWNSNNLDSKVGGNYNYLYRLFRKSNLKPFERDISTEIYQAGSTPCNGVEGFNCYFPLQSYGFQPTNGVGYQPYRVVVLSFELLHAPATVCGPKKSTNLVKNKCVNFNFNGLTGTGVLTESNKKFLPFQQFGRDIADTTDAVRDPQTLEILDITPCSFGGVSVITPGTNTSNQVAVLYQGVNCTEVPVAIHADQLTPTWRVYSTGSNVFQTRAGCLIGAEHVNNSYECDIPIGAGICASYQTQTNSPRRARSVASQSIIAYTMSLGAENSVAYSNNSCAIPTNFTISVTTEILPVSMTKTSVDCTMYICGDSTECSNLLLQYGSFCTQLNRALTGIAVEQDKNTQEVFAQVKQIYKTPPIKDFGGFNFSQILPDPSKPSKRSFIEDLLFNKVTLADAGFIKQYGDCLGDIAARDLICAQKFNGLTVLPPLLTDEMIAQYTSALLAGTITSGWTFGAGAALQIPFAMQMAYRFNGIGVTQNVLYENQKLIANQFNSAIGKIQDSLSSTATALGKLQDVVNQNAQALNTLVKQLSSNFGAISSVLNDILSRLDKVEAEVQIDRLITGRLQSLQTYVTQQLIRAAEIRASANLAATKMSECVLGQSKRVDFCGKGYHLMSFPQSAPHGVVFLHVTYVPAQEKNFTCAPAICHDGKAHFPREGVFVSNGTHWFVTQRNFYEPQIITTDNTFVSGNCDVVIGIVNNTVYDPLQPELDSFKEELDKYFKNHTSPDVDLGDISGINASVVNIQKEIDRLNEVAKNLNESLIDLQELGKYEQYIKGGGGSDIIKLLNEQVNKEMQSSNLYMSMSSWCYTHSLDGAGLFLFDHAAEEYEHAKKLIIFLNENNVPVQLTSISAPEHKFEGLTQIFQKAYEHEQHISESINNIVDHAIKSKDHATFNFLQWYVAEQHEEEVLFKDILDKIELIGNENHGLYLADQYVKGIAKSRKS

SEQ ID NO: 4990 - protein, 1379 aa, Artificial Sequence
  SARS-CoV-2/Belgium/BC-03016/2020__EPI_ISL_415157 spike protein (1-1211)(I712C_T1077C) Ferritin construct
MFVFLVLLPLVSSQCVNLTTRTQLPPAYTNSFTRGVYYPDKVFRSSVLHSTQDLFLPFFSNVTWFHAIHVSGTNGTKRFDNPVLPFNDGVYFASTEKSNIIRGWIFGTTLDSKTQSLLIVNNATNVVIKVCEFQFCNDPFLGVYYHKNNKSWMESEFRVYSSANNCTFEYVSQPFLMDLEGKQGNFKNLREFVFKNIDGYFKIYSKHTPINLVRDLPQGFSALEPLVDLPIGINITRFQTLLALHRSYLTPGDSSSGWTAGAAAYYVGYLQPRTFLLKYNENGTITDAVDCALDPLSETKCTLKSFTVEKGIYQTSNFRVQPTESIVRFPNITNLCPFGEVFNATRFASVYAWNRKRISNCVADYSVLYNSASFSTFKCYGVSPTKLNDLCFTNVYADSFVIRGDEVRQIAPGQTGKIADYNYKLPDDFTGCVIAWNSNNLDSKVGGNYNYLYRLFRKSNLKPFERDISTEIYQAGSTPCNGVEGFNCYFPLQSYGFQPTNGVGYQPYRVVVLSFELLHAPATVCGPKKSTNLVKNKCVNFNFNGLTGTGVLTESNKKFLPFQQFGRDIADTTDAVRDPQTLEILDITPCSFGGVSVITPGTNTSNQVAVLYQGVNCTEVPVAIHADQLTPTWRVYSTGSNVFQTRAGCLIGAEHVNNSYECDIPIGAGICASYQTQTNSPRRARSVASQSIIAYTMSLGAENSVAYSNNSCAIPTNFTISVTTEILPVSMTKTSVDCTMYICGDSTECSNLLLQYGSFCTQLNRALTGIAVEQDKNTQEVFAQVKQIYKTPPIKDFGGFNFSQILPDPSKPSKRSFIEDLLFNKVTLADAGFIKQYGDCLGDIAARDLICAQKFNGLTVLPPLLTDEMIAQYTSALLAGTITSGWTFGAGAALQIPFAMQMAYRFNGIGVTQNVLYENQKLIANQFNSAIGKIQDSLSSTAPALGKLQDVVNQNAQALNTLVKQLSSNFGAISSVLNDILSRLDKVEAEVQIDRLITGRLQSLQTYVTQQLIRAAEIRASANLAATKMSECVLGQSKRVDFCGKGYHLMSFPQSAPHGVVFLHVTYVPAQEKNFTCAPAICHDGKAHFPREGVFVSNGTHWFVTQRNFYEPQIITTDNTFVSGNCDVVIGIVNNTVYDPLQPELDSFKEELDKYFKNHTSPDVDLGDISGINASVVNIQKEIDRLNEVAKNLNESLIDLQELGKYEQYIKGGGGSDIIKLLNEQVNKEMQSSNLYMSMSSWCYTHSLDGAGLFLFDHAAEEYEHAKKLIIFLNENNVPVQLTSISAPEHKFEGLTQIFQKAYEHEQHISESINNIVDHAIKSKDHATFNFLQWYVAEQHEEEVLFKDILDKIELIGNENHGLYLADQYVKGIAKSRKS

SEQ ID NO: 4991 - protein, 1379 aa, Artificial Sequence
  SARS-CoV-2/Germany/BavPat3/2020__EPI_ISL_414521 spike protein (1-1211)(I712C_T1077C) Ferritin construct
MFVFLVLLPLVSSQCVNLTTRTQLPPAYTNSFTRGVYYPDKVFRSSVLHSTQDLFLPFFSNVTWFHAIHVSGTNGTKRFDNPVLPFNDGVYFASTEKSNIIRGWIFGTTLDSKTQSLLIVNNATNVVIKVCEFQFCNDPFLGVYYHKNNKSWMESEFRVYSSANNCTFEYVSQPFLMDLEGKQGNFKNLREFVFKNIDGYFKIYSKHTPINLVRDLPQGFSALEPLVDLPIGINITRFQTLLALHRSYLTPGDSSSGWTAGAAAYYVGYLQPRTFLLKYNENGTITDAVDCALDPLSETKCTLKSFTVEKGIYQTSNFRVQPTESIVRFPNITNLCPFGEVFNATRFASVYAWNRKRISNCVADYSVLYNSASFSTFKCYGVSPTKLNDLCFTNVYADSFVIRGDEVRQIAPGQTGKIADYNYKLPDDFTGCVIAWNSNNLDSKVGGNYNYLYRLFRKSNLKPFERDISTEIYQAGSTPCNGVEGFNCYFPLQSYGFQPTNGVGYQPYRVVVLSFELLHAPATVCGPKKSTNLVKNKCVNFNFNGLTGTGVLTESNKKFLPFQQFGRDIADTTDAVRDPQTLEILDITPCSFGGVSVITPGTNTSNQVAVLYQDVNCTEVPVAIHADQLTPTWRVYSTGSNVFQTRAGCLIGAEHVNNSYECDIPIGAGICASYQTQTNSPRRARSVASQSIIAYTMSLGAENSVAYSNNSCAIPTNFTISVTTEILPVSMTKTSVDCTMYICGDSTECSNLLLQYGSFCTQLNRALTGIAVEQDKNTQQVFAQVKQIYKTPPIKDFGGFNFSQILPDPSKPSKRSFIEDLLFNKVTLADAGFIKQYGDCLGDIAARDLICAQKFNGLTVLPPLLTDEMIAQYTSALLAGTITSGWTFGAGAALQIPFAMQMAYRFNGIGVTQNVLYENQKLIANQFNSAIGKIQDSLSSTASALGKLQDVVNQNAQALNTLVKQLSSNFGAISSVLNDILSRLDKVEAEVQIDRLITGRLQSLQTYVTQQLIRAAEIRASANLAATKMSECVLGQSKRVDFCGKGYHLMSFPQSAPHGVVFLHVTYVPAQEKNFTCAPAICHDGKAHFPREGVFVSNGTHWFVTQRNFYEPQIITTDNTFVSGNCDVVIGIVNNTVYDPLQPELDSFKEELDKYFKNHTSPDVDLGDISGINASVVNIQKEIDRLNEVAKNLNESLIDLQELGKYEQYIKGGGGSDIIKLLNEQVNKEMQSSNLYMSMSSWCYTHSLDGAGLFLFDHAAEEYEHAKKLIIFLNENNVPVQLTSISAPEHKFEGLTQIFQKAYEHEQHISESINNIVDHAIKSKDHATFNFLQWYVAEQHEEEVLFKDILDKIELIGNENHGLYLADQYVKGIAKSRKS

SEQ ID NO: 4992 - protein, 1379 aa, Artificial Sequence
  SARS-CoV-2/France/HF1805/2020__EPI_ISL_414628 spike protein (1-1211)(I712C_T1077C) Ferritin construct
MFVFLVLLPLVSSQCVNLTTRTQLPPAYTNSFTRGVYYPDKVFRSSVLHSTQDLFLPFFSNVTWFHAIHVSGTNGTKRFDNPVLPFNDGVYFASTEKSNIIRGWIFGTTLDSKTQSLLIVNNATNVVIKVCEFQFCNDPFLGVYYHKNNKSWMESEFRVYSSANNCTFEYVSQPFLMDLEGKQGNFKNLREFVFKNIDGYFKIYSKHTPINLVRDLPQGFSALEPLVDLPIGINITRFQTLLALHRSYLTPGDSSSGWTAGAAAYYVGYLQPRTFLLKYNENGTITDAVDCALDPLSETKCTLKSFTVEKGIYQTSNFRVQPTESIVRFPNITNLCPFGEVFNATRFASVYAWNRKRISNCVADYSVLYNSASFSTFKCYGVSPTKLNDLCFTNVYADSFVIRGDEVRQIAPGQTGKIADYNYKLPDDFTGCVIAWNSNNLDSKVGGNYNYLYRLFRKSNLKPFERDISTEIYQAGSTPCNGVEGFNCYFPLQSYGFQPTNGVGYQPYRVVVLSFELLHAPATVCGPKKSTNLVKNKCVNFNFNGLTGTGVLTESNKKFLPFQQFGRDIADTTDAVRDPQTLEILDITPCSFGGVSVITPGTNTSNQVAVLYQGVNCTEVPVAIHADQLTPTWRVYSTGSNVFQTRAGCLIGAEHVNNSYECDIPIGAGICASYQTQTNSPRRARSVASQSIIAYTMSLGAENSVAYSNNSCAIPTNFTISVTTEILPVSMTKTSVDCTMYICGDSTECSNLLLQYGSFCTQLNRALTGIAVEQDKNTQEVFAQVKQIYKTPPIKDFGGFNFSQILPDPSKPSKRSFIEDLLFNKVTLADAGFIKQYGDCLGDIAARDLICAQKFNGLTVLPPLLTDEMIAQYTSALLAGTITSGWTFGAGAALQIPFAMQMAYRFNGIGVTQNVLYENQKLIANQFNSAIGKIQDSLSSTASALGKLQDVVNQNAQALNTLVKQLSSNFGAISSVLNDILSRLDKVEAEVQIDRLITGRLQSLQTYVTQQLIRAAEIRASANLAATKMSECVLGQSKRVDFCGKGYHLMSFPQSAPHGVVFLHVTYVPAQEKNFTCAPAICHDGKAHFPREGVFVSNGTHWFVTQRNFYEPQIITTDNTFVSGNCDVVIGVVNNTVYDPLQPELDSFKEELDKYFKNHTSPDVDLGDISGINASVVNIQKEIDRLNEVAKNLNESLIDLQELGKYEQYIKGGGGSDIIKLLNEQVNKEMQSSNLYMSMSSWCYTHSLDGAGLFLFDHAAEEYEHAKKLIIFLNENNVPVQLTSISAPEHKFEGLTQIFQKAYEHEQHISESINNIVDHAIKSKDHATFNFLQWYVAEQHEEEVLFKDILDKIELIGNENHGLYLADQYVKGIAKSRKS

SEQ ID NO: 4993 - protein, 1379 aa, Artificial Sequence
  SARS-CoV-2/Netherlands/ZuidHolland_9/2020__EPI_ISL_414445 spike protein (1-1211)(I712C_T1077C) Ferritin construct
MFVFLVLLPLVSSQCVNLTTRTQLPPAYTNSFTRGVYYPDKVFRSSVLHSTQDLFLPFFSNVTWFHAIHVSGTNGTKRFDNPVLPFNDGVYFASTEKSNIIRGWIFGTTLDSKTQSLLIVNNATNVVIKVCEFQFCNDPFLGVYYHKNNKSWMESEFRVYSSANNCTFEYVSQPFLMDLEGKQGNFKNLREFVFKNIDGYFKIYSKHTPINLVRDLPQGFSALEPLVDLPIGINITRFQTLLALHRSYLTPGDSSSGWTAGAAAYYVGYLQPRTFLLKYNENGTITDAVDCALDPLSETKCTLKSFTVEKGIYQTSNFRVQPTESIVRFPNITNLCPFGEVFNATRFASVYAWNRKRISNCVADYSVLYNSASFSTFKCYGVSPTKLNDLCFTNVYADSFVIRGDEVRQIAPGQTGKIADYNYKLPDDFTGCVIAWNSNNLDSKVGGNYNYLYRLFRKSNLKPFERDISTEIYQAGSTPCNGVEGFNCYFPLQSYGFQPTNGVGYQPYRVVVLSFELLHAPATVCGPKKSTNLVKNKCVNFNFNGLTGTGVLTESNKKFLPFQQFGRDIADTTDAVRDPQTLEILDITPCSFGGVSVITPGTNTSNQVAVLYQGVNCTEVPVAIHADQLTPTWRVYSTGSNVFQTRAGCLIGAEHVNNSYECDIPIGAGICASYQTQTNSPRRARSVASQSIIAYTMSLGAENSVAYSNNSCAIPTNFTISVTTEILPVSMTKTSVDCTMYICGDSTECSNLLLQYGSFCTQLNRALTGIAVEQDKNTQEVFAQVKQIYKTPPIKDFGGFNFSQILPDPSKPSKRSFIEDLLFNKVTLADAGFIKQYGDCLGDIAARDLICVQKFNGLTVLPPLLTDEMIAQYTSALLAGTITSGWTFGAGAALQIPFAMQMAYRFNGIGVTQNVLYENQKLIANQFNSAIGKIQDSLSSTASALGKLQDVVNQNAQALNTLVKQLSSNFGAISSVLNDILSRLDKVEAEVQIDRLITGRLQSLQTYVTQQLIRAAEIRASANLAATKMSECVLGQSKRVDFCGKGYHLMSFPQSAPHGVVFLHVTYVPAQEKNFTCAPAICHDGKAHFPREGVFVSNGTHWFVTQRNFYEPQIITTDNTFVSGNCDVVIGIVNNTVYDPLQPELDSFKEELDKYFKNHTSPDVDLGDISGINASVVNIQKEIDRLNEVAKNLNESLIDLQELGKYEQYIKGGGGSDIIKLLNEQVNKEMQSSNLYMSMSSWCYTHSLDGAGLFLFDHAAEEYEHAKKLIIFLNENNVPVQLTSISAPEHKFEGLTQIFQKAYEHEQHISESINNIVDHAIKSKDHATFNFLQWYVAEQHEEEVLFKDILDKIELIGNENHGLYLADQYVKGIAKSRKS

SEQ ID NO: 4994 - protein, 1379 aa, Artificial Sequence
  SARS-CoV-2/Finland/FIN03032020A/2020__EPI_ISL_413602 spike protein (1-1211)(I712C_T1077C) Ferritin construct
MFVFLVLLPLVSSQCVNLTTRTQLPPAYTNSFTRGVYYPDKVFRSSVLHSTQDLFLPFFSNVTWFHAIHVSGTNGTKRFDNPVLPFNDGVYFASTEKSNIIRGWIFGTTLDSKTQSLLIVNNATNVVIKVCEFQFCNDPFLGVYYHKNNKSWMESEFRVYSSANNCTFEYVSQPFLMDLEGKQGNFKNLREFVFKNIDGYFKIYSKHTPINLVRDLPQGFSALEPLVDLPIGINITRFQTLLALHRSYLTPGDSSSGWTAGAAAYYVGYLQPRTFLLKYNENGTITDAVDCALDPLSETKCTLKSFTVEKGIYQTSNFRVQPTESIVRFPNITNLCPFGEVFNATRFASVYAWNRKRISNCVADYSVLYNSASFSTFKCYGVSPTKLNDLCFTNVYADSFVIRGDEVRQIAPGQTGKIADYNYKLPDDFTGCVISWNSNNLDSKVGGNYNYLYRLFRKSNLKPFERDISTEIYQAGSTPCNGVEGFNCYFPLQSYGFQPTNGVGYQPYRVVVLSFELLHAPATVCGPKKSTNLVKNKCVNFNFNGLTGTGVLTESNKKFLPFQQFGRDIADTTDAVRDPQTLEILDITPCSFGGVSVITPGTNTSNQVAVLYQGVNCTEVPVAIHADQLTPTWRVYSTGSNVFQTRAGCLIGAEHVNNSYECDIPIGAGICASYQTQTNSPRRARSVASQSIIAYTMSLGAENSVAYSNNSCAIPTNFTISVTTEILPVSMTKTSVDCTMYICGDSTECSNLLLQYGSFCTQLNRALTGIAVEQDKNTQEVFAQVKQIYKTPPIKDFGGFNFSQILPDPSKPSKRSFIEDLLFNKVTLADAGFIKQYGDCLGDIAARDLICAQKFNGLTVLPPLLTDEMIAQYTSALLAGTITSGWTFGAGAALQIPFAMQMAYRFNGIGVTQNVLYENQKLIANQFNSAIGKIQDSLSSTASALGKLQDVVNQNAQALNTLVKQLSSNFGAISSVLNDILSRLDKVEAEVQIDRLITGRLQSLQTYVTQQLIRAAEIRASANLAATKMSECVLGQSKRVDFCGKGYHLMSFPQSAPHGVVFLHVTYVPAQEKNFTCAPAICHDGKAHFPREGVFVSNGTHWFVTQRNFYEPQIITTDNTFVSGNCDVVIGIVNNTVYDPLQPELDSFKEELDKYFKNHTSPDVDLGDISGINASVVNIQKEIDRLNEVAKNLNESLIDLQELGKYEQYIKGGGGSDIIKLLNEQVNKEMQSSNLYMSMSSWCYTHSLDGAGLFLFDHAAEEYEHAKKLIIFLNENNVPVQLTSISAPEHKFEGLTQIFQKAYEHEQHISESINNIVDHAIKSKDHATFNFLQWYVAEQHEEEVLFKDILDKIELIGNENHGLYLADQYVKGIAKSRKS

SEQ ID NO: 4995 - protein, 1379 aa, Artificial Sequence
  SARS-CoV-2/France/GE1977/2020__EPI_ISL_414632 spike protein (1-1211)(I712C_T1077C) Ferritin construct
MFVFLVLLPLVSSQCVNLTTRTQLPPAYTNSFTRGVYYPDKVFRSSVLHSTQDLFLPFFSNVTWFHAIHVSGTNGTKRFDNPVLPFNDGVYFASTEKSNIIRGWIFGTTLDSKTQSLLIVNNATNVVIKVCEFQFCNDPFLGVYYHKNNKSWMESEFRVYSSANNCTFEYVSQPFLMDLEGKQGNFKNLREFVFKNIDGYFKIYSKHTPINLVRDLPQGFSALEPLVDLPIGINITRFQTLLALHRSYLTPGDSSSGWTAGAAAYYVGYLQPRTFLLKYNENGTITDAVDCALDPLSETKCTLKSFTVEKGIYQTSNFRVQPTESIVRFPNITNLCPFGEVFNATRFASVYAWNRKRISNCVADYSVLYNSASFSTFKCYGVSPTKLNDLCFTNVYADSFVIRGDEVRQIAPGQTGKIADYNYKLPDDFTGCVIAWNSNNLDSKVGGNYNYLYRLFRKSNLKPFERDISTEIYQAGSTPCNGVEGFNCYFPLQSYGFQPTNGVGYQPYRVVVLSFELLHAPATVCGPKKSTNLVKNKCVNFNFNGLTGTGVLTESNKKFLPFQQFGRDIADTTDAVRDPQTLEILDITPCSFGGVSVITPGTNTSNQVAVLYQGVNCTEVPVAIHADQLTPTWRVYSTGSNVFQTRAGCLIGAEHVNNSYECDIPIGAGICASYQTQTNSPRRARSVASQSIIAYTMSLGAENSVAYSNNSCAIPTNFTISVTTEILPVSMTKTSVDCTMYICGDSTECSNLLLQYGSFCTQLNRALTGIAVEQDKNTQEVFAQVKQIYKTPPIKDFGGFNFSQILPDPSKPSKRSFIEDLLFNKVTLADAGFIKQYGDCLGDIAARDLICAQKFNGLTVLPPLLTDEMIAQYTSALLAGTITSGWTFGAGAALQIPFAMQMAYRFNGIGVTQNVLYENQKLIANQFNSAIGKIQDSLFSTASALGKLQDVVNQNAQALNTLVKQLSSNFGAISSVLNDILSRLDKVEAEVQIDRLITGRLQSLQTYVTQQLIRAAEIRASANLAATKMSECVLGQSKRVDFCGKGYHLMSFPQSAPHGVVFLHVTYVPAQEKNFTCAPAICHDGKAHFPREGVFVSNGTHWFVTQRNFYEPQIITTDNTFVSGNCDVVIGIVNNTVYDPLQPELDSFKEELDKYFKNHTSPDVDLGDISGINASVVNIQKEIDRLNEVAKNLNESLIDLQELGKYEQYIKGGGGSDIIKLLNEQVNKEMQSSNLYMSMSSWCYTHSLDGAGLFLFDHAAEEYEHAKKLIIFLNENNVPVQLTSISAPEHKFEGLTQIFQKAYEHEQHISESINNIVDHAIKSKDHATFNFLQWYVAEQHEEEVLFKDILDKIELIGNENHGLYLADQYVKGIAKSRKS

SEQ ID NO: 4996 - protein, 1379 aa, Artificial Sequence
  SARS-CoV-2/Finland/FIN-313/2020__EPI_ISL_414641 spike protein (1-1211)(I712C_T1077C) Ferritin construct
MFVFLVLLPLVSSQCVNLTTRTQLPPAYTNSFTRGVYYPDKVFRSSVLHSTQDLFLPFFSNVTWFHAIHVSGTNGTKRFDNPVLPFNDGVYFASTEKSNIIRGWIFGTTLDSKTQSLLIVNNATNVVIKVCEFQFCNDPFLGVYYHKNNKSWMESEFRVYSSANNCTFEYVSQPFLMDLEGKQGNFKNLREFVFKNIDGYFKIYSKHTPINLVRDLPQGFSALEPLVDLPIGINITRFKTLLALHRSYLTPGDSSSGWTAGAAAYYVGYLQPRTFLLKYNENGTITDAVDCALDPLSETKCTLKSFTVEKGIYQTSNFRVQPTESIVRFPNITNLCPFGEVFNATRFASVYAWNRKRISNCVADYSVLYNSASFSTFKCYGVSPTKLNDLCFTNVYADSFVIRGDEVRQIAPGQTGKIADYNYKLPDDFTGCVIAWNSNNLDSKVGGNYNYLYRLFRKSNLKPFERDISTEIYQAGSTPCNGVEGFNCYFPLQSYGFQPTNGVGYQPYRVVVLSFELLHAPATVCGPKKSTNLVKNKCVNFNFNGLTGTGVLTESNKKFLPFQQFGRDIADTTDAVRDPQTLEILDITPCSFGGVSVITPGTNTSNQVAVLYQGVNCTEVPVAIHADQLTPTWRVYSTGSNVFQTRAGCLIGAEHVNNSYECDIPIGAGICASYQTQTNSPRRARSVASQSIIAYTMSLGAENSVAYSNNSCAIPTNFTISVTTEILPVSMTKTSVDCTMYICGDSTECSNLLLQYGSFCTQLNRALTGIAVEQDKNTQEVFAQVKQIYKTPPIKDFGGFNFSQILPDPSKPSKRSFIEDLLFNKVTLADAGFIKQYGDCLGDIAARDLICAQKFNGLTVLPPLLTDEMIAQYTSALLAGTITSGWTFGAGAALQIPFAMQMAYRFNGIGVTQNVLYENQKLIANQFNSAIGKIQDSLSSTASALGKLQDVVNQNAQALNTLVKQLSSNFGAISSVLNDILSRLDKVEAEVQIDRLITGRLQSLQTYVTQQLIRAAEIRASANLAATKMSECVLGQSKRVDFCGKGYHLMSFPQSAPHGVVFLHVTYVPAQEKNFTCAPAICHDGKAHFPREGVFVSNGTHWFVTQRNFYEPQIITTDNTFVSGNCDVVIGIVNNTVYDPLQPELDSFKEELDKYFKNHTSPDVDLGDISGINASVVNIQKEIDRLNEVAKNLNESLIDLQELGKYEQYIKGGGGSDIIKLLNEQVNKEMQSSNLYMSMSSWCYTHSLDGAGLFLFDHAAEEYEHAKKLIIFLNENNVPVQLTSISAPEHKFEGLTQIFQKAYEHEQHISESINNIVDHAIKSKDHATFNFLQWYVAEQHEEEVLFKDILDKIELIGNENHGLYLADQYVKGIAKSRKS

SEQ ID NO: 4997 - protein, 1379 aa, Artificial Sequence
  SARS-CoV-2/Netherlands/ZuidHolland_2/2020__EPI_ISL_414556 spike protein (1-1211)(I712C_T1077C) Ferritin construct
MFVFLVLLPLVSSQCVNLTTRTQLPPAYTNSFTRGVYYPDKVFRSSVLHSTQDLFLPFFSNVTWFHAIHVSGTNGTKRFDNPVLPFNDGVYFASTEKSNIIRGWIFGTTLDSKTQSLLIVNNATNVVIKVCEFQFCNDPFLGVYYHKNNKSWMESEFRVYSSANNCTFEYVSQPFLMDLEGKQGNFKNLREFVFKNIDGYFKIYSKHTPINLVRDLPQGFSALEPLVDLPIGINITRFQTLLALHRSYLTPGDSSSGWTAGAAAYYVGYLQPRTFLLKYNENGTITDAVDCALDPLSETKCTLKSFTVEKGIYQTSNFRVQPTESIVRFPNITNLCPFGEVFNATRFASVYAWNRKRISNCVADYSVLYNSASFSTFKCYGVSPTKLNDLCFTNVYADSFVIRGDEVRQIAPGQTGKIADYNYKLPDDFTGCVIAWNSNNLDSKVGGNYNYLYRLFRKSNLKPFERDISTEIYQAGSTPCNGVEGFNCYFPLQSYGFQPTNGVGYQPYRVVVLSFELLHAPATVCGPKKSTNLVKNKCVNFNFNGLTGTGVLTESNKKFLPFQQFGRDIADTTDAVRDPQTLEILDITPCSFGGVSVITPGTNTSNQVAVLYQGVNCTEVPVAIHADQLTPTWRVYSTGSNVFQTRAGCLIGAEHVNNSYECDIPIGAGICASYQTQTNSPRRARSVASQSIIAYTMSLGAENSVAYSNNSCAIPTNFTISVTTEILPVSMTKTSVDCTMYICGDSTECSNLLLQYGSFCTQLNRALTGIALEQDKNTQEVFAQVKQIYKTPPIKDFGGFNFSQILPDPSKPSKRSFIEDLLFNKVTLADAGFIKQYGDCLGDIAARDLICAQKFNGLTVLPPLLTDEMIAQYTSALLAGTITSGWTFGAGAALQIPFAMQMAYRFNGIGVTQNVLYENQKLIANQFNSAIGKIQDSLSSTASALGKLQDVVNQNAQALNTLVKQLSSNFGAISSVLNDILSRLDKVEAEVQIDRLITGRLQSLQTYVTQQLIRAAEIRASANLAATKMSECVLGQSKRVDFCGKGYHLMSFPQSAPHGVVFLHVTYVPAQEKNFTCAPAICHDGKAHFPREGVFVSNGTHWFVTQRNFYEPQIITTDNTFVSGNCDVVIGIVNNTVYDPLQPELDSFKEELDKYFKNHTSPDVDLGDISGINASVVNIQKEIDRLNEVAKNLNESLIDLQELGKYEQYIKGGGGSDIIKLLNEQVNKEMQSSNLYMSMSSWCYTHSLDGAGLFLFDHAAEEYEHAKKLIIFLNENNVPVQLTSISAPEHKFEGLTQIFQKAYEHEQHISESINNIVDHAIKSKDHATFNFLQWYVAEQHEEEVLFKDILDKIELIGNENHGLYLADQYVKGIAKSRKS

SEQ ID NO: 4998 - protein, 1379 aa, Artificial Sequence
  SARS-CoV-2/USA/WA-UW31/2020__EPI_ISL_414618 spike protein (1-1211)(I712C_T1077C) Ferritin construct
MFVFLVLLPLVSSQCVNLTTRTQLPPAYTNSFTRGVYYPDKVFRSSVLHSTQDLFLPFFSNVTWFHAIHVSGTNGTKRFDNPVLPFNDGVYFASTEKSNIIRGWIFGTTLDSKTQSLLIVNNATNVVIKVCEFQFCNDPFLGVYYHKNNKSWMESEFRVYSSANNCTFEYVSQPFLMDLEGKQGNFKNLREFVFKNIDGYFKIYSKHTPINLVRDLPQGFSALEPLVDLPIGINITRFQTLLALHRSYLTPGDSSSGWTAGAAAYYVGYLQPRTFLLKYNENGTITDAVDCALDPLSETKCTLKSFTVEKGIYQTSNFRVQPTESIVRFPNITNLCPFGEVFNATRFASVYAWNRKRISNCVADYSVLYNSASFSTFKCYGVSPTKLNDLCFTNVYADSFVIRGDEVRQIAPGQTGKIADYNYKLPDDFTGCVIAWNSNNLDSKVGGNYNYLYRLFRKSNLKPFERDISTEIYQAGSTPCNGAEGFNCYFPLQSYGFQPTNGVGYQPYRVVVLSFELLHAPATVCGPKKSTNLVKNKCVNFNFNGLTGTGVLTESNKKFLPFQQFGRDIADTTDAVRDPQTLEILDITPCSFGGVSVITPGTNTSNQVAVLYQDVNCTEVPVAIHADQLTPTWRVYSTGSNVFQTRAGCLIGAEHVNNSYECDIPIGAGICASYQTQTNSPRRARSVASQSIIAYTMSLGAENSVAYSNNSCAIPTNFTISVTTEILPVSMTKTSVDCTMYICGDSTECSNLLLQYGSFCTQLNRALTGIAVEQDKNTQEVFAQVKQIYKTPPIKDFGGFNFSQILPDPSKPSKRSFIEDLLFNKVTLADAGFIKQYGDCLGDIAARDLICAQKFNGLTVLPPLLTDEMIAQYTSALLAGTITSGWTFGAGAALQIPFAMQMAYRFNGIGVTQNVLYENQKLIANQFNSAIGKIQDSLSSTASALGKLQDVVNQNAQALNTLVKQLSSNFGAISSVLNDILSRLDKVEAEVQIDRLITGRLQSLQTYVTQQLIRAAEIRASANLAATKMSECVLGQSKRVDFCGKGYHLMSFPQSAPHGVVFLHVTYVPAQEKNFTCAPAICHDGKAHFPREGVFVSNGTHWFVTQRNFYEPQIITTDNTFVSGNCDVVIGIVNNTVYDPLQPELDSFKEELDKYFKNHTSPDVDLGDISGINASVVNIQKEIDRLNEVAKNLNESLIDLQELGKYEQYIKGGGGSDIIKLLNEQVNKEMQSSNLYMSMSSWCYTHSLDGAGLFLFDHAAEEYEHAKKLIIFLNENNVPVQLTSISAPEHKFEGLTQIFQKAYEHEQHISESINNIVDHAIKSKDHATFNFLQWYVAEQHEEEVLFKDILDKIELIGNENHGLYLADQYVKGIAKSRKS

SEQ ID NO: 4999 - protein, 1379 aa, Artificial Sequence
  SARS-CoV-2/South Korea/SNU01/2020__EPI_ISL_411929 spike protein (1-1211)(I712C_T1077C) Ferritin construct
MFVFLVLLPLVSSQCVNLTTRTQLPPAYTNSFTRGVYYPDKVFRSSVLHSTQDLFLPFFSNVTWFHAIHVSGTNGTKRFDNPVLPFNDGVYFASTEKSNIIRGWIFGTTLDSKTQSLLIVNNATNVVIKVCEFQFCNDPFLGVYYHKNNKSWMESEFRVYSSANNCTFEYVSQPFLMDLEGKQGNFKNLREFVFKNIDGYFKIYSKHTPINLVRDLPQGFWALEPLVDLPIGINITRFQTLLALHRSYLTPGDSSSGWTAGAAAYYVGYLQPRTFLLKYNENGTITDAVDCALDPLSETKCTLKSFTVEKGIYQTSNFRVQPTESIVRFPNITNLCPFGEVFNATRFASVYAWNRKRISNCVADYSVLYNSASFSTFKCYGVSPTKLNDLCFTNVYADSFVIRGDEVRQIAPGQTGKIADYNYKLPDDFTGCVIAWNSNNLDSKVGGNYNYLYRLFRKSNLKPFERDISTEIYQAGSTPCNGVEGFNCYFPLQSYGFQPTNGVGYQPYRVVVLSFELLHAPATVCGPKKSTNLVKNKCVNFNFNGLTGTGVLTESNKKFLPFQQFGRDIADTTDAVRDPQTLEILDITPCSFGGVSVITPGTNTSNQVAVLYQDVNCTEVPVAIHADQLTPTWRVYSTGSNVFQTRAGCLIGAEHVNNSYECDIPIGAGICASYQTQTNSPRRARSVASQSIIAYTMSLGAENSVAYSNNSCAIPTNFTISVTTEILPVSMTKTSVDCTMYICGDSTECSNLLLQYGSFCTQLNRALTGIAVEQDKNTQEVFAQVKQIYKTPPIKDFGGFNFSQILPDPSKPSKRSFIEDLLFNKVTLADAGFIKQYGDCLGDIAARDLICAQKFNGLTVLPPLLTDEMIAQYTSALLAGTITSGWTFGAGAALQIPFAMQMAYRFNGIGVTQNVLYENQKLIANQFNSAIGKIQDSLSSTASALGKLQDVVNQNAQALNTLVKQLSSNFGAISSVLNDILSRLDKVEAEVQIDRLITGRLQSLQTYVTQQLIRAAEIRASANLAATKMSECVLGQSKRVDFCGKGYHLMSFPQSAPHGVVFLHVTYVPAQEKNFTCAPAICHDGKAHFPREGVFVSNGTHWFVTQRNFYEPQIITTDNTFVSGNCDVVIGIVNNTVYDPLQPELDSFKEELDKYFKNHTSPDVDLGDISGINASVVNIQKEIDRLNEVAKNLNESLIDLQELGKYEQYIKGGGGSDIIKLLNEQVNKEMQSSNLYMSMSSWCYTHSLDGAGLFLFDHAAEEYEHAKKLIIFLNENNVPVQLTSISAPEHKFEGLTQIFQKAYEHEQHISESINNIVDHAIKSKDHATFNFLQWYVAEQHEEEVLFKDILDKIELIGNENHGLYLADQYVKGIAKSRKS

SEQ ID NO: 5000 - protein, 1379 aa, Artificial Sequence
  SARS-CoV-2/China/WF0004/2020__EPI_ISL_413694 spike protein (1-1211)(I712C_T1077C) Ferritin construct
MFVFLVLLPLVSSQCVNLTTRTQLPPAYTNSFTRGVYYPDKVFRSSVLHSTQDLFLPFFSNVTWFHAIHVSGTNGTKRFDNPVLPFNDGVYFASTEKSNIIRGWIFGTTLDSKTQSLLIVNNATNVVIKVCEFQFCNDPFLGVYYHKNNKSWTESEFRVYSSANNCTFEYVSQPFLMDLEGKQGNFKNLREFVFKNIDGYFKIYSKHTPINLVRDLPQGFSALEPLVDLPIGINITRFQTLLALHRSYLTPGDSSSGWTAGAAAYYVGYLQPRTFLLKYNENGTITDAVDCALDPLSETKCTLKSFTVEKGIYQTSNFRVQPTESIVRFPNITNLCPFGEVFNATRFASVYAWNRKRISNCVADYSVLYNSASFSTFKCYGVSPTKLNDLCFTNVYADSFVIRGDEVRQIAPGQTGKIADYNYKLPDDFTGCVIAWNSNNLDSKVGGNYNYLYRLFRKSNLKPFERDISTEIYQAGSTPCNGVEGFNCYFPLQSYGFQPTNGVGYQPYRVVVLSFELLHAPATVCGPKKSTNLVKNKCVNFNFNGLTGTGVLTESNKKFLPFQQFGRDIADTTDAVRDPQTLEILDITPCSFGGVSVITPGTNTSNQVAVLYQDVNCTEVPVAIHADQLTPTWRVYSTGSNVFQTRAGCLIGAEHVNNSYECDIPIGAGICASYQTQTNSPRRARSVASQSIIAYTMSLGAENSVAYSNNSCAIPTNFTISVTTEILPVSMTKTSVDCTMYICGDSTECSNLLLQYGSFCTQLNRALTGIAVEQDKNTQEVFAQVKQIYKTPPIKDFGGFNFSQILPDPSKPSKRSFIEDLLFNKVTLADAGFIKQYGDCLGDIAARDLICAQKFNGLTVLPPLLTDEMIAQYTSALLAGTITSGWTFGAGAALQIPFAMQMAYRFNGIGVTQNVLYENQKLIANQFNSAIGKIQDSLSSTASALGKLQDVVNQNAQALNTLVKQLSSNFGAISSVLNDILSRLDKVEAEVQIDRLITGRLQSLQTYVTQQLIRAAEIRASANLAATKMSECVLGQSKRFDFCGKGYHLMSFPQSAPHGVVFLHVTYVPAQEKNFTCAPAICHDGKAHFPREGVFVSNGTHWFVTQRNFYEPQIITTDNTFVSGNCDVVIGIVNNTVYDPLQPELDSFKEELDKYFKNHTSPDVDLGDISGINASVVNIQKEIDRLNEVAKNLNESLIDLQELGKYEQYIKGGGGSDIIKLLNEQVNKEMQSSNLYMSMSSWCYTHSLDGAGLFLFDHAAEEYEHAKKLIIFLNENNVPVQLTSISAPEHKFEGLTQIFQKAYEHEQHISESINNIVDHAIKSKDHATFNFLQWYVAEQHEEEVLFKDILDKIELIGNENHGLYLADQYVKGIAKSRKS

SEQ ID NO: 5001 - protein, 1379 aa, Artificial Sequence
  SARS-CoV-2/China/WF0028/2020__EPI_ISL_413791 spike protein (1-1211)(I712C_T1077C) Ferritin construct
MFVFLVLLPLVSSQCVNLTTRTQLPPAYTNSFTRGVYYPDKVFRSSVLHSTQDLFLPFFSNVTWFHAIHVSGTNGTKRFDNPVLPFNDGVYFASTEKSNIIRGWIFGTTLDSKTQSLLIVNNATNVVIKVCEFQFCNDPFLGVYYHKNNKSWMESEFRVYSSANNCTFEYVSQPFLMDLEGKQGNFKNLREFVFKNIDGYFKIYSKHTPINLVRDLPQGFSALEPLVDLPIGINITRFQTLLALHRSYLTPGDSSSGWTAGAAAYYVGYLQPRTFLLKYNENGTITDAVDCALDPLSETKCTLKSFTVEKGIYQTSNFRVQPTESIVRFPNITNLCPFGEVFNATRFASVYAWNRKRISNCVADYSVLYNSASFSTFKCYGVSPTKLNDLCFTNVYADSFVIRGDEVRQIAPGQTGKIADYNYKLPDDFTGCVIAWNSNNLDSKVGGNYNYLYRLFRKSNLKPFERDISTEIYQAGSTPCNGVEGFNCYFPLQSYGFQPTNGVGYQPYRVVVLSFELLHAPATVCGPKKSTNLVKNKCVNFNFNGLTGTGVLTESNKKFLPFQQFGRDIADTTDAVRDPQTLEILDITPCSFGGVSVITPGTNTSNQVAVLYQDVNCTEVPVAIHADQLTPTWRVYSTGSNVFQTRAGCLIGAEHVNNSYECDIPIGAGICASYQTQTNSPRRARSVASQSIIAYTMSLGAENSVAYSNNSCAIPTNFTISVTTEILPVSMTKTSVDCTMYICGDSTECSNLLLQYGSFCTQLNRALTGIAVEQDKNTQEVFAQVKQIYKTPPIKDFGGFNFSQILPDPSKPSKRSFIEDLLFNKVTLADAGFIKQYGDCLGDIAARDLICAQKFNGLTVLPPLLTDEMIAQYTSALLAGTITSGWTFGAGAALQIPFAMQMAYRFNGIGVTQNVLYENQKLIANQFNSAIGKIQDSLSSTASALGKLQDVVNQNAQALNTLVKQLSSNFGAISSVLNDILSRLDKVEAEVQIDRLITGRLQSLQTYVTQQLIRAAEIRASANLAATKMSECVLGQSKRVDFCGKGYHLMSFPQSAPHGVVFLHVTYVPAQEKNFTCAPAICHDGKAHFPREGVFVSNGTHWFVTQRNFYEPQIITTDNTFVSGNCDVVIGIVNNTVYDPLQPELESFKEELDKYFKNHTSPDVDLGDISGINASVVNIQKEIDRLNEVAKNLNESLIDLQELGKYEQYIKGGGGSDIIKLLNEQVNKEMQSSNLYMSMSSWCYTHSLDGAGLFLFDHAAEEYEHAKKLIIFLNENNVPVQLTSISAPEHKFEGLTQIFQKAYEHEQHISESINNIVDHAIKSKDHATFNFLQWYVAEQHEEEVLFKDILDKIELIGNENHGLYLADQYVKGIAKSRKS

SEQ ID NO: 5002 - protein, 1379 aa, Artificial Sequence
  SARS-CoV-2/2019-nCoV/USA-CruiseA-18/2020__MT159716.1 spike protein (1-1211)(I712C_T1077C) Ferritin construct
MFVFLVLLPLVSSQCVNLTTRTQLPPAYTNSFTRGVYYPDKVFRSSVLHSTQDLFLPFFSNVTWFHAIHVSGTNGTKRFDNPVLPFNDGVYFASTEKSNIIRGWIFGTTLDSKTQSLLIVNNATNVVIKVCEFQFCNDPFLGVYYHKNNKSWMESELRVYSSANNCTFEYVSQPFLMDLEGKQGNFKNLREFVFKNIDGYFKIYSKHTPINLVRDLPQGFSALEPLVDLPIGINITRFQTLLALHRSYLTPGDSSSGWTAGAAAYYVGYLQPRTFLLKYNENGTITDAVDCALDPLSETKCTLKSFTVEKGIYQTSNFRVQPTESIVRFPNITNLCPFGEVFNATRFASVYAWNRKRISNCVADYSVLYNSASFSTFKCYGVSPTKLNDLCFTNVYADSFVIRGDEVRQIAPGQTGKIADYNYKLPDDFTGCVIAWNSNNLDSKVGGNYNYLYRLFRKSNLKPFERDISTEIYQAGSTPCNGVEGFNCYFPLQSYGFQPTNGVGYQPYRVVVLSFELLHAPATVCGPKKSTNLVKNKCVNFNFNGLTGTGVLTESNKKFLPFQQFGRDIADTTDAVRDPQTLEILDITPCSFGGVSVITPGTNTSNQVAVLYQDVNCTEVPVAIHADQLTPTWRVYSTGSNVFQTRAGCLIGAEHVNNSYECDIPIGAGICASYQTQTNSPRRARSVASQSIIAYTMSLGAENSVAYSNNSCAIPTNFTISVTTEILPVSMTKTSVDCTMYICGDSTECSNLLLQYGSFCTQLNRALTGIAVEQDKNTQEVFAQVKQIYKTPPIKDFGGFNFSQILPDPSKPSKRSFIEDLLFNKVTLADAGFIKQYGDCLGDIAARDLICAQKFNGLTVLPPLLTDEMIAQYTSALLAGTITSGWTFGAGAALQIPFAMQMAYRFNGIGVTQNVLYENQKLIANQFNSAIGKIQDSLSSTASALGKLQDVVNQNAQALNTLVKQLSSNFGAISSVLNDILSRLDKVEAEVQIDRLITGRLQSLQTYVTQQLIRAAEIRASANLAATKMSECVLGQSKRVDFCGKGYHLMSFPQSAPHGVVFLHVTYVPAQEKNFTCAPAICHDGKAHFPREGVFVSNGTHWFVTQRNFYEPQIITTDNTFVSGNCDVVIGIVNNTVYDPLQPELDSFKEELDKYFKNHTSPDVDLGDISGINASVVNIQKEIDRLNEVAKNLNESLIDLQELGKYEQYIKGGGGSDIIKLLNEQVNKEMQSSNLYMSMSSWCYTHSLDGAGLFLFDHAAEEYEHAKKLIIFLNENNVPVQLTSISAPEHKFEGLTQIFQKAYEHEQHISESINNIVDHAIKSKDHATFNFLQWYVAEQHEEEVLFKDILDKIELIGNENHGLYLADQYVKGIAKSRKS

SEQ ID NO: 5003 - protein, 1379 aa, Artificial Sequence
  SARS-CoV-2/SARS-CoV-2/Yunnan-01/human/2020/CHN__MT049951.1 spike protein (1-1211)(I712C_T1077C) Ferritin construct
MFVFLVLLPLVSSQCVNLTTRTQLPPANTNSFTRGVYYPDKVFRSSVLHSTQDLFLPFFSNVTWFHAIHVSGTNGTKRFDNPVLPFNDGVYFASTEKSNIIRGWIFGTTLDSKTQSLLIVNNATNVVIKVCEFQFCNDPFLGVYYHKNNKSWMESEFRVYSSANNCTFEYVSQPFLMDLEGKQGNFKNLREFVFKNIDGYFKIYSKHTPINLVRDLPQGFSALEPLVDLPIGINITRFQTLLALHRSYLTPGDSSSGWTAGAAAYYVGYLQPRTFLLKYNENGTITDAVDCALDPLSETKCTLKSFTVEKGIYQTSNFRVQPTESIVRFPNITNLCPFGEVFNATRFASVYAWNRKRISNCVADYSVLYNSASFSTFKCYGVSPTKLNDLCFTNVYADSFVIRGDEVRQIAPGQTGKIADYNYKLPDDFTGCVIAWNSNNLDSKVGGNYNYLYRLFRKSNLKPFERDISTEIYQAGSTPCNGVEGFNCYFPLQSYGFQPTNGVGYQPYRVVVLSFELLHAPATVCGPKKSTNLVKNKCVNFNFNGLTGTGVLTESNKKFLPFQQFGRDIADTTDAVRDPQTLEILDITPCSFGGVSVITPGTNTSNQVAVLYQDVNCTEVPVAIHADQLTPTWRVYSTGSNVFQTRAGCLIGAEHVNNSYECDIPIGAGICASYQTQTNSPRRARSVASQSIIAYTMSLGAENSVAYSNNSCAIPTNFTISVTTEILPVSMTKTSVDCTMYICGDSTECSNLLLQYGSFCTQLNRALTGIAVEQDKNTQEVFAQVKQIYKTPPIKDFGGFNFSQILPDPSKPSKRSFIEDLLFNKVTLADAGFIKQYGDCLGDIAARDLICAQKFNGLTVLPPLLTDEMIAQYTSALLAGTITSGWTFGAGAALQIPFAMQMAYRFNGIGVTQNVLYENQKLIANQFNSAIGKIQDSLSSTASALGKLQDVVNQNAQALNTLVKQLSSNFGAISSVLNDILSRLDKVEAEVQIDRLITGRLQSLQTYVTQQLIRAAEIRASANLAATKMSECVLGQSKRVDFCGKGYHLMSFPQSAPHGVVFLHVTYVPAQEKNFTCAPAICHDGKAHFPREGVFVSNGTHWFVTQRNFYEPQIITTDNTFVSGNCDVVIGIVNNTVYDPLQPELDSFKEELDKYFKNHTSPDVDLGDISGINASVVNIQKEIDRLNEVAKNLNESLIDLQELGKYEQYIKGGGGSDIIKLLNEQVNKEMQSSNLYMSMSSWCYTHSLDGAGLFLFDHAAEEYEHAKKLIIFLNENNVPVQLTSISAPEHKFEGLTQIFQKAYEHEQHISESINNIVDHAIKSKDHATFNFLQWYVAEQHEEEVLFKDILDKIELIGNENHGLYLADQYVKGIAKSRKS

SEQ ID NO: 5004 - protein, 1379 aa, Artificial Sequence
  SARS-CoV-2/USA/WA-UW292/2020__EPI_ISL_418077 spike protein (1-1211)(I712C_T1077C) Ferritin construct
MFVFLVLLPLVSSQCVNLTTRTQLPPAYTNSFTRGVYYPDKVFRSSVLHSTQDLFLPFFSNVTWFHAIHVSGTNGTKRFDNPVLPFNDGVYFASTEKSNIIRGWIFGTTLDSKTQSLLIVNNATNVVIKVCEFQFCNDPFLGVYYHKNNKSWMESEFRVYSSANNCTFEYVSQPFLMDLEGKQGNFKNLREFVFKNIDGYFKIYSKHTPINLVRDLPQGFSALEPLVDLPIGINITRFQTLLALHRSYLTPGDSSSGWTAGAAAYYVGYLQPRTFLLKYNENGTITDAVDCALDPLSETKCTLKSFTVEKGIYQTSNFRVQPTESIVRFPNITNLCPFGEVFNATRFASVYAWNRKRISNCVADYSVLYNSASFSTFKCYGVSPTKLNDLCFTNVYADSFVIRGDEVRQIAPGQTGKIADYNYKLPDDFTGCVIAWNSNNLDSKVGGNYNYLYRLFRKSNLKPFERDISTEIYQASSTPCNGVEGFNCYFPLQSYGFQPTNGVGYQPYRVVVLSFELLHAPATVCGPKKSTNLVKNKCVNFNFNGLTGTGVLTESNKKFLPFQQFGRDIADTTDAVRDPQTLEILDITPCSFGGVSVITPGTNTSNQVAVLYQDVNCTEVPVAIHADQLTPTWRVYSTGSNVFQTRAGCLIGAEHVNNSYECDIPIGAGICASYQTQTNSPRRARSVASQSIIAYTMSLGAENSVAYSNNSCAIPTNFTISVTTEILPVSMTKTSVDCTMYICGDSTECSNLLLQYGSFCTQLNRALTGIAVEQDKNTQEVFAQVKQIYKTPPIKDFGGFNFSQILPDPSKPSKRSFIEDLLFNKVTLADAGFIKQYGDCLGDIAARDLICAQKFNGLTVLPPLLTDEMIAQYTSALLAGTITSGWTFGAGAALQIPFAMQMAYRFNGIGVTQNVLYENQKLIANQFNSAIGKIQDSLSSTASALGKLQDVVNQNAQALNTLVKQLSSNFGAISSVLNDILSRLDKVEAEVQIDRLITGRLQSLQTYVTQQLIRAAEIRASANLAATKMSECVLGQSKRVDFCGKGYHLMSFPQSAPHGVVFLHVTYVPAQEKNFTCAPAICHDGKAHFPREGVFVSNGTHWFVTQRNFYEPQIITTDNTFVSGNCDVVIGIVNNTVYDPLQPELDSFKEELDKYFKNHTSPDVDLGDISGINASVVNIQKEIDRLNEVAKNLNESLIDLQELGKYEQYIKGGGGSDIIKLLNEQVNKEMQSSNLYMSMSSWCYTHSLDGAGLFLFDHAAEEYEHAKKLIIFLNENNVPVQLTSISAPEHKFEGLTQIFQKAYEHEQHISESINNIVDHAIKSKDHATFNFLQWYVAEQHEEEVLFKDILDKIELIGNENHGLYLADQYVKGIAKSRKS

SEQ ID NO: 5005 - protein, 1379 aa, Artificial Sequence
  SARS-CoV-2/Iceland/192/2020__EPI_ISL_417819 spike protein (1-1211)(I712C_T1077C) Ferritin construct
MFVFFVLLPLVSSQCVNLTTRTQLPPAYTNSFTRGVYYPDKVFRSSVLHSTQDLFLPFFSNVTWFHAIHVSGTNGTKRFDNPVLPFNDGVYFASTEKSNIIRGWIFGTTLDSKTQSLLIVNNATNVVIKVCEFQFCNDPFLGVYYHKNNKSWMESEFRVYSSANNCTFEYVSQPFLMDLEGKQGNFKNLREFVFKNIDGYFKIYSKHTPINLVRDLPQGFSALEPLVDLPIGINITRFQTLLALHRSYLTPGDSSSGWTAGAAAYYVGYLQPRTFLLKYNENGTITDAVDCALDPLSETKCTLKSFTVEKGIYQTSNFRVQPTESIVRFPNITNLCPFGEVFNATRFASVYAWNRKRISNCVADYSVLYNSASFSTFKCYGVSPTKLNDLCFTNVYADSFVIRGDEVRQIAPGQTGKIADYNYKLPDDFTGCVIAWNSNNLDSKVGGNYNYLYRLFRKSNLKPFERDISTEIYQAGSTPCNGVEGFNCYFPLQSYGFQPTNGVGYQPYRVVVLSFELLHAPATVCGPKKSTNLVKNKCVNFNFNGLTGTGVLTESNKKFLPFQQFGRDIADTTDAVRDPQTLEILDITPCSFGGVSVITPGTNTSNQVAVLYQGVNCTEVPVAIHADQLTPTWRVYSTGSNVFQTRAGCLIGAEHVNNSYECDIPIGAGICASYQTQTNSPRRARSVASQSIIAYTMSLGAENSVAYSNNSCAIPTNFTISVTTEILPVSMTKTSVDCTMYICGDSTECSNLLLQYGSFCTQLNRALTGIAVEQDKNTQEVFAQVKQIYKTPPIKDFGGFNFSQILPDPSKPSKRSFIEDLLFNKVTLADAGFIKQYGDCLGDIAARDLICAQKFNGLTVLPPLLTDEMIAQYTSALLAGTITSGWTFGAGAALQIPFAMQMAYRFNGIGVTQNVLYENQKLIANQFNSAIGKIQDSLSSTASALGKLQDVVNQNAQALNTLVKQLSSNFGAISSVLNDILSRLDKVEAEVQIDRLITGRLQSLQTYVTQQLIRAAEIRASANLAATKMSECVLGQSKRVDFCGKGYHLMSFPQSAPHGVVFLHVTYVPAQEKNFTCAPAICHDGKAHFPREGVFVSNGTHWFVTQRNFYEPQIITTDNTFVSGNCDVVIGIVNNTVYDPLQPELDSFKEELDKYFKNHTSPDVDLGDISGINASVVNIQKEIDRLNEVAKNLNESLIDLQELGKYEQYIKGGGGSDIIKLLNEQVNKEMQSSNLYMSMSSWCYTHSLDGAGLFLFDHAAEEYEHAKKLIIFLNENNVPVQLTSISAPEHKFEGLTQIFQKAYEHEQHISESINNIVDHAIKSKDHATFNFLQWYVAEQHEEEVLFKDILDKIELIGNENHGLYLADQYVKGIAKSRKS

SEQ ID NO: 5006 - protein, 1379 aa, Artificial Sequence
  SARS-CoV-2/Belgium/ULG-6939/2020__EPI_ISL_417020 spike protein (1-1211)(I712C_T1077C) Ferritin construct
MFVFLVLLPLVSSQCVNLTTRTQLPPAYTNSFTRGVYYPDKVFRSSVLHSTQDLFLPFFSNVTWFHAIHVSGTNGTKRFDNPVLPFNDGVYFASTEKSNIIRGWIFGTTLDSKTQSLLIVNNATNVVIKVCEFQFCNDPFLGVYYHKNNKSWMESEFRVYSSANNCTFEYVSQPFLMDLEGKQGNFKNLREFVFKNIDGYFKIYSKHTPINLVRDLPQGFSALEPLVDLPIGINITRFQTLLALHRSYLTPGDSSSGWTAGAAAYYVGYLQPRTFLLKYNENGTITDAVDCALDPLSETKCTLKSFTVEKGIYQTSNFRVQPTESIVRFPNITNLCPFGEVFNATRFASVYAWNRKRISNCVADYSVLYNSASFSTFKCYGVSPTKLNDLCFTNVYADSFVIRGDEVRQIAPGQTGKIADYNYKLPDDFTGCVIAWNSNNLDSKVGGNYNYLYRLFRKSNLKPFERDISTEIYQAGSTPCNGVEGFNCYFPLQSYGFQPTNGVGYQPYRVVVLSFELLHAPATVCGPKKSTNLVKNKCVNFNFNGLTGTGVLTESNKKFLPFQQFGRDIADTTDAVRDPQTLEILDITPCSFGGVSVITPGTNTSNQVAVLYQGVNCTEVPVAIHADQLTPTWRVYSTGSNVFQTRAGCLIGAEHVNNSYECDIPIGAGICASYQTQTNSPRRARSVASQSIIAYTMSLGAENSVVYSNNSCAIPTNFTISVTTEILPVSMTKTSVDCTMYICGDSTECSNLLLQYGSFCTQLNRALTGIAVEQDKNTQEVFAQVKQIYKTPPIKDFGGFNFSQILPDPSKPSKRSFIEDLLFNKVTLADAGFIKQYGDCLGDIAARDLICAQKFNGLTVLPPLLTDEMIAQYTSALLAGTITSGWTFGAGAALQIPFAMQMAYRFNGIGVTQNVLYENQKLIANQFNSAIGKIQDSLSSTASALGKLQDVVNQNAQALNTLVKQLSSNFGAISSVLNDILSRLDKVEAEVQIDRLITGRLQSLQTYVTQQLIRAAEIRASANLAATKMSECVLGQSKRVDFCGKGYHLMSFPQSAPHGVVFLHVTYVPAQEKNFTCAPAICHDGKAHFPREGVFVSNGTHWFVTQRNFYEPQIITTDNTFVSGNCDVVIGIVNNTVYDPLQPELDSFKEELDKYFKNHTSPDVDLGDISGINASVVNIQKEIDRLNEVAKNLNESLIDLQELGKYEQYIKGGGGSDIIKLLNEQVNKEMQSSNLYMSMSSWCYTHSLDGAGLFLFDHAAEEYEHAKKLIIFLNENNVPVQLTSISAPEHKFEGLTQIFQKAYEHEQHISESINNIVDHAIKSKDHATFNFLQWYVAEQHEEEVLFKDILDKIELIGNENHGLYLADQYVKGIAKSRKS

SEQ ID NO: 5007 - protein, 1379 aa, Artificial Sequence
  SARS-CoV-2/France/HF2496/2020__EPI_ISL_418231 spike protein (1-1211)(I712C_T1077C) Ferritin construct
MFVFLVLLPLVSSQCVNLTTRTQLPPAYTNSFTRGVYYPDKVFRSSVLHSTQDLFLPFFSNVTWFHAIHVSGTNGTKRFDNPVLPFNDGVYFASTEKSNIIRGWIFGTTLDSKTQSLLIVNNATNVVIKVCEFQFCNDPFLGVYYHKNNKSWMESEFRVYSSANNCTFEYVSQPFLMDLEGKQGNFKNLREFVFKNIDGYFKIYSKHTPINLVRDLPQGFSALEPLVDLPIGINITRFQTLLALHRSYLTPGDSSSGWTAGAAAYYVGYLQPRTFLLKYNENGTITDAVDCALDPLSETKCTLKSFTVEKGIYQTSNFRVQPTESIVRFPNITNLCPFGEVFNATRFASVYAWNRKRISNCVADYSVLYNSASFSTFKCYGVSPTKLNDLCFTNVYADSFVIRGDEVRQIAPGQTGKIADYNYKLPDDFTGCVIAWNSNNLDSKVGGNYNYLYRLFRKSNLKPFERDISTEIYQAGSTPCNGVEGFNCYFPLQSYGFQPTNGVGYQPYRVVVLSFELLHAPATVCGPKKSTNLVKNKCVNFNFNGLTGTGVLTESNKKFLPFQQFGRDIADTTDAVRDPQTLEILDITPCSFGGVSVITPGTNTSNQVAVLYQGVNCTEVPVAIHADQLTPTWRVYSTGSNVFQTRAGCLIGAEHVNNSYECDIPIGAGICASYQTQTNSPRRARSVASQSIIAYTMSLGAENSVAYSNNSCAIPTNFTISVTTEILPVSMTKTSVDCTMYICGDSTECSNLLLQYGSFCTQLNRALTGIAVEQDKNTQEVFAQVKQIYKTPPIKDFGGFNFSQILPDPSKPSKRSFIEDLLFNKVTLADAGFIKQYGDCLGDIVARDLICAQKFNGLTVLPPLLTDEMIAQYTSALLAGTITSGWTFGAGAALQIPFAMQMAYRFNGIGVTQNVLYENQKLIANQFNSAIGKIQDSLSSTASALGKLQDVVNQNAQALNTLVKQLSSNFGAISSVLNDILSRLDKVEAEVQIDRLITGRLQSLQTYVTQQLIRAAEIRASANLAATKMSECVLGQSKRVDFCGKGYHLMSFPQSAPHGVVFLHVTYVPAQEKNFTCAPAICHDGKAHFPREGVFVSNGTHWFVTQRNFYEPQIITTDNTFVSGNCDVVIGIVNNTVYDPLQPELDSFKEELDKYFKNHTSPDVDLGDISGINASVVNIQKEIDRLNEVAKNLNESLIDLQELGKYEQYIKGGGGSDIIKLLNEQVNKEMQSSNLYMSMSSWCYTHSLDGAGLFLFDHAAEEYEHAKKLIIFLNENNVPVQLTSISAPEHKFEGLTQIFQKAYEHEQHISESINNIVDHAIKSKDHATFNFLQWYVAEQHEEEVLFKDILDKIELIGNENHGLYLADQYVKGIAKSRKS

SEQ ID NO: 5008 - protein, 1379 aa, Artificial Sequence
  SARS-CoV-2/USA/WA-UW291/2020__EPI_ISL_418076 spike protein (1-1211)(I712C_T1077C) Ferritin construct
MFVFLVLLPLVSSQCVNLTTRTQLPPAYTNSFTRGVYYPDKVFRSSVLHSTQDLFLPFFSNVTWFHAIHVSGTNGTKRFDNPVLPFNDGVYFASTEKSNIIRGWIFGTTLDSKTQSLLIVNNATNVVIKVCEFQFCNDPFLGVYYHKNNKSWMESEFRVYSSANNCTFEYVSQPFLMDLEGKQGNFKNLREFVFKNIDGYFKIYSKHTPINLVRDLPQGFSALEPLVDLPIGINITRFQTLLALHRSYLTPGDSSSGWTAGAAAYYVGYLQPRTFLLKYNENGTITDAVDCALDPLSETKCTLKSFTVEKGIYQTSNFRVQPTESIVRFPNITNLCPFGEVFNATRFASVYAWNRKRISNCVADYSVLYNSASFSTFKCYGVSPTKLNDLCFTNVYADSFVIRGDEVRQIAPGQTGKIADYNYKLPDDFTGCVIAWNSNNLDSKVGGNYNYLYRLFRKSNLKPFERDISTEIYQAGSTPCNGVEGFNCYFPLQSYGFQPTNGVGYQPYRVVVLSFELLHAPATVCGPKKSTNLVKNKCVNFNFNGLTGTGVLTESNKKFLPFQQFGRDIADTTDAVRDPQTLEILDITPCSFGGVSVITPGTNTSNQVAVLYQGVNCTEVPVAIHADQLTPTWRVYSTGSNVFQTRAGCLIGAEHVNNSYECDIPIGAGICASYQTQTNSPRRARSVASQSIIAYTMSLGAENSVAYSNNSCAIPTNFTISVTTEILPVSMTKTSVDCTMYICGDSTECSNLLLQYGSFCTQLNRALTGIAVEQDKNTQEVFAQVKQIYKTPPIKDFGGFNFSQILPDPSKPSKRSFIEDLLFNKVTLADAGFIKQYGDCLGDIAARDLICAQKFNGLTVLPPLLTDEMIAQYTSALLAGTITSGWTFGAGAALQIPFAMQMAYRFNGIGVTQNVLYENQKLIANQFNSAIGKIQYSLSSTASALGKLQDVVNQNAQALNTLVKQLSSNFGAISSVLNDILSRLDKVEAEVQIDRLITGRLQSLQTYVTQQLIRAAEIRASANLAATKMSECVLGQSKRVDFCGKGYHLMSFPQSAPHGVVFLHVTYVPAQEKNFTCAPAICHDGKAHFPREGVFVSNGTHWFVTQRNFYEPQIITTDNTFVSGNCDVVIGIVNNTVYDPLQPELDSFKEELDKYFKNHTSPDVDLGDISGINASVVNIQKEIDRLNEVAKNLNESLIDLQELGKYEQYIKGGGGSDIIKLLNEQVNKEMQSSNLYMSMSSWCYTHSLDGAGLFLFDHAAEEYEHAKKLIIFLNENNVPVQLTSISAPEHKFEGLTQIFQKAYEHEQHISESINNIVDHAIKSKDHATFNFLQWYVAEQHEEEVLFKDILDKIELIGNENHGLYLADQYVKGIAKSRKS

SEQ ID NO: 5009 - protein, 1379 aa, Artificial Sequence; identical to SEQ ID NO: 4972
  SARS-CoV-2/Portugal/PT0034/2020__EPI_ISL_418019 spike protein (1-1211)(I712C_T1077C) Ferritin construct

SEQ ID NO: 5010 - protein, 1379 aa, Artificial Sequence
  SARS-CoV-2/Iceland/202/2020__EPI_ISL_417750 spike protein (1-1211)(I712C_T1077C) Ferritin construct
MFVFLVLLPLVSSQCVNLTTRTQLPPAYTNSFTRGVYYPDKVFRSSVLHSTQDLFLPFFSNVTWFHAIHVSGTNGTKRFDNPVLPFNDGVYFASTEKSNIIRGWIFGTTLDSKTQSLLIVNNATNVVIKVCEFQFCNDPFLGVYYHKNNKSWMESEFRVYSSANNCTFEYVSQPFLMDLEGKQGNFKNLREFVFKNIDGYFKIYSKHTPINLVRDLPQGFSALEPLVDLPIGINITRFQTLLALHRSYLTPGDSSSGWTAGAAAYYVGYLQPRTFLLKYNENGTITDAVDCALDPLSETKCTLKSFTVEKGIYQTSNFRVQPTESIVRFPNITNLCPFGEVFNATRFASVYAWNRKRISNCVADYSVLYNSASFSTFKCYGVSPTKLNDLCFTNVYADSFVIRGDEVRQIAPGQTGKIADYNYKLPDDFTGCVIAWNSNNLDSKVGGNYNYLYRLFRKSNLKPFERDISTEIYQAGSTPCNGVEGFNCYFPLQSYGFQPTNGVGYQPYRVVVLSFELLHAPATVCGPKKSTNLVKNKCVNFNFNGLTGTGVLTESNKKFLPFQQFGRDIADTTDAVRDPQTLEILDITPCSFGGVSVITPGTNTSNQVAVLYQDVNCTEVPVAIHADQLTPTWRVYSTGSNVFQTRAGCLIGAEHVNNSYECDIPIGAGICASYQTQTNSPRRARSVASQSIIAYTMSLGAENSVAYSNNSCAIPTNFTISVTTEILPVSMTKTSVDCTMYICGDSTECSNLLLQYGSFCTQLNRALTGIAVEQDKNTQEVFAQVKQIYKTPPIKDFGGFNFSQILPDPSKPSKRSFIEDLLFNKVTLADAGFIKQYGDCLGDIAARDLICAQKFNGLTVLPPLLTDEMIAQYTSALLAGTITSGWTFGAGAALQIPFAMQMAYRFNGIGVTQNVLYENQKLIANQFNSAIGKIQDSLSSTASALGKLQDVVNQNAQALNTLVKQLSSNFGAISSVLNDILSRLDKVEAEVQIDRLITGRLQSLQTYVTQQLIRAAEIRASANLAATKMSECVLGQSKRVDFCGKGYHLMSFPQSAPHGVVFLHVTYVPAQEKNFTCAPAICHDGKAHFPREGVFVSNGTHWFVTQRNFYEPQIITTDNTFVSGNCDVVIGIVNNTVYDPLQPELDSFKEELDKYFKNHTSPDVDLGDIPGINASVVNIQKEIDRLNEVAKNLNESLIDLQELGKYEQYIKGGGGSDIIKLLNEQVNKEMQSSNLYMSMSSWCYTHSLDGAGLFLFDHAAEEYEHAKKLIIFLNENNVPVQLTSISAPEHKFEGLTQIFQKAYEHEQHISESINNIVDHAIKSKDHATFNFLQWYVAEQHEEEVLFKDILDKIELIGNENHGLYLADQYVKGIAKSRKS

SEQ ID NO: 5011 - protein, 1379 aa, Artificial Sequence
  SARS-CoV-2/USA/WA-UW261/2020__EPI_ISL_418046 spike protein (1-1211)(I712C_T1077C) Ferritin construct
MFVFLVLLPLVSSQCVNLTTRTQLPPAYTNSFTRGVYYPDKVFRSSVLHSTQDLFLPFFSNVTWFHAIHVSGTNGTKRFDNPVLPFNDGVYFASTEKSNIIRGWIFGTTLDSKTQSLLIVNNATNVVIKVCEFQFCNDPFLGVYYHKNNKSWMESEFRVYSSANNCTFEYVSQPFLMDLEGKQGNFKNLREFVFKNIDGYFKIYSKHTPINLVRDLPQGFSALEPLVDLPIGINITRFQTLLALHRSYLTPGDSSSGWTAGAAAYYVGYLQPRTFLLKYNENGTITDAVDCALDPLSETKCTLKSFTVEKGIYQTSNFRVQPTESIVRFPNITNLCPFGEVFNATRFTSVYAWNRKRISNCVADYSVLYNSASFSTFKCYGVSPTKLNDLCFTNVYADSFVIRGDEVRQIAPGQTGKIADYNYKLPDDFTGCVIAWNSNNLDSKVGGNYNYLYRLFRKSNLKPFERDISTEIYQAGSTPCNGVEGFNCYFPLQSYGFQPTNGVGYQPYRVVVLSFELLHAPATVCGPKKSTNLVKNKCVNFNFNGLTGTGVLTESNKKFLPFQQFGRDIADTTDAVRDPQTLEILDITPCSFGGVSVITPGTNTSNQVAVLYQDVNCTEVPVAIHADQLTPTWRVYSTGSNVFQTRAGCLIGAEHVNNSYECDIPIGAGICASYQTQTNSPRRARSVASQSIIAYTMSLGAENSVAYSNNSCAIPTNFTISVTTEILPVSMTKTSVDCTMYICGDSTECSNLLLQYGSFCTQLNRALTGIAVEQDKNTQEVFAQVKQIYKTPPIKDFGGFNFSQILPDPSKPSKRSFIEDLLFNKVTLADAGFIKQYGDCLGDIAARDLICAQKFNGLTVLPPLLTDEMIAQYTSALLAGTITSGWTFGAGAALQIPFAMQMAYRFNGIGVTQNVLYENQKLIANQFNSAIGKIQDSLSSTASALGKLQDVVNQNAQALNTLVKQLSSNFGAISSVLNDILSRLDKVEAEVQIDRLITGRLQSLQTYVTQQLIRAAEIRASANLAATKMSECVLGQSKRVDFCGKGYHLMSFPQSAPHGVVFLHVTYVPAQEKNFTCAPAICHDGKAHFPREGVFVSNGTHWFVTQRNFYEPQIITTDNTFVSGNCDVVIGIVNNTVYDPLQPELDSFKEELDKYFKNHTSPDVDLGDISGINASVVNIQKEIDRLNEVAKNLNESLIDLQELGKYEQYIKGGGGSDIIKLLNEQVNKEMQSSNLYMSMSSWCYTHSLDGAGLFLFDHAAEEYEHAKKLIIFLNENNVPVQLTSISAPEHKFEGLTQIFQKAYEHEQHISESINNIVDHAIKSKDHATFNFLQWYVAEQHEEEVLFKDILDKIELIGNENHGLYLADQYVKGIAKSRKS

SEQ ID NO: 5012 - protein, 1379 aa, Artificial Sequence
  SARS-CoV-2/Portugal/PT0035/2020__EPI_ISL_418020 spike protein (1-1211)(I712C_T1077C) Ferritin construct
MFVFLVLLPLVSSQCVNLTTRTQLPPAYTNSFTRGVYYPDKVFRSSVLHSTQDLFLPFFSNVTWFHAIHVSGTNGTKRFDNPVLPFNDGVYFASTEKSNIIRGWIFGTTLDSKTQSLLIVNNATNVVIKVCEFQFCNDPFLGVYYHKNNKSWMESEFRVYSSANNCTFEYVSQPFLMDLEGKQGNFKNLREFVFKNIDGYFKIYSKHTPINLVRDLPQGFSALEPLVDLPIGINITRFQTLLALHRSYLTPGDSSSGWTAGAAAYYVGYLQPRTFLLKYNENGTITDAVDCALDPLSETKCTLKSFTVEKGIYQTSNFRVQPTESIVRFPNITNLCPFGEVFNATRFASVYAWNRKRISNCVADYSVLYNSASFSTFKCYGVSPTKLNDLCFTNVYADSFVIRGDEVRQIAPGQTGKIADYNYKLPDDFTGCVIAWNSNNLDSKVGGNYNYLYRLFRKSNLKPFERDISTEIYQAGSTPCNGVEGFNCYFPLQSYGFQPTNGVGYQPYRVVVLSFELLHAPATVCGPKKSTNLVKNKCVNFNFNGLTGTGVLTESNKKFLPFQQFGRDIADTTDAVRDPQTLEILDITPCSFGGVSVITPGTNTSNQVAVLYQDVNCTEVPVAIHADQLTPTWRVYSTGSNVFQTRAGCLIGAEHVNNSYECDIPIGAGICASYQTQTNSPRRARSVASQSIIAYTMSLGAENSVAYSNNSCAIPTNFTISVTTEILPVSMTKTSVDCTMYICGDSTECSNLLLQYGSFCTQLNRALTGIAVEQDKNTQEVFAQVKQIYKTPPIKDFGGFNFSQILPDPSKPSKRSFIEDLLFNKVTLADAGFIKQYGDCLGDISARDLICAQKFNGLTVLPPLLTDEMIAQYTSALLAGTITSGWTFGAGAALQIPFAMQMAYRFNGIGVTQNVLYENQKLIANQFNSAIGKIQDSLSSTASALGKLQDVVNQNAQALNTLVKQLSSNFGAISSVLNDILSRLDKVEAEVQIDRLITGRLQSLQTYVTQQLIRAAEIRASANLAATKMSECVLGQSKRVDFCGKGYHLMSFPQSAPHGVVFLHVTYVPAQEKNFTCAPAICHDGKAHFPREGVFVSNGTHWFVTQRNFYEPQIITTDNTFVSGNCDVVIGIVNNTVYDPLQPELDSFKEELDKYFKNHTSPDVDLGDISGINASVVNIQKEIDRLNEVAKNLNESLIDLQELGKYEQYIKGGGGSDIIKLLNEQVNKEMQSSNLYMSMSSWCYTHSLDGAGLFLFDHAAEEYEHAKKLIIFLNENNVPVQLTSISAPEHKFEGLTQIFQKAYEHEQHISESINNIVDHAIKSKDHATFNFLQWYVAEQHEEEVLFKDILDKIELIGNENHGLYLADQYVKGIAKSRKS

SEQ ID NO: 5013 - protein, 1379 aa, Artificial Sequence
  SARS-CoV-2/USA/NY-NYUMC7/2020__EPI_ISL_418192 spike protein (1-1211)(I712C_T1077C) Ferritin construct
MFVFLVLLPLVSSQCVNLTTRTQLPPAYTNSFTRGVYYPDKVFRSSVLHSTQDLFLPFFSNVTWFHAIHVSGTNGTKRFDNPVLPFNDGVYFASTEKSNIIRGWIFGTTLDSKTQSLLIVNNATNVVIKVCEFQFCNDPFLGVYHHKNNKSWMESEFRVYSSANNCTFEYVSQPFLMDLEGKQGNFKNLREFVFKNIDGYFKIYSKHTPINLVRDLPQGFSALEPLVDLPIGINITRFQTLLALHRSYLTPGDSSSGWTAGAAAYYVGYLQPRTFLLKYNENGTITDAVDCALDPLSETKCTLKSFTVEKGIYQTSNFRVQPTESIVRFPNITNLCPFGEVFNATRFASVYAWNRKRISNCVADYSVLYNSASFSTFKCYGVSPTKLNDLCFTNVYADSFVIRGDEVRQIAPGQTGKIADYNYKLPDDFTGCVIAWNSNNLDSKVGGNYNYLYRLFRKSNLKPFERDISTEIYQAGSTPCNGVEGFNCYFPLQSYGFQPTNGVGYQPYRVVVLSFELLHAPATVCGPKKSTNLVKNKCVNFNFNGLTGTGVLTESNKKFLPFQQFGRDIADTTDAVRDPQTLEILDITPCSFGGVSVITPGTNTSNQVAVLYQGVNCTEVPVAIHADQLTPTWRVYSTGSNVFQTRAGCLIGAEHVNNSYECDIPIGAGICASYQTQTNSPRRARSVASQSIIAYTMSLGAENSVAYSNNSCAIPTNFTISVTTEILPVSMTKTSVDCTMYICGDSTECSNLLLQYGSFCTQLNRALTGIAVEQDKNTQEVFAQVKQIYKTPPIKDFGGFNFSQILPDPSKPSKRSFIEDLLFNKVTLADAGFIKQYGDCLGDIAARDLICAQKFNGLTVLPPLLTDEMIAQYTSALLAGTITSGWTFGAGAALQIPFAMQMAYRFNGIGVTQNVLYENQKLIANQFNSAIGKIQDSLSSTASALGKLQDVVNQNAQALNTLVKQLSSNFGAISSVLNDILSRLDKVEAEVQIDRLITGRLQSLQTYVTQQLIRAAEIRASANLAATKMSECVLGQSKRVDFCGKGYHLMSFPQSAPHGVVFLHVTYVPAQEKNFTCAPAICHDGKAHFPREGVFVSNGTHWFVTQRNFYEPQIITTDNTFVSGNCDVVIGIVNNTVYDPLQPELDSFKEELDKYFKNHTSPDVDLGDISGINASVVNIQKEIDRLNEVAKNLNESLIDLQELGKYEQYIKGGGGSDIIKLLNEQVNKEMQSSNLYMSMSSWCYTHSLDGAGLFLFDHAAEEYEHAKKLIIFLNENNVPVQLTSISAPEHKFEGLTQIFQKAYEHEQHISESINNIVDHAIKSKDHATFNFLQWYVAEQHEEEVLFKDILDKIELIGNENHGLYLADQYVKGIAKSRKS

SEQ ID NO: 5014 - protein, 1379 aa, Artificial Sequence
  SARS-CoV-2/Iceland/189/2020__EPI_ISL_417709 spike protein (1-1211)(I712C_T1077C) Ferritin construct
MFVFLVLLPLVSSQCVNLTTRTQLPPAYTNSFTRGVYYPDKVFRSSVLHSTQDLFLPFFSNVTWFHAIHVSGTNGTKRFDNPVLPFNDGVYFASTEKSNIIRGWIFGTTLDSKTQSLLIVNNATNVVIKVCEFQFCNDPFLGVYYHKNNKSWMESEFRVYSSANNCTFEYVSQPFLMDLEGKQGNFKNLREFVFKNIDGYFKIYSKHTPINLVRDLPQGFSALEPLVDLPIGINITRFQTLLALHRSYLTPGDSSSGWTAGAAAYYVGYLQPRTFLLKYNENGTITDAVDCALDPLSETKCTLKSFTVEKGIYQTSNFRVQPTESIVRFPNITNLCPFGEVFNATRFASVYAWNRKRISNCVADYSVLYNSASFSTFKCYGVSPTKLNDLCFTNVYADSFVIRGDEVRQIAPGQTGKIADYNYKLPDDFTGCVIAWNSNNLDSKVGGNYNYLYRLFRKSNLKPFERDISTEIYQAGSTPCNGVEGFNCYFPLQSYGFQPTNGVGYQPYRVVVLSFELLHAPATVCGPKKSTNLVKNKCVNFNFNGLTGTGVLTESNKKFLPFQQFGRDIADTTDAVRDPQTLEILDITPCSFGGVSVITPGTNTSNQVAVLYQGVNCTEVPVAIHADQLTPTWRVYSTGSNVFQTRAGCLIGAEHVNNSYECDIPIGAGICASYQTQTNSPRRARSVASQSIIAYTMSLGAENSVAYSNNSCAIPTNFTISVTTEILPVSMTKTSVDCTMYICGDSTECSNLLLQYGSFCTQLNRALTGIAVEQDKNTQEVFAQVKQIYKTPPIKDFGGFNFSQILPDPSKPSKRSFIEDLLFNKVTLADAGFTKQYGDCLGDIAARDLICAQKFNGLTVLPPLLTDEMIAQYTSALLAGTITSGWTFGAGAALQIPFAMQMAYRFNGIGVTQNVLYENQKLIANQFNSAIGKIQDSLSSTASALGKLQDVVNQNAQALNTLVKQLSSNFGAISSVLNDILSRLDKVEAEVQIDRLITGRLQSLQTYVTQQLIRAAEIRASANLAATKMSECVLGQSKRVDFCGKGYHLMSFPQSAPHGVVFLHVTYVPAQEKNFTCAPAICHDGKAHFPREGVFVSNGTHWFVTQRNFYEPQIITTDNTFVSGNCDVVIGIVNNTVYDPLQPELDSFKEELDKYFKNHTSPDVDLGDISGINASVVNIQKEIDRLNEVAKNLNESLIDLQELGKYEQYIKGGGGSDIIKLLNEQVNKEMQSSNLYMSMSSWCYTHSLDGAGLFLFDHAAEEYEHAKKLIIFLNENNVPVQLTSISAPEHKFEGLTQIFQKAYEHEQHISESINNIVDHAIKSKDHATFNFLQWYVAEQHEEEVLFKDILDKIELIGNENHGLYLADQYVKGIAKSRKS

SEQ ID NO: 5015 - protein, 1379 aa, Artificial Sequence
  SARS-CoV-2/Australia/NSW56/2020__EPI_ISL_417408 spike protein (1-1211)(I712C_T1077C) Ferritin construct
MFVFLVLLPLVSSQCVNLTTRTQLPPAYTNSFTRGVYYPDKVFRSSVLHSTQDLFLPFFSNVTWFHAIHVSGTNGTKRFDNPVLPFNDGVYFASTEKSNIIRGWIFGTTLDSKTQSLLIVNNATNVVIKVCEFQFCNDPFLGVYYHKNNKSWMESEFRVYSSANNCTFEYVSQPFLMDLEGKQGNFKNLREFVFKNIDGYFKIYSKHTPINLVRDLPQGFSALEPLVDLPIGINITRFQTLLALHRSYLTPGDSSSGWTAGAAAYYVGYLQPRTFLLKYNENGTITDAVDCALDPLSETKCTLKSFTVEKGIYQTSNFRVQPTESIVRFPNITNLCPFGEVFNATRFASVYAWNRKRISNCVADYSVLYNSASFSTFKCYGVSPTKLNDLCFTNVYADSFVIRGDEVRQIAPGQTGKIADYNYKLPDDFTGCVIAWNSNNLDSKVGGNYNYLYRLFRKSNLKPFERDISTEIYQAGSTPCNGVEGFNCYFPLQSYGFQPTNGVGYQPYRVVVLSFELLHAPATVCGPKKSTNLVKNKCVNFNFNGLTGTGVLTESNKKFLPFQQFGRDIADTTDAVRDPQTLEILDITPCSFGGVSVITPGTNTSNQVAVLYQDVNCTEVPVAIHADQLTPTWRVYSTGSNVFQTRAGCLIGAEHVNNSYECDIPIGAGICASYQTQTNSPRRARSVASQSIIAYTMSLGAENSVAYSNNSCAIPTNFTISVTTEILPVSMTKTSVDCTMYICGDSTECSNLLLQYGSFCTQLNRALTGIAVEQDKNTQEVFAQVKQIYKTPPIKDFGGFNFSQILPDSSKPSKRSFIEDLLFNKVTLADAGFIKQYGDCLGDIAARDLICAQKFNGLTVLPPLLTDEMIAQYTSALLAGTITSGWTFGAGAALQIPFAMQMAYRFNGIGVTQNVLYENQKLIANQFNSAIGKIQDSLSSTASALGKLQDVVNQNAQALNTLVKQLSSNFGAISSVLNDILSRLDKVEAEVQIDRLITGRLQSLQTYVTQQLIRAAEIRASANLAATKMSECVLGQSKRVDFCGKGYHLMSFPQSAPHGVVFLHVTYVPAQEKNFTCAPAICHDGKAHFPREGVFVSNGTHWFVTQRNFYEPQIITTDNTFVSGNCDVVIGIVNNTVYDPLQPELDSFKEELDKYFKNHTSPDVDLGDISGINASVVNIQKEIDRLNEVAKNLNESLIDLQELGKYEQYIKGGGGSDIIKLLNEQVNKEMQSSNLYMSMSSWCYTHSLDGAGLFLFDHAAEEYEHAKKLIIFLNENNVPVQLTSISAPEHKFEGLTQIFQKAYEHEQHISESINNIVDHAIKSKDHATFNFLQWYVAEQHEEEVLFKDILDKIELIGNENHGLYLADQYVKGIAKSRKS

SEQ ID NO: 5016 - protein, 1379 aa, Artificial Sequence
  SARS-CoV-2/Iceland/280/2020__EPI_ISL_417608 spike protein (1-1211)(I712C_T1077C) Ferritin construct
MFVFLVLLPLVSSQCVNLTTRTQLPPAYTNSFTRGVYYPDKVFRSSVLHSTQDLFLPFFSNVTWFHAIHVSGTNGTKRFDNPVLPFNDGVYFASTEKSNIIRGWIFGTTLDSKTQSLLIVNNATNVVIKVCEFQFCNDPFLGVYYHKNNKSWMESEFRVYSSANNCTFEYVSQPFLMDLEGKQGNFKNLREFVFKNIDGYFKIYSKHTPINLVRDLPQGFSALEPLVDLPIGINITRFQTLLALHRSYLTPGDSSSGWTAGAAAYYVGYLQPRTFLLKYNENGTITDAVDCALDPLSETKCTLKSFTVEKGIYQTSNFRVQPTESIVRFPNITNLCPFGEVFNATRFASVYAWNRKRISNCVADYSVLYNSASFSTFKCYGVSPTKLNDLCFTNVYADSFVIRGDEVRQIAPGQTGKIADYNYKLPDDFTGCVIAWNSNNLDSKVGGNYNYLYRLFRKSNLKPFERDISTEIYQAGSTPCNGVEGFNCYFPLQSYGFQPTNGVGYQPYRVVVLSFELLHAPATVCGPKKSTNLVKNKCVNFNFNGLTGTGVLTESNKKFLPFQQFGRDIADTTDAVRDPQTLEILDITPCSFGGVSVITPGTNTSNQVAVLYQGVNCTEVPVAIHADQLTPTWRVYSTGSNVFQTRAGCLIGAEHVNNSYECDIPIGAGICASYHTQTNSPRRARSVASQSIIAYTMSLGAENSVAYSNNSCAIPTNFTISVTTEILPVSMTKTSVDCTMYICGDSTECSNLLLQYGSFCTQLNRALTGIAVEQDKNTQEVFAQVKQIYKTPPIKDFGGFNFSQILPDPSKPSKRSFIEDLLFNKVTLADAGFIKQYGDCLGDIAARDLICAQKFNGLTVLPPLLTDEMIAQYTSALLAGTITSGWTFGAGAALQIPFAMQMAYRFNGIGVTQNVLYENQKLIANQFNSAIGKIQDSLSSTASALGKLQDVVNQNAQALNTLVKQLSSNFGAISSVLNDILSRLDKVEAEVQIDRLITGRLQSLQTYVTQQLIRAAEIRASANLAATKMSECVLGQSKRVDFCGKGYHLMSFPQSAPHGVVFLHVTYVPAQEKNFTCAPAICHDGKAHFPREGVFVSNGTHWFVTQRNFYEPQIITTDNTFVSGNCDVVIGIVNNTVYDPLQPELDSFKEELDKYFKNHTSPDVDLGDISGINASVVNIQKEIDRLNEVAKNLNESLIDLQELGKYEQYIKGGGGSDIIKLLNEQVNKEMQSSNLYMSMSSWCYTHSLDGAGLFLFDHAAEEYEHAKKLIIFLNENNVPVQLTSISAPEHKFEGLTQIFQKAYEHEQHISESINNIVDHAIKSKDHATFNFLQWYVAEQHEEEVLFKDILDKIELIGNENHGLYLADQYVKGIAKSRKS

SEQ ID NO: 5017 - protein, 1379 aa, Artificial Sequence; identical to SEQ ID NO: 4972
  SARS-CoV-2/Iceland/247/2020__EPI_ISL_417575 spike protein (1-1211)(I712C_T1077C) Ferritin construct

SEQ ID NO: 5018 - protein, 1379 aa, Artificial Sequence
  SARS-CoV-2/Iceland/238/2020__EPI_ISL_417566 spike protein (1-1211)(I712C_T1077C) Ferritin construct
MFVFLVLLPLVSSQCVNLTTRTQLPPAYTNSFTRGVYYPDKVFRSSVLHSTQDLFLPFFSNVTWFHAIHVSGTNGTKRFDNPVLPFNDGVYFASTEKSNIIRGWIFGTTLDSKTQSLLIVNNATNVVIKVCEFQFCNDPFLGVYYHKNNKSWMESEFRVYSSANNCTFEYVSQPFLMDLEGKQGNFKNLREFVFKNIDGYFKIYSKHTPINLVRDLPQGFSALEPLVDLPIGINITRFQTLLALHRSYLTPGDSSSGWTAGAAAYYVGYLQPRTFLLKYNENGTITDAVDCALDPLSETKCTLKSFTVEKGIYQTSNFRVQPTESIVRFPNITNLCPFGEVFNATRFASVYAWNRKRISNCVADYSVLYNSASFSTFKCYGVSPTKLNDLCFTNVYADSFVIRGDEVRQIAPGQTGKIADYNYKLPDDFTGCVIAWNSNNLDSKVGGNYNYLYRLFRKSNLKPFERDISTEIYQAGSTPCNGVEGFNCYFPLQSYGFQPTNGVGYQPYRVVVLSFELLHAPATVCGPKKSTNLVKNKCVNFNFNGLTGTGVLTESNKKFLPFQQFGRDIADTTDAVRDPQTLEILDITPCSFGGVSVITPGTNTSNQVAVLYQGVNCTEVPVAIHADQLTPTWRVYSTGSNVFQTRAGCLIGAEHVNNSYECDIPIGAGICASYQTQTNSPRRARSVASQSIIAYTMSLGAENSVAYSNNSCAIPTNFTISVTTEILPVSMTKTSVDCTMYICGDSTECSNLLLQYGSFCTQLNRALTGIAVEQDKNTQEVFAQVKQIYKTPPIKDFGGFNFSQILPDPSKPSKRSFIEDLLFNKVTLADVGFIKQYGDCLGDIAARDLICAQKFNGLTVLPPLLTDEMIAQYTSALLAGTITSGWTFGAGAALQIPFAMQMAYRFNGIGVTQNVLYENQKLIANQFNSAIGKIQDSLSSTASALGKLQDVVNQNAQALNTLVKQLSSNFGAISSVLNDILSRLDKVEAEVQIDRLITGRLQSLQTYVTQQLIRAAEIRASANLAATKMSECVLGQSKRVDFCGKGYHLMSFPQSAPHGVVFLHVTYVPAQEKNFTCAPAICHDGKAHFPREGVFVSNGTHWFVTQRNFYEPQIITTDNTFVSGNCDVVIGIVNNTVYDPLQPELDSFKEELDKYFKNHTSPDVDLGDISGINASVVNIQKEIDRLNEVAKNLNESLIDLQELGKYEQYIKGGGGSDIIKLLNEQVNKEMQSSNLYMSMSSWCYTHSLDGAGLFLFDHAAEEYEHAKKLIIFLNENNVPVQLTSISAPEHKFEGLTQIFQKAYEHEQHISESINNIVDHAIKSKDHATFNFLQWYVAEQHEEEVLFKDILDKIELIGNENHGLYLADQYVKGIAKSRKS

SEQ ID NO: 5019 - protein, 1379 aa, Artificial Sequence
  SARS-CoV-2/Greece/16/2020__EPI_ISL_418265 spike protein (1-1211)(I712C_T1077C) Ferritin construct
MFVFLVLLPLVSSQCVNLTTRTQLPPAYTNSFTRGVYYPDKVFRSSVLHSTQDLFLPFFSNVTWFHAIHVSGTNGTKRFDNPVLPFNDGVYFASTEKSNIIRGWIFGTTLDSKTQSLLIVNNATNVVIKVCEFQFCNDPFLGVYYHKNNKSWMESEFRVYSSANNCTFEYVSQPFLMDLEGKQGNFKNLREFVFKNVDGYFKIYSKHTPINLVRDLPQGFSALEPLVDLPIGINITRFQTLLALHRSYLTPGDSSSGWTAGAAAYYVGYLQPRTFLLKYNENGTITDAVDCALDPLSETKCTLKSFTVEKGIYQTSNFRVQPTESIVRFPNITNLCPFGEVFNATRFASVYAWNRKRISNCVADYSVLYNSASFSTFKCYGVSPTKLNDLCFTNVYADSFVIRGDEVRQIAPGQTGKIADYNYKLPDDFTGCVIAWNSNNLDSKVGGNYNYLYRLFRKSNLKPFERDISTEIYQAGSTPCNGVEGFNCYFPLQSYGFQPTNGVGYQPYRVVVLSFELLHAPATVCGPKKSTNLVKNKCVNFNFNGLTGTGVLTESNKKFLPFQQFGRDIADTTDAVRDPQTLEILDITPCSFGGVSVITPGTNTSNQVAVLYQDVNCTEVPVAIHADQLTPTWRVYSTGSNVFQTRAGCLIGAEHVNNSYECDIPIGAGICASYQTQTNSPRRARSVASQSIIAYTMSLGAENSVAYSNNSCAIPTNFTISVTTEILPVSMTKTSVDCTMYICGDSTECSNLLLQYGSFCTQLNRALTGIAVEQDKNTQEVFAQVKQIYKTPPIKDFGGFNFSQILPDPSKPSKRSFIEDLLFNKVTLADAGFIKQYGDCLGDIAARDLICAQKFNGLTVLPPLLTDEMIAQYTSALLAGTITSGWTFGAGAALQIPFAMQMAYRFNGIGVTQNVLYENQKLIANQFNSAIGKIQDSLSSTASALGKLQDVVNQNAQALNTLVKQLSSNFGAISSVLNDILSRLDKVEAEVQIDRLITGRLQSLQTYVTQQLIRAAEIRASANLAATKMSECVLGQSKRVDFCGKGYHLMSFPQSAPHGVVFLHVTYVPAQEKNFTCAPAICHDGKAHFPREGVFVSNGTHWFVTQRNFYEPQIITTDNTFVSGNCDVVIGIVNNTVYDPLQPELDSFKEELDKYFKNHTSPDVDLGDISGINASVVNIQKEIDRLNEVAKNLNESLIDLQELGKYEQYIKGGGGSDIIKLLNEQVNKEMQSSNLYMSMSSWCYTHSLDGAGLFLFDHAAEEYEHAKKLIIFLNENNVPVQLTSISAPEHKFEGLTQIFQKAYEHEQHISESINNIVDHAIKSKDHATFNFLQWYVAEQHEEEVLFKDILDKIELIGNENHGLYLADQYVKGIAKSRKS

SEQ ID NO: 5020 - protein, 1379 aa, Artificial Sequence
  SARS-CoV-2/Iceland/319/2020__EPI_ISL_417648 spike protein (1-1211)(I712C_T1077C) Ferritin construct
MFVFLVLLPLVSSQCVNLTTRTQLPPAYTNSFTRGVYYPDKVFRSSVLHSTQDLFLPFFSNVTWFHAIHVSGTNGTKRFDNPVLPFNDGVYFASTEKSNIIRGWIFGTTLDSKTQSLLIVNNATNVVIKVCEFQFCNDPFLGVYYHKNNKSWMESEFRVYSSANNCTFEYVSQPFLIDLEGKQGNFKNLREFVFKNIDGYFKIYSKHTPINLVRDLPQGFSALEPLVDLPIGINITRFQTLLALHRSYLTPGDSSSGWTAGAAAYYVGYLQPRTFLLKYNENGTITDAVDCALDPLSETKCTLKSFTVEKGIYQTSNFRVQPTESIVRFPNITNLCPFGEVFNATRFASVYAWNRKRISNCVADYSVLYNSASFSTFKCYGVSPTKLNDLCFTNVYADSFVIRGDEVRQIAPGQTGKIADYNYKLPDDFTGCVIAWNSNNLDSKVGGNYNYLYRLFRKSNLKPFERDISTEIYQAGSTPCNGVEGFNCYFPLQSYGFQPTNGVGYQPYRVVVLSFELLHAPATVCGPKKSTNLVKNKCVNFNFNGLTGTGVLTESNKKFLPFQQFGRDIADTTDAVRDPQTLEILDITPCSFGGVSVITPGTNTSNQVAVLYQGVNCTEVPVAIHADQLTPTWRVYSTGSNVFQTRAGCLIGAEHVNNSYECDIPIGAGICASYQTQTNSPRRARSVASQSIIAYTMSLGAENSVAYSNNSCAIPTNFTISVTTEILPVSMTKTSVDCTMYICGDSTECSNLLLQYGSFCTQLNRALTGIAVEQDKNTQEVFAQVKQIYKTPPIKDFGGFNFSQILPDPSKPSKRSFIEDLLFNKVTLADAGFIKQYGDCLGDIAARDLICAQKFNGLTVLPPLLTDEMIAQYTSALLAGTITSGWTFGAGAALQIPFAMQMAYRFNGIGVTQNVLYENQKLIANQFNSAIGKIQDSLSSTASALGKLQDVVNQNAQALNTLVKQLSSNFGAISSVLNDILSRLDKVEAEVQIDRLITGRLQSLQTYVTQQLIRAAEIRASANLAATKMSECVLGQSKRVDFCGKGYHLMSFPQSAPHGVVFLHVTYVPAQEKNFTCAPAICHDGKAHFPREGVFVSNGTHWFVTQRNFYEPQIITTDNTFVSGNCDVVIGIVNNTVYDPLQPELDSFKEELDKYFKNHTSPDVDLGDISGINASVVNIQKEIDRLNEVAKNLNESLIDLQELGKYEQYIKGGGGSDIIKLLNEQVNKEMQSSNLYMSMSSWCYTHSLDGAGLFLFDHAAEEYEHAKKLIIFLNENNVPVQLTSISAPEHKFEGLTQIFQKAYEHEQHISESINNIVDHAIKSKDHATFNFLQWYVAEQHEEEVLFKDILDKIELIGNENHGLYLADQYVKGIAKSRKS

SEQ ID NO: 5021 - protein, 1379 aa, Artificial Sequence
  SARS-CoV-2/Congo/94/2020__EPI_ISL_417947 spike protein (1-1211)(I712C_T1077C) Ferritin construct
MFVFLVLLPLVSSQCVNLTTRTQLPPAYTNSFTRGVYYPDKVFRSSVLHSTQDLFLPFFSNVTWFHAIHVSGTNGTKRFDNPVLPFNDGVYFASTEKSNIIRGWIFGTTLDSKTQSLLIVNNATNVVIKVCEFQFCNDPFLGVYYHKNNKSWMESEFRVYSSANNCTFEYVSQPFLMDLEGKQGNFKNLREFVFKNIDGYFKIYSKHTPINLVRDLPQGFSALEPLVDLPIGINITRFQTLLALHRSYLTPGDSSSGWTAGAAAYYVGYLQPRTFLLKYNENGTITDAVDCALDPLSETKCTLKSFTVEKGIYQTSNFRVQPTESIVRFPNITNLCPFGEVFNATRFASVYAWNRKRISNCVADYSVLYNSASFSTFKCYGVSPTKLNDLCFTNVYADSFVIRGDEVRQIAPGQTGKIADYNYKLPDDFTGCVIAWNSNNLDSKVGGNYNYLYRLFRKSNLKPFERDISTEIYQAGSTPCNGVEGFNCYFPLQSYGFQPTNGVGYQPYRVVVLSFELLHAPATVCGPKKSTNLVKNKCVNFNFNGLTGTGVLTESNKKFLPFQQFGRDIADTTDAVRDPQTLEILDITPCSFGGVSVITPGTNTSNQVAVLYQGVNCTEVPVAIHADQLTPTWRVYSTGSNVFQTRAGCLIGAEHVNNSYECDIPIGAGICASYQTQTNSPRRARSVASQSIIAYTMSLGAENSVAYSNNSCAIPTNFTISVTTEILPVSMTKTSVDCTMYICGDSTECSNLLLQYGSFCTQLNRALTGIAVEQDKNTQEVFAQVKQIYKTPPIKDFGGFNFSQILPDPSKPSKRSFIEDILFNKVTLADAGFIKQYGDCLGDIAARDLICAQKFNGLTVLPPLLTDEMIAQYTSALLAGTITSGWTFGAGAALQIPFAMQMAYRFNGIGVTQNVLYENQKLIANQFNSAIGKIQDSLSSTASALGKLQDVVNQNAQALNTLVKQLSSNFGAISSVLNDILSRLDKVEAEVQIDRLITGRLQSLQTYVTQQLIRAAEIRASANLAATKMSECVLGQSKRVDFCGKGYHLMSFPQSAPHGVVFLHVTYVPAQEKNFTCAPAICHDGKAHFPREGVFVSNGTHWFVTQRNFYEPQIITTDNTFVSGNCDVVIGIVNNTVYDPLQPELDSFKEELDKYFKNHTSPDVDLGDISGINASVVNIQKEIDRLNEVAKNLNESLIDLQELGKYEQYIKGGGGSDIIKLLNEQVNKEMQSSNLYMSMSSWCYTHSLDGAGLFLFDHAAEEYEHAKKLIIFLNENNVPVQLTSISAPEHKFEGLTQIFQKAYEHEQHISESINNIVDHAIKSKDHATFNFLQWYVAEQHEEEVLFKDILDKIELIGNENHGLYLADQYVKGIAKSRKS

SEQ ID NO: 5022 - protein, 1379 aa, Artificial Sequence
  SARS-CoV-2/Congo/158/2020__EPI_ISL_417950 spike protein (1-1211)(I712C_T1077C) Ferritin construct
MFVFLVLLPLVSSQCVNLTTRTQLPPAYTNSFTRGVYYPDKVFRSSVLHSTQDLFLPFFSNVTWFHAIHVSGTNGTKRFDNPVLPFNDGVYFASTEKSNIIRGWIFGTTLDSKTQSLLIVNNATNVVIKVCEFQFCNDPFLGVYYHKNNKSWMESEFRVYSSANNCTFEYVSQPFLMDLEGKQGNFKNLREFVFKNIDGYFKIYSKHTPINLVRDLPQGFSALEPLVDLPIGINITRFQTLLALHRSYLTPGDSSSGWTAGAAAYYVGYLQPRTFLLKYNENGTITDAVDCALDPLSETKCTLKSFTVEKGIYQTSNFRVQPTESIVRFPNITNLCPFGEVFNATRFASVYAWNRKRISNCVADYSVLYNSASFSTFKCYGVSPTKLNDLCFTNVYADSFVIRGDEVRQIAPGQTGKIADYNYKLPDDFTGCVIAWNSNNLDSKVGGNYNYLYRLFRKSNLKPFERDISTEIYQAGSTPCNGVEGFNCYFPLQSYGFQPTNGVGYQPYRVVVLSFELLHAPATVCGPKKSTNLVKNKCVNFNFNGLTGTGVLTESNKKFLPFQQFGRDIADTTDAVRDPQTLEILDITPCSFGGVSVITPGTNTSNQVAVLYQDVNCTEVPVAIHADQLTPTWRVYSTGSNVFQTRAGCLIGAEHVNNSYECDIPIGAGICASYQTQTNSPRRARSVASQSIIAYTMSLGAENSVAYSNNSCAIPTNFTISVTTEILPVSMTKTSVDCTMYICGDSTECSNLLLQYGSFCTQLNRALTGIAVEQDKNTQEVFAQVKQIYKTPPIKDFGGFNFSQILPDPSKPSKRSFIEDLLFNKVTLADAGFIKQYGDCLGDIAARDLICAQKFNGLTVLPPLLTDEMIAQYTSALLAGTITSGWTFGAGAALQIPFAMQMAYRFNGIGVTQNVLYENQKLIANQFNSAIGKIQDSLSSTASALGKLQDVVNQNAQALNTLVKQLSSNFGAISSVLNDILSRLDKVEAEVQIDRLITGRLQSLQTYVTQQLIRAAEIRASANLAATKMSECVLGQSKRVDFCGKGYHLMSFPQSAPHGVVFLHVTYVPAQEKNFTCAPAICHDGKAHFPREGVFVSNGTHWFVTQRNFYEPQIITTDNTFLSGNCDVVIGIVNNTVYDPLQPELDSFKEELDKYFKNHTSPDVDLGDISGINASVVNIQKEIDRLNEVAKNLNESLIDLQELGKYEQYIKGGGGSDIIKLLNEQVNKEMQSSNLYMSMSSWCYTHSLDGAGLFLFDHAAEEYEHAKKLIIFLNENNVPVQLTSISAPEHKFEGLTQIFQKAYEHEQHISESINNIVDHAIKSKDHATFNFLQWYVAEQHEEEVLFKDILDKIELIGNENHGLYLADQYVKGIAKSRKS

SEQ ID NO: 5023 - protein, 1379 aa, Artificial Sequence
  SARS-CoV-2/USA/UT-00034/2020__EPI_ISL_417977 spike protein (1-1211)(I712C_T1077C) Ferritin construct
MFVFLVLLPLVSSQCVNLTTRTQLPPAYTNSFTRGVYYPDKVFRSSVLHSTQDLFLPFFSNVTWFHAIHVSGTNGTKRFDNPVLPFNDGVYFASTEKSNIIRGWIFGTTLDSKTQSLLIVNNATNVVIKVCEFQFCNDPFLGVYYYKNNKSWMESEFRVYSSANNCTFEYVSQPFLMDLEGKQGNFKNLREFVFKNIDGYFKIYSKHTPINLVRDLPQGFSALEPLVDLPIGINITRFQTLLALHRSYLTPGDSSSGWTAGAAAYYVGYLQPRTFLLKYNENGTITDAVDCALDPLSETKCTLKSFTVEKGIYQTSNFRVQPTESIVRFPNITNLCPFGEVFNATRFASVYAWNRKRISNCVADYSVLYNSASFSTFKCYGVSPTKLNDLCFTNVYADSFVIRGDEVRQIAPGQTGKIADYNYKLPDDFTGCVIAWNSNNLDSKVGGNYNYLYRLFRKSNLKPFERDISTEIYQAGSTPCNGVEGFNCYFPLQSYGFQPTNGVGYQPYRVVVLSFELLHAPATVCGPKKSTNLVKNKCVNFNFNGLTGTGVLTESNKKFLPFQQFGRDIADTTDAVRDPQTLEILDITPCSFGGVSVITPGTNTSNQVAVLYQGVNCTEVPVAIHADQLTPTWRVYSTGSNVFQTRAGCLIGAEHVNNSYECDIPIGAGICASYQTQTNSPRRARSVASQSIIAYTMSLGAENSVAYSNNSCAIPTNFTISVTTEILPVSMTKTSVDCTMYICGDSTECSNLLLQYGSFCTQLNRALTGIAVEQDKNTQEVFAQVKQIYKTPPIKDFGGFNFSQILPDPSKPSKRSFIEDLLFNKVTLADAGFIKQYGDCLGDIAARDLICAQKFNGLTVLPPLLTDEMIAQYTSALLAGTITSGWTFGAGAALQIPFAMQMAYRFNGIGVTQNVLYENQKLIANQFNSAIGKIQDSLSSTASALGKLQDVVNQNAQALNTLVKQLSSNFGAISSVLNDILSRLDKVEAEVQIDRLITGRLQSLQTYVTQQLIRAAEIRASANLAATKMSECVLGQSKRVDFCGKGYHLMSFPQSAPHGVVFLHVTYVPAQEKNFTCAPAICHDGKAHFPREGVFVSNGTHWFVTQRNFYEPQIITTDNTFVSGNCDVVIGIVNNTVYDPLQPELDSFKEELDKYFKNHTSPDVDLGDISGINASVVNIQKEIDRLNEVAKNLNESLIDLQELGKYEQYIKGGGGSDIIKLLNEQVNKEMQSSNLYMSMSSWCYTHSLDGAGLFLFDHAAEEYEHAKKLIIFLNENNVPVQLTSISAPEHKFEGLTQIFQKAYEHEQHISESINNIVDHAIKSKDHATFNFLQWYVAEQHEEEVLFKDILDKIELIGNENHGLYLADQYVKGIAKSRKS

SEQ ID NO: 5024 - protein, 1379 aa, Artificial Sequence
  SARS-CoV-2/USA/UT-00033/2020__EPI_ISL_417976 spike protein (1-1211)(I712C_T1077C) Ferritin construct
MFVFLVLLPLVSSQCVNLTTRTQLPPAYTNSFTRGVYYPDKVFRSSVLHSTQDLFLPFFSNVTWFHAIHVSGTNGTKRFDNPVLPFNDGVYFASTEKSNIIRGWIFGTTLDSKTQSLLIVNNATNVVIKVCEFQFCNDPFLGVYYHKNNKSWMESEFRVYSSANNCTFEYVSQPFLMDLEGKQGNFKNLREFVFKNIDGYFKIYSKHTPINLVRDLPQGFSALEPLVDLPIGINITRFQTLLALHRSYLTPGDSSSGLTAGAAAYYVGYLQPRTFLLKYNENGTITDAVDCALDPLSETKCTLKSFTVEKGIYQTSNFRVQPTESIVRFPNITNLCPFGEVFNATRFASVYAWNRKRISNCVADYSVLYNSASFSTFKCYGVSPTKLNDLCFTNVYADSFVIRGDEVRQIAPGQTGKIADYNYKLPDDFTGCVIAWNSNNLDSKVGGNYNYLYRLFRKSNLKPFERDISTEIYQAGSTPCNGVEGFNCYFPLQSYGFQPTNGVGYQPYRVVVLSFELLHAPATVCGPKKSTNLVKNKCVNFNFNGLTGTGVLTESNKKFLPFQQFGRDIADTTDAVRDPQTLEILDITPCSFGGVSVITPGTNTSNQVAVLYQGVNCTEVPVAIHADQLTPTWRVYSTGSNVFQTRAGCLIGAEHVNNSYECDIPIGAGICASYQTQTNSPRRARSVASQSIIAYTMSLGAENSVAYSNNSCAIPTNFTISVTTEILPVSMTKTSVDCTMYICGDSTECSNLLLQYGSFCTQLNRALTGIAVEQDKNTQEVFAQVKQIYKTPPIKDFGGFNFSQILPDPSKPSKRSFIEDLLFNKVTLADAGFIKQYGDCLGDIAARDLICAQKFNGLTVLPPLLTDEMIAQYTSALLAGTITSGWTFGAGAALQIPFAMQMAYRFNGIGVTQNVLYENQKLIANQFNSAIGKIQDSLSSTASALGKLQDVVNQNAQALNTLVKQLSSNFGAISSVLNDILSRLDKVEAEVQIDRLITGRLQSLQTYVTQQLIRAAEIRASANLAATKMSECVLGQSKRVDFCGKGYHLMSFPQSAPHGVVFLHVTYVPAQEKNFTCAPAICHDGKAHFPREGVFVSNGTHWFVTQRNFYEPQIITTDNTFVSGNCDVVIGIVNNTVYDPLQPELDSFKEELDKYFKNHTSPDVDLGDISGINASVVNIQKEIDRLNEVAKNLNESLIDLQELGKYEQYIKGGGGSDIIKLLNEQVNKEMQSSNLYMSMSSWCYTHSLDGAGLFLFDHAAEEYEHAKKLIIFLNENNVPVQLTSISAPEHKFEGLTQIFQKAYEHEQHISESINNIVDHAIKSKDHATFNFLQWYVAEQHEEEVLFKDILDKIELIGNENHGLYLADQYVKGIAKSRKS

SEQ ID NO: 5025 - protein, 1379 aa, Artificial Sequence
  SARS-CoV-2/USA/WI-13/2020__EPI_ISL_417516 spike protein (1-1211)(I712C_T1077C) Ferritin construct
MFVFLVLLPLVSSQCVNLTTRTQLPPAYTNSFTRGVYYPDKVFRSSVLHSTQDLFLPFFSNVTWFHAIHVSGTNGTKRFDNPVLPFNDGVYFASTEKSNIIRGWIFGTTLDSKTQSLLIVNNATNVVIKVCEFQFCNDPFLGVYYHKNNKSWMESEFRVYSSANNCTFEYVSQPFLMDLEGKQGNFKNLREFVFKNIDGYFKIYSKHTPINLVRDLPQGFSALEPLVDLPIGINITRFQTLLALHRSYLTPGDSSSGWTAGAAAYYVGYLQPRTFLLKYNENGTITDAVDCALDPLSETKCTLKSFTVEKGIYQTSNFRVLPTESIVRFPNITNLCPFGEVFNATRFASVYAWNRKRISNCVADYSVLYNSASFSTFKCYGVSPTKLNDLCFTNVYADSFVIRGDEVRQIAPGQTGKIADYNYKLPDDFTGCVIAWNSNNLDSKVGGNYNYLYRLFRKSNLKPFERDISTEIYQAGSTPCNGVEGFNCYFPLQSYGFQPTNGVGYQPYRVVVLSFELLHAPATVCGPKKSTNLVKNKCVNFNFNGLTGTGVLTESNKKFLPFQQFGRDIADTTDAVRDPQTLEILDITPCSFGGVSVITPGTNTSNQVAVLYQGVNCTEVPVAIHADQLTPTWRVYSTGSNVFQTRAGCLIGAEHVNNSYECDIPIGAGICASYQTQTNSPRRARSVASQSIIAYTMSLGAENSVAYSNNSCAIPTNFTISVTTEILPVSMTKTSVDCTMYICGDSTECSNLLLQYGSFCTQLNRALTGIAVEQDKNTQEVFAQVKQIYKTPPIKDFGGFNFSQILPDPSKPSKRSFIEDLLFNKVTLADAGFIKQYGDCLGDIAARDLICAQKFNGLTVLPPLLTDEMIAQYTSALLAGTITSGWTFGAGAALQIPFAMQMAYRFNGIGVTQNVLYENQKLIANQFNSAIGKIQDSLSSTASALGKLQDVVNQNAQALNTLVKQLSSNFGAISSVLNDILSRLDKVEAEVQIDRLITGRLQSLQTYVTQQLIRAAEIRASANLAATKMSECVLGQSKRVDFCGKGYHLMSFPQSAPHGVVFLHVTYVPAQEKNFTCAPAICHDGKAHFPREGVFVSNGTHWFVTQRNFYEPQIITTDNTFVSGNCDVVIGIVNNTVYDPLQPELDSFKEELDKYFKNHTSPDVDLGDISGINASVVNIQKEIDRLNEVAKNLNESLIDLQELGKYEQYIKGGGGSDIIKLLNEQVNKEMQSSNLYMSMSSWCYTHSLDGAGLFLFDHAAEEYEHAKKLIIFLNENNVPVQLTSISAPEHKFEGLTQIFQKAYEHEQHISESINNIVDHAIKSKDHATFNFLQWYVAEQHEEEVLFKDILDKIELIGNENHGLYLADQYVKGIAKSRKS
